United States Patent Application Publication US 2018/0126003 A1 - sequence listing, part 116

SEQ ID NO: 204175 - DNA, 1503 bp, Artificial Sequence
  derived and/or modified sequence
atgcgcggcgagttgtggctgttagttctggttcttagggaagctgcgcgtgccctgtcacctcagcccggcgcgggacatgatgagggaccagggtctgggtgggccgccaaaggcactgtacggggctggaatcgccgcgcacgggaatcccccggacatgtgagcgagccagataggacgcagttgtcgcaggatctgggcggcggaacactggcaatggacaccctgcccgataataggacaagggtggtggaggataaccactcctactacgtaagcaggctctatgggccctcagaacctcatagtcgcgaactgtgggttgatgtggccgaagctaatcgcagccaggtgaaaattcacaccatcctgtcgaacacccatcggcaggcctcacgcgtagtgctaagtttcgacttccccttctacggtcacccactgcgacagatcactattgctacaggaggcttcattttcatgggagatgtgattcacaggatgctgaccgccacgcagtacgtagcaccgctgatggcgaacttcaatcctggctattcagataactctaccgtggtgtacttcgataacggtactgtgtttgtggtacagtgggatcacgtttatctgcagggctgggaagacaaggggagtttcacattccaggccgccctccaccacgatggcaggattgtttttgcctataaagaaattccaatgagcgttcccgaaatctctagcagccagcaccctgtgaagaccggactctctgacgctttcatgatccttaaccctagcccggatgtgcccgagtcccggagaagatcaattttcgagtatcatcggatcgagcttgacccgagtaaagtcacttcaatgagtgctgtcgagtttaccccactgccaacgtgccttcagcacagaagctgtgacgcctgtatgtcttctgaccttactttcaattgttcctggtgtcacgtactgcagaggtgtagcagtgggtttgaccgatatcgccaggagtggatggactacggttgtgcccaggaggcggaaggccgtatgtgcgaagactttcaagatgaagatcatgactcagcctctcctgacacctctttttctccttacgatggagaccttaccacaacatcatctagtctgtttatagactccctcactactgaggatgacaccaagctcaatccttatgcaggcggagacggcctgcaaaataacctcagccccaagacgaaggggacaccggtacatcttgggaccattgtcgggattgtactggccgtgctgcttgttgctgcgatcatcctcgccgggatctacatcaacgggcatccgaccagcaatgccgcactgttctttattgagagacgcccccaccattggcccgctatgaaatttcgctcacatccagatcattccacgtatgccgaggtggaaccaagcgggcacgaaaaagagggctttatggaggctgaacaatgctag

SEQ ID NO: 204176 - DNA, 1014 bp, Artificial Sequence
  derived and/or modified sequence
atgcggggggagctgtggttactggtgctggttttgagggaagctgccagagcattgtcaccacagcctggcgccgggcacgatgaaggccctgggtcaggatgggcagccaaaggtactgtgcgagggtggaaccgacgagcccgcgaaagtccaggacacgtgagcgaaccggatcgaacacagctctcccaggatcttggaggcggaacactcgcgatggacacactcccagataataggacccgggtggtggaggataatcattcctactacgtttcaaggctgtacgggccaagcgagccccatagtagagagctatgggtggatgtcgctgaggccaatagatcacaggtcaaaatccataccattttgtccaacacacatcggcaagccagcagggtagtactgagtttcgactttcccttctacggacatcctctgaggcagatcacaatagccaccggcggctttatattcatgggggatgtcatccatcgcatgttgaccgccactcagtacgtggctcctctgatggccaattttaatccaggctacagcgataattcgacagttgtgtacttcgataacgggaccgtattcgtcgtccagtgggaccatgtgtatcttcaggggtgggaggacaaaggatcttttactttccaggctgccttacatcacgatggcaggatcgtcttcgcgtataaggaaattccgatgagtgtgcccgaaatatctagctcccagcatccggtcaaaaccggactgtctgacgcatttatgatcttgaatccatccccggacgtcccggaatcgcgtcggcgctcaatctttgagtatcacaggatcgagctggacccttctaaggtaacctctatgtcagctgtggagtttacacccctgcccacatgcctgcagcaccggtcctgtgacgcctgcatgagctcagacctcacctttaactgttcctggtgtcacgtgctgcagagcagggacgaagtgagcccctgctag

SEQ ID NO: 204177 - DNA, 1284 bp, Artificial Sequence
  derived and/or modified sequence
atggatacattgcccgataataggaccagggttgtggaggataatcactcatattatgtaagtaggctctacggaccaagcgagcctcatagtagggaactgtgggtggatgttgcagaagccaacagatcccaggtaaaaatacataccatcttaagtaatactcacaggcaggcaagtcgtgtcgtcttatccttcgatttcccgttttacggccacccactgcggcagattaccattgccaccggagggttcatctttatgggtgatgtgatccaccgcatgctgaccgccacccaatatgtggcccccctcatggccaacttcaatcctggttactctgacaacagtactgtggtttatttcgacaacggaaccgtattcgtcgtgcagtgggatcatgtgtacctgcaagggtgggaagataaagggagttttaccttccaagcggcactccatcatgatggaaggatcgtgtttgcctataaggagatacccatgtctgttcctgagatctcctccagtcaacatcctgtaaagacaggcttgagcgatgcatttatgatcttgaatccatcaccagacgtgcctgagagtagaagacgctctatcttcgagtaccatagaatcgaactggatccttctaaagtgacttccatgtctgccgtcgagttcacgcctttgcccacctgtctccagcatcggtcatgtgacgcttgcatgagctcagaccttactttcaattgttcttggtgtcatgtactgcagcggtctctcaataaccaggatgaaaatacctatgttaactgtttggactcacagcagtgccacggctccagtgagtccagaagacctttccaagacgaagatcatgacagcgcaagcccagatacctccttcagcccttacgacggggatctgacgactacctcgagcagtctgttcattgattctttgacgacggaggacgacaccaagctgaatccctatgcgggaggagatggtttacaaaacaacctcagccccaagaccaaaggcaccccagtccacctcggaactatagtcggaatcgtgctggctgttctgctggtcgccgcaatcattttggcagggatatacatcaacggtcacccaacttcaaacgctgcactgttcttcattgaaaggagaccgcatcactggcccgccatgaaatttaggtcccatcccgaccattcaacatatgctgaagtggaaccatctgggcatgagaaagaaggatttatggaggccgagcagtgctag

SEQ ID NO: 204178 - DNA, 375 bp, Artificial Sequence
  derived and/or modified sequence
atggatactctcccagacaatcgaacccgggtggtggaggacaaccactcttactacgtttcccgcttatatggaccctcagaaccacactctcgggagctttgggtcgacgtcgccgaagccaatagatctcaagttaagattcataccattcttagtaatacccaccggcaggcctcgcgggtcgtgctgagcttcgactttccgttctacgggcacccattgcggcagattaccattgccacaggaggcttcatcttcatgggtgatgtgattcataggatgctcaccgctacccagtacgtggctccactgatggcaaattttaatcccggctattccgataactctaccgtcgtgtacttcgataattag

SEQ ID NO: 204179 - DNA, 669 bp, Artificial Sequence
  derived and/or modified sequence
atggacactctgccagataataggacacgagtagtcgaggacaatcattcatattatgtgtcgaggctgtacggcccctcagaaccccactctagggaattatgggtggatgttgcagaagctaatcggtcccaggtgaagattcacacgatattgagcaatactcacagacaggcctctcgcgttgtgctgtcttttgatttcccattttatggccatccactgcggcagatcactattgccacaggtggttttatttttatgggcgatgtcatccaccggatgctgaccgcaacacagtatgtggcccctctgatggctaatttcaaccctgggtactcggataactctacagtggtctacttcgacaatggaacggtttttgtcgtccagtgggaccatgtctacttgcaaggatgggaagacaaggggagcttcaccttccaagccgcactgcaccatgacggccgcattgtctttgcctataaggagatccccatgtcagtgccagaaatcagctcaagccaacaccctgtaaagacgggactctctgacgcattcatgatattgaacccaagccctgacgtcccagagtctaggcgacggtcaatctttgagtaccatagaatagagcttgatcccagcaaggtgacatccatgtccgcctag

SEQ ID NO: 204180 - DNA, 198 bp, Artificial Sequence
  derived and/or modified sequence
taatctttcacctttcaggcagccctccaccatgatggccgcatcgtattcgcatacaaggaaatcccaatgtccgttccggagatctcctcaagccagcatcctgtgaagacaggtctatctgatgcgttcatgatacttaacccgagtcctgatgtgcctgggtttagtgcagagagcgctaaacacttgtggtag

SEQ ID NO: 204181 - DNA, 1383 bp, Artificial Sequence
  derived and/or modified sequence
atggccctgtcagtgcgtacccttccactgagaggcttcctggttcctcgaccacaaccaaccagatctcaggatgcgcctagtccgcgtctgccgctgagcagtgcaccagctccctgcagacacaaaaatgaggaagacaatcactcctactatgtgtcccggctctatggtccttcggaaccccactctcgcgagctctgggtggatgtggccgaagccaaccgttcccaggttaagatacatactattttgagcaacacccaccgtcaggcctccagagtggtgctgtctttcgatttcccattttacggccacccactgcgacagattacaatcgcaacgggcgggtttatctttatgggagatgtcattcacagaatgctcaccgcaacgcaatatgtcgcgcctctaatggccaacttcaaccctggctactccgacaactccaccgtggtgtacttcgacaacgggacagtgtttgtggttcagtgggaccatgtttacctgcaaggctgggaggataaagggagctttactttccaggccgcactgcaccacgatggtcgaatagtctttgcgtacaaagagatccccatgtctgttcctgagatttcttcctcacagcatcccgttaagacgggtctgtctgacgcctttatgattctcaacccctcgccagatgtccctgagtctagacgccgctcaatcttcgagtaccacaggatcgaactcgatccttcaaaggtgacctctatgagtgctgtagagttcacgcctctcccaacatgcttacagcatcggtcttgtgacgcatgcatgtcatctgacttaacatttaactgtagctggtgccatgtcctccagagatgttcttctggctttgatagatacagacaggaatggatggattatggatgcgcccaagaggctgaaggacgcatgtgcgaagactttcaggatgaggaccatgattccgccagcccagatacatcttttagcccatatgatggcgacctgactacaacgtcatcttccctcttcattgactcgcttacaactgaggacgataccaagttgaatccttacgcaggcggcgatggtctccagaataaccttagccctaagacaaagggcactcctgtccatcttggcactatcgtaggaattgtcctggccgtgctgcttgtggccgctattattctggcgggaatttacattaatgggcaccccacctccaatgctgcgcttttcttcattgaaagaagaccacatcactggccagctatgaagttccgtagccaccccgaccattcaacttacgctgaggtggaaccctctggccacgagaaagaggggttcatggaagcggagcaatgttag

SEQ ID NO: 204182 - DNA, 723 bp, Artificial Sequence
  derived and/or modified sequence
atggacacactgcccgataatcgcaccagggtggtcgaggataatcactcatactacgtatccaggttgtacggcccttccgagccacattcccgggagctctgggttgatgttgctgaggctaataggtcacaggtgaaaatacacactattcttagcaatacacatcgacaggccagcagagtggtgctgagcttcgacttccctttctacgggcatccactcagacagatcactatcgccaccggtggcttcattttcatgggcgacgttatccaccggatgctcactgcaacccagtatgttgccccactgatggcaaacttcaatccaggctatagcgacaacagtaccgtggtctatttcgataacggcacagtgttcgtggtgcagtgggaccacgtgtatctgcaggggtgggaggataagggctcatttaccttccaggcagcacttcaccacgatgggagaattgtcttcgcttataaggaaatccctatgtcagtccctgaaatctcgtcctcacagcaccccgtgaaaaccgggttgagcgacgcctttatgattctcaatcctagccccgatgtgccagagagtcgtagacgctcaattttcgaatatcaccggatagagctggacccttctaaggtcacgtccatgagtgcagtggagttcaccccccttccttctccttccactaccaggatgaagacaagaatgtag

SEQ ID NO: 204183 - DNA, 1503 bp, Artificial Sequence
  derived and/or modified sequence
atgagaggagagctgtggctgctggtgctggtgctgcgggaggccgcccgggccctgagcccccagcctggagctggccatgatgagggccctggcagcggctgggccgccaagggcaccgtgcggggctggaacagaagagcccgggagagccctggccacgtgtctgagccagacaggacccagctgagccaggacctgggcggcggcaccctggccatggacaccctgcctgacaacagaaccagggtggtggaggacaaccacagctactacgtgtcccggctgtatggccccagcgagccccacagccgggagctgtgggtggatgtggccgaggccaacagaagccaggtgaagatccacaccatcctgagcaacacccaccggcaggccagccgggtggtgctgagctttgacttccccttctacggccaccccctgcggcagatcaccatcgccactggaggcttcatcttcatgggagatgtgatccacaggatgctgacagccacccagtatgtggcccccctgatggccaacttcaaccctggctacagcgacaacagcacagtggtgtactttgacaatggaacagtgtttgtggtgcagtgggaccacgtgtacctgcagggctgggaggacaagggcagcttcaccttccaggccgccctgcaccatgatggaagaattgtgtttgcctacaaggagatccccatgtctgtgcctgagatcagcagcagccagcaccctgtgaagacaggcctgagtgatgccttcatgatcctgaaccccagcccagatgtgcctgagagcagaagaagaagcatctttgagtaccacagaattgagctggaccccagcaaggtgacctccatgtctgctgtggagttcacccccctgcccacctgcctgcagcacaggagctgtgatgcctgcatgagcagtgacctgaccttcaactgctcctggtgccacgtgctgcagcgctgcagcagcggctttgaccgctaccggcaggagtggatggactatggctgtgcccaggaggccgagggccgcatgtgtgaggacttccaggatgaggaccatgacagcgccagcccagacaccagcttcagcccctatgatggagacctgaccaccaccagcagcagcctcttcatcgacagcctgaccacagaagatgacaccaagctgaacccctatgctggaggagatggcctgcagaacaacctgagccccaagaccaagggcacccctgtgcacctgggcaccatcgtgggcatcgtgctggccgtgctgctggtggccgccatcatcctggccggcatctacatcaatggccaccccaccagcaatgctgccctcttcttcatcgagcggcggccccaccactggccagccatgaagttccgcagccacccagaccacagcacctacgccgaggtggagcccagcggccacgagaaggagggcttcatggaggccgagcagtgctag

SEQ ID NO: 204184 - DNA, 1014 bp, Artificial Sequence
  derived and/or modified sequence
atgagaggagagctgtggctgctggtgctggtgctgcgggaggccgcccgggccctgagcccccagcctggagctggccatgatgagggccctggcagcggctgggccgccaagggcaccgtgcggggctggaacagaagagcccgggagagccctggccacgtgtctgagccagacaggacccagctgagccaggacctgggcggcggcaccctggccatggacaccctgcctgacaacagaaccagggtggtggaggacaaccacagctactacgtgtcccggctgtatggccccagcgagccccacagccgggagctgtgggtggatgtggccgaggccaacagaagccaggtgaagatccacaccatcctgagcaacacccaccggcaggccagccgggtggtgctgagctttgacttccccttctacggccaccccctgcggcagatcaccatcgccactggaggcttcatcttcatgggagatgtgatccacaggatgctgacagccacccagtatgtggcccccctgatggccaacttcaaccctggctacagcgacaacagcacagtggtgtactttgacaatggaacagtgtttgtggtgcagtgggaccacgtgtacctgcagggctgggaggacaagggcagcttcaccttccaggccgccctgcaccatgatggaagaattgtgtttgcctacaaggagatccccatgtctgtgcctgagatcagcagcagccagcaccctgtgaagacaggcctgagtgatgccttcatgatcctgaaccccagcccagatgtgcctgagagcagaagaagaagcatctttgagtaccacagaattgagctggaccccagcaaggtgacctccatgtctgctgtggagttcacccccctgcccacctgcctgcagcacaggagctgtgatgcctgcatgagcagtgacctgaccttcaactgctcctggtgccacgtgctgcagagcagagatgaggtgagcccctgctag

SEQ ID NO: 204185 - DNA, 1284 bp, Artificial Sequence
  derived and/or modified sequence
atggacaccctgcctgacaacagaaccagggtggtggaggacaaccacagctactacgtgtcccggctgtatggccccagcgagccccacagccgggagctgtgggtggatgtggccgaggccaacagaagccaggtgaagatccacaccatcctgagcaacacccaccggcaggccagccgggtggtgctgagctttgacttccccttctacggccaccccctgcggcagatcaccatcgccaccggcggcttcatcttcatgggagatgtgatccacaggatgctgacagccacccagtatgtggcccccctgatggccaacttcaaccctggctacagcgacaacagcacagtggtgtactttgacaatggcaccgtgtttgtggtgcagtgggaccacgtgtacctgcagggctgggaggacaagggcagcttcaccttccaggccgccctgcaccatgatggccgcatcgtgtttgcctacaaggagatccccatgtctgtgcctgagatcagcagcagccagcaccctgtgaagacaggcctgagtgatgccttcatgatcctgaaccccagcccagatgtgcctgagagcagaagaagaagcatctttgagtaccaccgcatcgagctggaccccagcaaggtgacctccatgtctgctgtggagttcacccccctgcccacctgcctgcagcacaggagctgtgatgcctgcatgagcagtgacctgaccttcaactgctcctggtgccacgtgctgcagaggagcctgaacaaccaggatgagaacacctacgtgaactgcctggacagccagcagtgccacggcagcagcgagagcagaagacccttccaggatgaagatcatgattctgccagcccagacaccagcttcagcccctatgatggagacctgaccaccaccagcagcagcctcttcatcgacagcctgaccacagaagatgacaccaagctgaacccctatgctggaggagatggcctgcagaacaacctgagccccaagaccaagggcacccctgtgcacctgggcaccatcgtgggcatcgtgctggccgtgctgctggtggccgccatcatcctggccggcatctacatcaatggccaccccaccagcaatgctgccctcttcttcattgaaagaagaccccaccactggccagccatgaagttccgcagccacccagaccacagcacctatgcagaggtggagcccagcggccacgagaaggagggcttcatggaggccgagcagtgctag

SEQ ID NO: 204186 - DNA, 375 bp, Artificial Sequence
  derived and/or modified sequence
atggacaccctgcctgacaacagaaccagggtggtggaggacaaccacagctactacgtgtcccggctgtatggccccagcgagccccacagccgggagctgtgggtggatgtggccgaggccaacagaagccaggtgaagatccacaccatcctgagcaacacccaccggcaggccagccgggtggtgctgagctttgacttccccttctacggccaccccctgcggcagatcaccatcgccaccggcggcttcatcttcatgggagatgtgatccacaggatgctgacagccacccagtatgtggcccccctgatggccaacttcaaccctggctacagcgacaacagcacagtggtgtactttgacaactag

SEQ ID NO: 204187 - DNA, 669 bp, Artificial Sequence
  derived and/or modified sequence
atggacaccctgcctgacaacagaaccagggtggtggaggacaaccacagctactacgtgtcccggctgtatggccccagcgagccccacagccgggagctgtgggtggatgtggccgaggccaacagaagccaggtgaagatccacaccatcctgagcaacacccaccggcaggccagccgggtggtgctgagctttgacttccccttctacggccaccccctgcggcagatcaccatcgccaccggcggcttcatcttcatgggagatgtgatccacaggatgctgacagccacccagtatgtggcccccctgatggccaacttcaaccctggctacagcgacaacagcacagtggtgtactttgacaatggcaccgtgtttgtggtgcagtgggaccacgtgtacctgcagggctgggaggacaagggcagcttcaccttccaggccgccctgcaccatgatggccgcatcgtgtttgcctacaaggagatccccatgtctgtgcctgagatcagcagcagccagcaccctgtgaagacaggcctgagtgatgccttcatgatcctgaaccccagcccagatgtgcctgagagcagaagaagaagcatctttgagtaccaccgcatcgagctggaccccagcaaggtgacctccatgtctgcctag

SEQ ID NO: 204188 - DNA, 198 bp, Artificial Sequence
  derived and/or modified sequence
tgaagcttcaccttccaggccgccctgcaccatgatggaagaattgtgtttgcctacaaggagatccccatgtctgtgcctgagatcagcagcagccagcaccctgtgaagacaggcctgagtgatgccttcatgatcctgaaccccagcccagatgtgcccggcttctctgctgagagcgccaagcacctgtggtag

SEQ ID NO: 204189 - DNA, 1383 bp, Artificial Sequence
  derived and/or modified sequence
atggccctgtctgtgaggaccctgcccctgcggggcttcctggtgccccggccccagcccaccaggagccaggatgcccccagcccccggctgcccctgagcagcgccccagccccctgccgccacaagaatgaggaggacaaccacagctactacgtgtcccggctgtatggccccagcgagccccacagccgggagctgtgggtggatgtggccgaggccaacagaagccaggtgaagatccacaccatcctgagcaacacccaccggcaggccagccgggtggtgctgagctttgacttccccttctacggccaccccctgcggcagatcaccatcgccactggaggcttcatcttcatgggagatgtgatccacaggatgctgacagccacccagtatgtggcccccctgatggccaacttcaaccctggctacagcgacaacagcacagtggtgtactttgacaatggaacagtgtttgtggtgcagtgggaccacgtgtacctgcagggctgggaggacaagggcagcttcaccttccaggccgccctgcaccatgatggaagaattgtgtttgcctacaaggagatccccatgtctgtgcctgagatcagcagcagccagcaccctgtgaagacaggcctgagtgatgccttcatgatcctgaaccccagcccagatgtgcctgagagcagaagaagaagcatctttgagtaccacagaattgagctggaccccagcaaggtgacctccatgtctgctgtggagttcacccccctgcccacctgcctgcagcacaggagctgtgatgcctgcatgagcagtgacctgaccttcaactgctcctggtgccacgtgctgcagcgctgcagcagcggctttgaccgctaccggcaggagtggatggactatggctgtgcccaggaggccgagggccgcatgtgtgaggacttccaggatgaggaccatgacagcgccagcccagacaccagcttcagcccctatgatggagacctgaccaccaccagcagcagcctcttcatcgacagcctgaccacagaagatgacaccaagctgaacccctatgctggaggagatggcctgcagaacaacctgagccccaagaccaagggcacccctgtgcacctgggcaccatcgtgggcatcgtgctggccgtgctgctggtggccgccatcatcctggccggcatctacatcaatggccaccccaccagcaatgctgccctcttcttcatcgagcggcggccccaccactggccagccatgaagttccgcagccacccagaccacagcacctacgccgaggtggagcccagcggccacgagaaggagggcttcatggaggccgagcagtgctag

SEQ ID NO: 204190 - DNA, 723 bp, Artificial Sequence
  derived and/or modified sequence
atggacaccctgcctgacaacagaaccagggtggtggaggacaaccacagctactacgtgtcccggctgtatggccccagcgagccccacagccgggagctgtgggtggatgtggccgaggccaacagaagccaggtgaagatccacaccatcctgagcaacacccaccggcaggccagccgggtggtgctgagctttgacttccccttctacggccaccccctgcggcagatcaccatcgccaccggcggcttcatcttcatgggagatgtgatccacaggatgctgacagccacccagtatgtggcccccctgatggccaacttcaaccctggctacagcgacaacagcacagtggtgtactttgacaatggcaccgtgtttgtggtgcagtgggaccacgtgtacctgcagggctgggaggacaagggcagcttcaccttccaggccgccctgcaccatgatggccgcatcgtgtttgcctacaaggagatccccatgtctgtgcctgagatcagcagcagccagcaccctgtgaagacaggcctgagtgatgccttcatgatcctgaaccccagcccagatgtgcctgagagcagaagaagaagcatctttgagtaccaccgcatcgagctggaccccagcaaggtgacctccatgtctgctgtggagttcacccccctgcccagccccagcaccaccaggatgaagaccaggatgtag

SEQ ID NO: 204191 - DNA, 1503 bp, Artificial Sequence
  derived and/or modified sequence
atgcggggcgagctgtggctgctggtgctggtgctgcgggaggccgctagagccctgagtccccaaccaggggccggccacgacgagggccccggctctggttgggcggccaaaggtactgtgcgtggatggaacagaagagccagagaatctccgggacacgtctcagaacccgacagaacacaactctctcaggatctggggggaggcaccttggccatggatacactgcctgacaatcgaacacgcgtggttgaggataatcacagttactatgtgtcacggctctacggaccatccgaaccccatagccgcgaactctgggtggatgttgccgaagcaaataggtctcaggttaaaattcacaccattctgagcaacacacacaggcaggcctccagagtcgtcttaagtttcgattttcccttctacgggcaccccctgcgtcagattaccatagccacagggggatttatttttatgggagatgtgattcaccggatgctgacagctactcaatatgttgcaccactgatggccaactttaatcccggatatagtgacaatagcactgttgtctactttgacaacggaacggtgttcgtagtgcagtgggaccatgtttacctccagggctgggaagacaaagggtctttcacgtttcaggctgccttgcatcacgacgggagaatcgtttttgcttacaaagagattcccatgtcggttcccgagatatcctcctctcagcaccctgtgaaaacagggttgtcagacgccttcatgatcttaaaccctagcccagatgtccccgagtcccgtaggcgatccattttcgagtaccaccggatcgagctagacccttctaaggtcacttccatgagtgccgtcgagttcactccccttcctacctgcctacagcataggtcttgtgacgcttgtatgtcttccgacctaacctttaattgtagttggtgccatgttctgcagaggtgttctagcgggttcgatcggtatcgccaggagtggatggattacggatgcgctcaagaggcagagggaaggatgtgcgaggattttcaggacgaagatcacgacagcgccagcccagacaccagcttctctccctacgacggcgatctgacgacaacctcgagcagcttgtttatcgatagtctgacaactgaagacgacactaagctcaacccatatgctggtggagatggactgcagaacaacctttcgcctaagaccaagggcactccggtgcacctcggaactattgttggaatcgtgcttgcagtgctgctggtcgctgccattatccttgccgggatctacattaatggccatcctacttcgaacgctgctctgtttttcatcgagagaagacctcaccattggcctgccatgaagtttagatctcatccggatcactcaacatacgccgaagtggaaccttccggccacgagaaagaaggctttatggaagctgagcaatgttag

SEQ ID NO: 204192 - DNA, 1014 bp, Artificial Sequence
  derived and/or modified sequence
atgcggggcgagctgtggctgctggtgctggtgctgcgggaggccgctagagcattgagccctcaacctggtgccggccacgacgaaggtccgggttcaggctgggccgccaaaggaactgttagggggtggaacaggcgcgcgagggagtcgcctgggcacgtaagcgagcccgatagaactcagctttcacaggatctcggaggaggcactcttgccatggatacattgcccgacaatcgcacgcgtgtagtcgaagataatcacagttattatgtctcccggctctacgggccaagcgaaccccacagtagggaactgtgggtggatgtggcagaggccaaccgttctcaggtgaagatccacacaatcctctccaatacacaccggcaggccagccgggtcgtcctgtcattcgactttcctttttatggccatcctctacgccaaattacgatcgcgactggcggttttatcttcatgggagacgtaattcatcgcatgctgactgcaacccagtatgtggcgccactcatggcgaacttcaatcccggatactctgataactccacagtggtgtacttcgacaacggcactgtgttcgttgtccagtgggatcacgtttacttgcagggctgggaggacaaaggaagttttacatttcaggctgcacttcatcacgatgggagaatagtctttgcttacaaggaaattcctatgtcagtgccagagataagttcgtcccagcaccccgtcaaaactggtctgtccgatgcttttatgattttaaatcccagcccggatgtgccagagtcccgcaggcgctctatctttgagtaccaccgtattgagctggacccctccaaggtaaccagtatgtccgctgttgaattcactccactgcccacatgcttacagcatcgttcctgcgacgcttgtatgtcgtccgacctgacttttaactgcagttggtgccacgtcttgcagagccgtgatgaggttagcccatgttag

SEQ ID NO: 204193 - DNA, 1284 bp, Artificial Sequence
  derived and/or modified sequence
atggacaccctgcccgacaaccggacccgggtggtggaggacaaccatagttattatgttagcaggttgtatggtccttcagagccgcattccagagaactttgggtggatgtagccgaagctaacagatctcaggttaagattcatacgatcctctctaacacccatagacaggcttctcgagtcgtgttgtcattcgattttcccttttatggccaccccctgcgccagattactattgccactggcggatttatcttcatgggcgacgtgatccaccggatgctgacagcaacgcagtacgtggcgcctttgatggctaatttcaatcccgggtacagcgacaactctaccgtcgtgtatttcgacaacggcaccgtgtttgtggtgcaatgggatcacgtgtatctccagggatgggaggataagggctctttcacatttcaggccgcactccaccacgatggtcgcatcgtgtttgcttataaagaaatcccaatgagcgttcccgagatctccagctcccagcacccagtgaaaacaggtctttctgacgctttcatgatcttgaatcctagccctgacgttccagaaagccgaaggaggtcaatttttgagtaccataggatagagctggacccgtctaaagtgacctccatgtcagccgtcgagttcacgccactgccaacctgtctgcaacatagatcttgtgatgcctgtatgtcaagtgatctgacattcaactgctcatggtgccatgtcttgcaacgtagccttaataatcaggacgaaaacacctacgtgaattgtctggactctcagcagtgccacggctctagtgagagtcggcgcccattccaagacgaagaccatgacagcgcgtcacccgacacgagcttctctccatacgatggagatctgacgaccaccagctcttctctgttcatcgatagccttacaacagaggatgatactaaactgaatccgtacgctgggggcgatggcttgcagaacaacctgtctcccaagaccaaaggcacccccgtacacctcggcactattgtcggcatcgtgttggccgttttgctggtggccgccatcatcctcgccggtatttacattaatgggcaccccactagcaatgcagctctgttcttcattgaaaggaggcctcatcactggcctgctatgaagttcaggagccaccccgaccacagcacatatgccgaagttgaaccgagcggtcacgagaaggaaggatttatggaagcagagcagtgttag

SEQ ID NO: 204194 - DNA, 375 bp, Artificial Sequence
  derived and/or modified sequence
atggacaccctgcccgacaaccggacccgggtggtggaggacaaccacagttattacgtctcacggctgtacggccccagtgagcctcattctcgtgagctgtgggtggacgtggcggaagccaatagatcccaggtaaagatccatacaattctatccaatacacacaggcaagcttcccgcgtggtgcttagctttgactttcccttttacggacatccattgaggcagatcaccattgccacaggtggctttatcttcatgggggacgtgatacataggatgctgacggctacacagtatgtggcaccattgatggcaaactttaatcctgggtactctgataactccactgtggtgtactttgataactag

SEQ ID NO: 204195 - DNA, 669 bp, Artificial Sequence
  derived and/or modified sequence
atggacaccctgcccgacaaccggacccgggtggtggaggacaaccacagctactacgtctcacggctgtacggcccaagcgaaccacacagtagagagctctgggttgacgtcgccgaagccaatcgcagccaggtaaagatccacacaatactttctaacacacatcgtcaggcatctcgggtggtactaagcttcgatttccccttctacggtcacccccttcgccaaatcactatcgccacagggggctttatctttatgggagatgttattcatagaatgcttaccgccacccaatatgttgcccccctcatggccaacttcaaccccgggtacagcgataattcaacagtcgtctactttgataatgggactgtgttcgtggtgcagtgggaccacgtgtaccttcaaggctgggaagataaaggtagctttacttttcaggctgctttacaccacgacggccgaatagtcttcgcttacaaagaaataccaatgagtgtgccagagataagtagttcccagcaccccgtgaaaactggactctccgatgcgttcatgatactgaacccatcccctgatgtgccagagagcaggcggcgtagcattttcgagtaccaccgaatcgagcttgatccgtccaaagttacgagcatgtccgcttag

SEQ ID NO: 204196 - DNA, 198 bp, Artificial Sequence
  derived and/or modified sequence
tgaagcttcaccttccaggccgccctgcaccacgacggccggatcgtgtttgcctacaaggagatccccatgtccgtgcccgagatctctagcagtcagcaccctgtcaagacaggactgtccgacgcctttatgatactgaacccaagcccagatgtgcccggattctccgcagaatccgcgaaacatctgtggtag

SEQ ID NO: 204197 - DNA, 1383 bp, Artificial Sequence
  derived and/or modified sequence
atggccctgagcgtgcggaccctgcccctgcggggcttcctggtgccacggccccagcctacgcgcagccaggatgcaccaagccctcgactcccattgtcatccgctcccgctccctgccggcataagaatgaagaagacaaccactcatattatgtatctcgactgtacggccccagcgagccccactccagagaactgtgggtcgacgtagctgaggctaatcgctcacaggttaagattcatactattctgagtaacactcatagacaggccagccgcgtggtcctaagttttgacttccccttctacgggcatccactgcgccaaattaccatcgcaacgggcggtttcatctttatgggcgatgtgattcatcggatgcttaccgccacacagtatgtagcgcccctgatggcaaactttaaccctggctactcggataattccacagtggtctacttcgacaatggcaccgtgttcgtggttcagtgggatcacgtatacctacagggatgggaggacaaaggtagttttacttttcaggcagctctgcaccatgacggtaggatcgtgtttgcctacaaagaaattccaatgtccgttcctgagattagttcgagccagcacccagtcaaaacaggactgtctgatgcatttatgatcctcaatccatctccggatgtcccagaaagtcgtagacgtagtatctttgagtaccaccgaatcgagctcgacccctccaaagtgacctccatgtcggcagtggaattcactcccctgcccacttgcctgcagcatcggtcttgtgacgcatgtatgtcctccgatttaacatttaactgttcatggtgccacgttctgcagagatgcagcagcggtttcgatcgttatcggcaggaatggatggattacggttgcgcccaggaggccgagggtaggatgtgcgaggattttcaggatgaagaccatgactctgcctccccagacaccagcttcagcccttatgatggggacctgacaactaccagttccagtctttttatagattccctgacaactgaagacgacacaaaactgaacccttacgcagggggagatggattgcagaataacttgtccccgaaaacaaagggcacccctgtacacttgggcaccatagtggggatcgttctggccgtgcttctagtggcagctattatcctcgccgggatctacattaatggtcaccccaccagcaatgccgcattatttttcattgaacggcgacctcaccattggcccgccatgaaattccgatctcaccctgatcactccacgtatgcagaagtggagccctctggacatgaaaaggaaggatttatggaagcagagcagtgctag

SEQ ID NO: 204198 - DNA, 723 bp, Artificial Sequence
  derived and/or modified sequence
atggacaccctgcccgacaaccggacccgggtggtggaggacaaccattcttattatgtgtcacggctctacgggccgagcgagccccactcccgggagttgtgggtggacgtcgccgaagcaaatcgcagtcaggttaagatccacaccatcctgtccaatacacacagacaggctagcagagtggtgctgagctttgactttccgttttacggccatcctttgcgccaaatcactattgctactggagggttcatcttcatgggtgatgtgatccataggatgctgactgccacacaatacgtggctccactgatggctaattttaaccctggctattcggataatagcacggtggtatacttcgataacggtactgtttttgttgtccagtgggatcatgtgtatcttcagggctgggaggataaaggaagctttactttccaagctgcgctccatcatgacggccggattgtgtttgcatacaaagaaatccccatgtcagtgccagaaatttccagttcacagcatccagtgaagaccggcctttctgacgcattcatgatcctgaatcctagccccgacgtgccagagagtaggcggcggtcaatcttcgagtatcacaggatcgagctggatccctcgaaggtaacctccatgtcagccgtagagttcacccctctgcctagtcccagtactaccaggatgaagacacgcatgtag

SEQ ID NO: 204199 - DNA, 6218 bp, Artificial Sequence
  derived and/or modified sequence
agctccgctcgcgctctcgccgctcctgccggctcgcccggccccgcgctccgccgtctcctcgccgcccgcccctccgccagccccggggaccgcgcggccgcagcctgagccagggccccctccctcgtcaggaccggggcagcaagcaggccgggggcaggtccgggcacccaccatgcgaggcgagctctggctcctggtgctggtgctcagggaggctgcccgggcgctgagcccccagcccggagcaggtcacgatgagggcccaggctctggatgggctgccaaagggaccgtgcggggctggaaccggagagcccgagagagccctgggcatgtgtcagagccggacaggacccagctgagccaggacctgggtgggggcaccctggccatggacacgctgccagataacaggaccagggtggtggaggacaaccacagctattatgtgtcccgtctctatggccccagcgagccccacagccgggaactgtgggtagatgtggccgaggccaaccggagccaagtgaagatccacacaatactctccaacacccaccggcaggcttcgagagtggtcttgtcctttgatttccctttctacgggcatcctctgcggcagatcaccatagcaactggaggcttcatcttcatgggggacgtgatccatcggatgctcacagctactcagtatgtggcgcccctgatggccaacttcaaccctggctactccgacaactccacagttgtttactttgacaatgggacagtctttgtggttcagtgggaccacgtttatctccaaggctgggaagacaagggcagtttcaccttccaggcagctctgcaccatgacggccgcattgtctttgcctataaagagatccctatgtctgtcccggaaatcagctcctcccagcatcctgtcaaaaccggcctatcggatgccttcatgattctcaatccatccccggatgtgccagaatctcggcgaaggagcatctttgaatatcaccgcatagagctggaccccagcaaggtcaccagcatgtcggccgtggagttcaccccattgccgacctgcctgcagcataggagctgtgacgcctgcatgtcctcagacctgaccttcaactgcagctggtgccatgtcctccagagatgctccagtggctttgaccgctatcgccaggagtggatggactatggctgtgcacaggaggcagagggcaggatgtgcgaggacttccaggatgaggaccacgactcagcctcccctgacacttccttcagcccctatgatggagacctcaccactacctcctcctccctcttcatcgacagcctcaccacagaagatgacaccaagttgaatccctatgcaggaggagacggccttcagaacaacctgtcccccaagacaaagggcactcctgtgcacctgggcaccatcgtgggcatcgtgctggcagtcctcctcgtggcggccatcatcctggctggaatttacatcaatggccaccccacatccaatgctgcgctcttcttcatcgagcgtagacctcaccactggccagccatgaagtttcgcagccaccctgaccattccacctatgcggaggtggagccctcgggccatgagaaggagggcttcatggaggctgagcagtgctgagaacaccaagtctcccctttgaagactttgaggccacagaaaagacagttaaagcaaagaagagaagtgacttttcctggcctctcccagcatgccctgggctgagatgagatggtggtttatggctccagagctgctgctcgcttcgtcagcacaccccgaatattgaagagggggccaaaaaacaaccacatggattttttataggaacaacaacctaatctcatcctgttttgatgcaagggttctcttctgtgtcttgtaaccatgaaacagcagaagaactaacataactaactccatttttgtttaaggggcctttacctattcctgcacctaggctaggataactttagagcactgacataaaacgcaaaaacaggaatcatgccgtttgcaaaactaactctgggattaaaggggaagcatgtaaacagctaactgtttttgttaaagatttataggaatgaggaggtttggctattgtcacatgacagactgttagccaaggacaaagaagttctgcaaacctcccctggacccttgctggtgtccagatgtctgcggttgtcagccccttcctttcccccgacctaaacataaaagacaaggcaaagcccgcataattttaagacggttctttaggacattagtccaccatcttcttggtttgctggctctccgaaataaagtccctttccttgctccaactccttgtctctcaacgtattggctatgacgcagcaagcagaatgaatttggactcagttacaggctgtcaatggtctgctctgtagcagtctcagagcctccccgacccactacctggagatagccagatagccagatgccctgctcctggccacctttaaagcccctgcatatgacacaggttaactaaagtcaagattggggctgctgcattccaggttccctagactcacaagctggtccttggccaggtgcagtggctcacgcctgtaatcccagcactttgggaggctgaggcaggcggatcacctgaagtcagaagtttgagaccagcctggccaacataattaaaatgtctctactaaaaatacaaaaaattagctgggtgtggtgacgcttgcctgtatcccagctactcaggaagctgagacacgagaatcacttgaacctgggaggcagaggttgcagtgagctcagatagtgccactgcactccagcctgggtgacagagcgagactccgtctcaaaaaaaaaaaaagaaagcagatcctcatggctatagagttggcattttagccccagcttctgtagctctgaaagcctaaagaaggtattctctccatctgttaaacacagtatagtggctctcagcccttggggcatgttatcatgggagggaagtcaaataagaggagagaaaagaactcaagggggaaactgcatttttaggctttgctctcttaccttgccctttctactcagaaccaataacttctgcatcaaaacatgttacagcctgcatcaagggctttaccccaacctgcagcccagccttccctgggtgagcttgctatgcgcagccacatttaccatgtggggctccctattctgatggcctgttcggtgccgggtttactcactgccctgttctgatgtcagtgcctgtacatacctccaaaggcaggacttgcctgataaatatttttcctcctctgaactggattttataggcattaaagacaagtcgggtggctagagggctccttgagacatacctagcagggaactgcaggtggattctgttgagaggcaaagcacctgagtggttgggacacaggcagctggcatgggagggactttttttgagacagggtctcactgtgtcgcccagggcaaggatgcccaaagacaccaggttggagaggcacctgccaactacttgctttccctggagcctgcatgtgcctgtggggtggggaggcgtaggggtctacggctgcctgagatgggtgtgcacagtgtgtgaagtacctacctccttgccttgctggactgtcagccagtcgcagggccggccacaagacccatgtctccatctggtcatactccatagctaccaagttaacctgctctaaactttggagaactggatctgtccaataaacgcttatttggccaagcctgatggctcgtgcctgtactcccagcactttgggaggctgaggtgggagggttgcttgagcccaggggtttgagaccagcttgggcaacaacaacaaaaatgccaggtgtggtggggtgcacctgtagtcccagctactagggaggctgagccaggaggatcacttgagcccgggaggttgaggctgcagtggggggtcataatcatgccactgtactccagcctgggtgacagagtgagaccctgtctccgaaaaaaaaaaaaaaaaaaagaacggaaaaagaaatgcttacattgtcagggatcctgtagacaatcattaactctatgagatgcttggttctatttttttgggagactttgtccaagtgttttggcttaagaaatccataggcctctcttggtgacacatctctagtactttttgtcataaacaaacaggccatctgccgccaaatacatccactccccatgccactgacatcctatgggtcagccaggcttgctttgactgaggccgaggcatctggaactttctctgcctgcaggggctagcagcagaggcttcaccgcatcaccaccccttcctccactcctgacattctttcccttcagggatccaaaatggttggccgagctcccagtgggaaaacgtgtgctagagttggggagtgagatgagtggtgctgtccatggaatcaggccacagcaggaactgccccactggccatttgagacacacacaggtggtaaatgctctgctggtgggctgtgcttccctcattcagagagctctgttacagcccactgtgtcctttagaagcttgaaaggaacccaactctttgctgcactgtcctttttcttcctcaaattcagaccctccttccaccggcacccccctactccaccctcagctcttccttgcctggtttatcaagcagagctgaggccccacgtttccaactctgattgtcacttgcatcttcacaaaggataaaccacggagcaactggaaaaccatcagccaagcgttcggatgagtctggttattggtccacccccgaccagattcccttacacttaactcacttctttctttggcaatgaccctcatgacatgtataaatgggtatgactaagaagaggctgtgatctaacatttatttgctgccattttttactctggggagaagcagccccaactcatcactgggaaagaactccccctgcaaaccagctaaatttgataatttaaaccccctgcccctaaaacttctcacagagctggggagttggtggcaactttccaagtcaaggtcttgcttagaaagtccttcactacatggccaggtgcagtggctcacgcctgtagtcccaggtacttgggagcctgaggcaggaggattgcttgagctcaggagttcaaggctgcagagagctatgatcatcccactgcatttgtttaaaaataaatttttaaaatttgtgtgttttatcaggggtctcctgtacagtgtatctgtgtatgtttgtgtgtgtgtttgtatacagccttgtttaatgttttgagcaataagatatgcacacacaggtattttgttgctaaagagattggacaaggttgtagctgtgctcaggcttcagcttggtttgttaaattgagagataaacaatgacaagagctgccagccaaccacactattcaaaaagcaaagtgttcaccactaaagctaaccattcatctggttgcaggcaaggctaaggctctctctcctctagttcctggaacagactcacagattggcatgaagcactgatcaggggctgcactcagactccctggccaagcaaacctacaccagaagagtcagtgtcacagatatgatgcggccaatctctgtctccaaaaacctacctgaacttaatggtagaattcaaagatctggggactgagggcacccagccttctaaaacacaatgtattcatgtgtttagtgtaaactctctgcatggattctcagtgttaataataaaaggaagcattcttttacaactcctgctgtgtgcaaaagaaagtgcaaaggatttggagtggcattccgaagatcaccacacataccttggttctgatggctgctgaactccgacttcttcgctgagacatgactgtgggaacagcctccagctatctgctcatcagaggtgctttcctcaacctcctgcaccacctccaagagaaacagcctaaaaagaaaccccagctgtttacttatattggtctgtaaatccctggaagtaaaccccatgcatttttatctactgtctgaggacatacaataaatctgagaaagtctatgctgtca

SEQ ID NO: 204200 - DNA, 1226 bp, Artificial Sequence
  derived and/or modified sequence
agctccccgcctgctcccggaggccgcagcctccagctccgctcgcgctctcgccgctcctgccggctcgcccggccccgcgctccgccgtctcctcgccgcccgcccctccgccagccccggggaccgcgcggccgcagcctgagccagggccccctccctcgtcaggaccggggcagcaagcaggccgggggcaggtccgggcacccaccatgcgaggcgagctctggctcctggtgctggtgctcagggaggctgcccgggcgctgagcccccagcccggagcaggtcacgatgagggcccaggctctggatgggctgccaaagggaccgtgcggggctggaaccggagagcccgagagagccctgggcatgtgtcagagccggacaggacccagctgagccaggacctgggtgggggcaccctggccatggacacgctgccagataacaggaccagggtggtggaggacaaccacagctattatgtgtcccgtctctatggccccagcgagccccacagccgggaactgtgggtagatgtggccgaggccaaccggagccaagtgaagatccacacaatactctccaacacccaccggcaggcttcgagagtggtcttgtcctttgatttccctttctacgggcatcctctgcggcagatcaccatagcaactggaggcttcatcttcatgggggacgtgatccatcggatgctcacagctactcagtatgtggcgcccctgatggccaacttcaaccctggctactccgacaactccacagttgtttactttgacaatgggacagtctttgtggttcagtgggaccacgtttatctccaaggctgggaagacaagggcagtttcaccttccaggcagctctgcaccatgacggccgcattgtctttgcctataaagagatccctatgtctgtcccggaaatcagctcctcccagcatcctgtcaaaaccggcctatcggatgccttcatgattctcaatccatccccggatgtgccagaatctcggcgaaggagcatctttgaatatcaccgcatagagctggaccccagcaaggtcaccagcatgtcggccgtggagttcaccccattgccgacctgcctgcagcataggagctgtgacgcctgcatgtcctcagacctgaccttcaactgcagctggtgccatgtcctccagagtagagatgaggtttcaccgtgttag

SEQ ID NO: 204201 - DNA, 6251 bp, Artificial Sequence
  derived and/or modified sequence
agctccccgcctgctcccggaggccgcagcctccagctccgctcgcgctctcgccgctcctgccggctcgcccggccccgcgctccgccgtctcctcgccgcccgcccctccgccagccccggggaccgcgcggccgcagcctgagccagggccccctccctcgtcaggaccggggcagcaagcaggccgggggcaggtccgggcacccaccatgcgaggcgagctctggctcctggtgctggtgctcagggaggctgcccgggcgctgagcccccagcccggagcaggtcacgatgagggcccaggctctggatgggctgccaaagggaccgtgcggggctggaaccggagagcccgagagagccctgggcatgtgtcagagccggacaggacccagctgagccaggacctgggtgggggcaccctggccatggacacgctgccagataacaggaccagggtggtggaggacaaccacagctattatgtgtcccgtctctatggccccagcgagccccacagccgggaactgtgggtagatgtggccgaggccaaccggagccaagtgaagatccacacaatactctccaacacccaccggcaggcttcgagagtggtcttgtcctttgatttccctttctacgggcatcctctgcggcagatcaccatagcaactggaggcttcatcttcatgggggacgtgatccatcggatgctcacagctactcagtatgtggcgcccctgatggccaacttcaaccctggctactccgacaactccacagttgtttactttgacaatgggacagtctttgtggttcagtgggaccacgtttatctccaaggctgggaagacaagggcagtttcaccttccaggcagctctgcaccatgacggccgcattgtctttgcctataaagagatccctatgtctgtcccggaaatcagctcctcccagcatcctgtcaaaaccggcctatcggatgccttcatgattctcaatccatccccggatgtgccagaatctcggcgaaggagcatctttgaatatcaccgcatagagctggaccccagcaaggtcaccagcatgtcggccgtggagttcaccccattgccgacctgcctgcagcataggagctgtgacgcctgcatgtcctcagacctgaccttcaactgcagctggtgccatgtcctccagaggtccctcaacaaccaggatgaaaacacgtatgtgaattgcctggattctcagcagtgtcacggcagctcagagtcaaggcgacctttccaggatgaggaccacgactcagcctcccctgacacttccttcagcccctatgatggagacctcaccactacctcctcctccctcttcatcgacagcctcaccacagaagatgacaccaagttgaatccctatgcaggaggagacggccttcagaacaacctgtcccccaagacaaagggcactcctgtgcacctgggcaccatcgtgggcatcgtgctggcagtcctcctcgtggcggccatcatcctggctggaatttacatcaatggccaccccacatccaatgctgcgctcttcttcatcgagcgtagacctcaccactggccagccatgaagtttcgcagccaccctgaccattccacctatgcggaggtggagccctcgggccatgagaaggagggcttcatggaggctgagcagtgctgagaacaccaagtctcccctttgaagactttgaggccacagaaaagacagttaaagcaaagaagagaagtgacttttcctggcctctcccagcatgccctgggctgagatgagatggtggtttatggctccagagctgctgctcgcttcgtcagcacaccccgaatattgaagagggggccaaaaaacaaccacatggattttttataggaacaacaacctaatctcatcctgttttgatgcaagggttctcttctgtgtcttgtaaccatgaaacagcagaagaactaacataactaactccatttttgtttaaggggcctttacctattcctgcacctaggctaggataactttagagcactgacataaaacgcaaaaacaggaatcatgccgtttgcaaaactaactctgggattaaaggggaagcatgtaaacagctaactgtttttgttaaagatttataggaatgaggaggtttggctattgtcacatgacagactgttagccaaggacaaagaagttctgcaaacctcccctggacccttgctggtgtccagatgtctgcggttgtcagccccttcctttcccccgacctaaacataaaagacaaggcaaagcccgcataattttaagacggttctttaggacattagtccaccatcttcttggtttgctggctctccgaaataaagtccctttccttgctccaactccttgtctctcaacgtattggctatgacgcagcaagcagaatgaatttggactcagttacaggctgtcaatggtctgctctgtagcagtctcagagcctccccgacccactacctggagatagccagatagccagatgccctgctcctggccacctttaaagcccctgcatatgacacaggttaactaaagtcaagattggggctgctgcattccaggttccctagactcacaagctggtccttggccaggtgcagtggctcacgcctgtaatcccagcactttgggaggctgaggcaggcggatcacctgaagtcagaagtttgagaccagcctggccaacataattaaaatgtctctactaaaaatacaaaaaattagctgggtgtggtgacgcttgcctgtatcccagctactcaggaagctgagacacgagaatcacttgaacctgggaggcagaggttgcagtgagctcagatagtgccactgcactccagcctgggtgacagagcgagactccgtctcaaaaaaaaaaaaagaaagcagatcctcatggctatagagttggcattttagccccagcttctgtagctctgaaagcctaaagaaggtattctctccatctgttaaacacagtatagtggctctcagcccttggggcatgttatcatgggagggaagtcaaataagaggagagaaaagaactcaagggggaaactgcatttttaggctttgctctcttaccttgccctttctactcagaaccaataacttctgcatcaaaacatgttacagcctgcatcaagggctttaccccaacctgcagcccagccttccctgggtgagcttgctatgcgcagccacatttaccatgtggggctccctattctgatggcctgttcggtgccgggtttactcactgccctgttctgatgtcagtgcctgtacatacctccaaaggcaggacttgcctgataaatatttttcctcctctgaactggattttataggcattaaagacaagtcgggtggctagagggctccttgagacatacctagcagggaactgcaggtggattctgttgagaggcaaagcacctgagtggttgggacacaggcagctggcatgggagggactttttttgagacagggtctcactgtgtcgcccagggcaaggatgcccaaagacaccaggttggagaggcacctgccaactacttgctttccctggagcctgcatgtgcctgtggggtggggaggcgtaggggtctacggctgcctgagatgggtgtgcacagtgtgtgaagtacctacctccttgccttgctggactgtcagccagtcgcagggccggccacaagacccatgtctccatctggtcatactccatagctaccaagttaacctgctctaaactttggagaactggatctgtccaataaacgcttatttggccaagcctgatggctcgtgcctgtactcccagcactttgggaggctgaggtgggagggttgcttgagcccaggggtttgagaccagcttgggcaacaacaacaaaaatgccaggtgtggtggggtgcacctgtagtcccagctactagggaggctgagccaggaggatcacttgagcccgggaggttgaggctgcagtggggggtcataatcatgccactgtactccagcctgggtgacagagtgagaccctgtctccgaaaaaaaaaaaaaaaaaaagaacggaaaaagaaatgcttacattgtcagggatcctgtagacaatcattaactctatgagatgcttggttctatttttttgggagactttgtccaagtgttttggcttaagaaatccataggcctctcttggtgacacatctctagtactttttgtcataaacaaacaggccatctgccgccaaatacatccactccccatgccactgacatcctatgggtcagccaggcttgctttgactgaggccgaggcatctggaactttctctgcctgcaggggctagcagcagaggcttcaccgcatcaccaccccttcctccactcctgacattctttcccttcagggatccaaaatggttggccgagctcccagtgggaaaacgtgtgctagagttggggagtgagatgagtggtgctgtccatggaatcaggccacagcaggaactgccccactggccatttgagacacacacaggtggtaaatgctctgctggtgggctgtgcttccctcattcagagagctctgttacagcccactgtgtcctttagaagcttgaaaggaacccaactctttgctgcactgtcctttttcttcctcaaattcagaccctccttccaccggcacccccctactccaccctcagctcttccttgcctggtttatcaagcagagctgaggccccacgtttccaactctgattgtcacttgcatcttcacaaaggataaaccacggagcaactggaaaaccatcagccaagcgttcggatgagtctggttattggtccacccccgaccagattcccttacacttaactcacttctttctttggcaatgaccctcatgacatgtataaatgggtatgactaagaagaggctgtgatctaacatttatttgctgccattttttactctggggagaagcagccccaactcatcactgggaaagaactccccctgcaaaccagctaaatttgataatttaaaccccctgcccctaaaacttctcacagagctggggagttggtggcaactttccaagtcaaggtcttgcttagaaagtccttcactacatggccaggtgcagtggctcacgcctgtagtcccaggtacttgggagcctgaggcaggaggattgcttgagctcaggagttcaaggctgcagagagctatgatcatcccactgcatttgtttaaaaataaatttttaaaatttgtgtgttttatcaggggtctcctgtacagtgtatctgtgtatgtttgtgtgtgtgtttgtatacagccttgtttaatgttttgagcaataagatatgcacacacaggtattttgttgctaaagagattggacaaggttgtagctgtgctcaggcttcagcttggtttgttaaattgagagataaacaatgacaagagctgccagccaaccacactattcaaaaagcaaagtgttcaccactaaagctaaccattcatctggttgcaggcaaggctaaggctctctctcctctagttcctggaacagactcacagattggcatgaagcactgatcaggggctgcactcagactccctggccaagcaaacctacaccagaagagtcagtgtcacagatatgatgcggccaatctctgtctccaaaaacctacctgaacttaatggtagaattcaaagatctggggactgagggcacccagccttctaaaacacaatgtattcatgtgtttagtgtaaactctctgcatggattctcagtgttaataataaaaggaagcattcttttacaactcctgctgtgtgcaaaagaaagtgcaaaggatttggagtggcattccgaagatcaccacacataccttggttctgatggctgctgaactccgacttcttcgctgagacatgactgtgggaacagcctccagctatctgctcatcagaggtgctttcctcaacctcctgcaccacctccaagagaaacagcctaaaaagaaaccccagctgtttacttatattggtctgtaaatccctggaagtaaaccccatgcatttttatctactgtctgaggacatacaataaatctgagaaagtctatgctgtc

SEQ ID NO: 204202 - DNA, 619 bp, Artificial Sequence
  derived and/or modified sequence
cagctccttgccgtcacaagaacgaagtaggtcaggggagggaagaggcatcttcgtgtcctgacctgattccttgccgtctattaaatatcctacattgcgggtcacgatgagggcccaggctctggatgggctgccaaagggaccgtgcggggctggaaccggagagcccgagagagccctgggcatgtgtcagagccggacaggacccagctgagccaggacctgggtgggggcaccctggccatggacacgctgccagataacaggaccagggtggtggaggacaaccacagctattatgtgtcccgtctctatggccccagcgagccccacagccgggaactgtgggtagatgtggccgaggccaaccggagccaagtgaagatccacacaatactctccaacacccaccggcaggcttcgagagtggtcttgtcctttgatttccctttctacgggcatcctctgcggcagatcaccatagcaactggaggcttcatcttcatgggggacgtgatccatcggatgctcacagctactcagtatgtggcgcccctgatggccaacttcaaccctggctactccgacaactccacagttgtttactttgacaatg

SEQ ID NO: 204203 - DNA, 876 bp, Artificial Sequence
  derived and/or modified sequence
ccaggatgccccctcaccccgtctcccactctccagcgccccagctccttgccgtcacaagaacgaagtcacgatgagggcccaggctctggatgggctgccaaagggaccgtgcggggctggaaccggagagcccgagagagccctgggcatgtgtcagagccggacaggacccagctgagccaggacctgggtgggggcaccctggccatggacacgctgccagataacaggaccagggtggtggaggacaaccacagctattatgtgtcccgtctctatggccccagcgagccccacagccgggaactgtgggtagatgtggccgaggccaaccggagccaagtgaagatccacacaatactctccaacacccaccggcaggcttcgagagtggtcttgtcctttgatttccctttctacgggcatcctctgcggcagatcaccatagcaactggaggcttcatcttcatgggggacgtgatccatcggatgctcacagctactcagtatgtggcgcccctgatggccaacttcaaccctggctactccgacaactccacagttgtttactttgacaatgggacagtctttgtggttcagtgggaccacgtttatctccaaggctgggaagacaagggcagtttcaccttccaggcagctctgcaccatgacggccgcattgtctttgcctataaagagatccctatgtctgtcccggaaatcagctcctcccagcatcctgtcaaaaccggcctatcggatgccttcatgattctcaatccatccccggatgtgccagaatctcggcgaaggagcatctttgaatatcaccgcatagagctggaccccagcaaggtcaccagcatgtcggcc

SEQ ID NO: 204204 - DNA, 268 bp, Artificial Sequence
  derived and/or modified sequence
gcagtttcaccttccaggcagctctgcaccatgacggccgcattgtctttgcctataaagagatccctatgtctgtcccggaaatcagctcctcccagcatcctgtcaaaaccggcctatcggatgccttcatgattctcaatccatccccggatgtgccaggcttttcagcagagtctgcaaagcatctttggtgaaaagaaaagtcatgtgcaattagcagcatctgtttgcagaggcactcaaaacacacaggacagtgtatccg

SEQ ID NO: 204205 - DNA, 2082 bp, Artificial Sequence
  derived and/or modified sequence
ctcctggaaaatttctccaatggcgctcagcgttcgcacccttcctctccgcggttttctagtccctaggccccagcccactagaagccaggatgccccctcaccccgtctcccactctccagcgccccagctccttgccgtcacaagaacgaagaggacaaccacagctattatgtgtcccgtctctatggccccagcgagccccacagccgggaactgtgggtagatgtggccgaggccaaccggagccaagtgaagatccacacaatactctccaacacccaccggcaggcttcgagagtggtcttgtcctttgatttccctttctacgggcatcctctgcggcagatcaccatagcaactggaggcttcatcttcatgggggacgtgatccatcggatgctcacagctactcagtatgtggcgcccctgatggccaacttcaaccctggctactccgacaactccacagttgtttactttgacaatgggacagtctttgtggttcagtgggaccacgtttatctccaaggctgggaagacaagggcagtttcaccttccaggcagctctgcaccatgacggccgcattgtctttgcctataaagagatccctatgtctgtcccggaaatcagctcctcccagcatcctgtcaaaaccggcctatcggatgccttcatgattctcaatccatccccggatgtgccagaatctcggcgaaggagcatctttgaatatcaccgcatagagctggaccccagcaaggtcaccagcatgtcggccgtggagttcaccccattgccgacctgcctgcagcataggagctgtgacgcctgcatgtcctcagacctgaccttcaactgcagctggtgccatgtcctccagagatgctccagtggctttgaccgctatcgccaggagtggatggactatggctgtgcacaggaggcagagggcaggatgtgcgaggacttccaggatgaggaccacgactcagcctcccctgacacttccttcagcccctatgatggagacctcaccactacctcctcctccctcttcatcgacagcctcaccacagaagatgacaccaagttgaatccctatgcaggaggagacggccttcagaacaacctgtcccccaagacaaagggcactcctgtgcacctgggcaccatcgtgggcatcgtgctggcagtcctcctcgtggcggccatcatcctggctggaatttacatcaatggccaccccacatccaatgctgcgctcttcttcatcgagcgtagacctcaccactggccagccatgaagtttcgcagccaccctgaccattccacctatgcggaggtggagccctcgggccatgagaaggagggcttcatggaggctgagcagtgctgagaacaccaagtctcccctttgaagactttgaggccacagaaaagacagttaaagcaaagaagagaagtgacttttcctggcctctcccagcatgccctgggctgagatgagatggtggtttatggctccagagctgctgctcgcttcgtcagcacaccccgaatattgaagagggggccaaaaaacaaccacatggattttttataggaacaacaacctaatctcatcctgttttgatgcaagggttctcttctgtgtcttgtaaccatgaaacagcagaagaactaacataactaactccatttttgtttaaggggcctttacctattcctgcacctaggctaggataactttagagcactgacataaaacgcaaaaacaggaatcatgccgtttgcaaaactaactctgggattaaaggggaagcatgtaaacagctaactgtttttgttaaagatttataggaatgaggaggtttggctattgtcacatgacagactgttagccaaggacaaagaagttctgcaaacctcccctggacccttgctggtgtccagatgtctgcggttgtcagccccttcctttcccccgacctaaacataaaagacaaggcaaagcccgcataattttaagacggttctttaggacattagtccaccatcttcttggtttgctggctc

SEQ ID NO: 204206 - DNA, 2722 bp, Artificial Sequence
  derived and/or modified sequence
aagacagaccacgaggtaccccagatggaggaatgtgcaaagacgccggggctggagctggaatccgtcccgagacttctcaccttgacctcgaggaaggcaggaggtcggagacagggggtgggcaggctggggaaagaggaaacccgcaggacaagagggttgtggctcgtcacgtggccacttgagggcagcaagtagctgcagctggaggtagctgcctatctgattctgtttgagagtccgccaagttgggatttaaattagacatcaagaagaatttacagaccggccttgccttgttccacggtcacgatgagggcccaggctctggatgggctgccaaagggaccgtgcggggctggaaccggagagcccgagagagccctgggcatgtgtcagagccggacaggacccagctgagccaggacctgggtgggggcaccctggccatggacacgctgccagataacaggaccagggtggtggaggacaaccacagctattatgtgtcccgtctctatggccccagcgagccccacagccgggaactgtgggtagatgtggccgaggccaaccggagccaagtgaagatccacacaatactctccaacacccaccggcaggcttcgagagtggtcttgtcctttgatttccctttctacgggcatcctctgcggcagatcaccatagcaactggaggcttcatcttcatgggggacgtgatccatcggatgctcacagctactcagtatgtggcgcccctgatggccaacttcaaccctggctactccgacaactccacagttgtttactttgacaatgggacagtctttgtggttcagtgggaccacgtttatctccaaggctgggaagacaagggcagtttcaccttccaggcagctctgcaccatgacggccgcattgtctttgcctataaagagatccctatgtctgtcccggaaatcagctcctcccagcatcctgtcaaaaccggcctatcggatgccttcatgattctcaatccatccccggatgtgccagaatctcggcgaaggagcatctttgaatatcaccgcatagagctggaccccagcaaggtcaccagcatgtcggccgtggagttcaccccattgccgagtccctcaacaaccaggatgaaaacacgtatgtgaattgcctggattctcagcagtgtcacggcagctcagagtcaaggcgaccttgaggatcactggagctcatgcagtcctgctagcccctacacctactcacatgggcagatgtggccttggtcctggggagctgggtgggaaggaaggcagggatgccacaaataccttcatcttccggggaagtagagggaatgggagtgcctgactacctcagcctggggaccttggctcctcttctcactatcagcagagagctgttactgaacagtgaaaggggaaggcttctttgtcaatcccatcataactctgtccttttggtcctcctgcagatgctccagtggctttgaccgctatcgccaggagtggatggactatggctgtgcacaggagagggcaggatgtgcgaggacttccaggatgaggaccacgactcagcctcccctgacacttccttcagcccctatgatggagacctcaccactacctcctcctccctcttcatcgacagcctcaccacagaagatgacaccaagttgaatccctatgcaggaggagacggccttcagaacaacctgtcccccaagacaaagggcactcctgtgcacctgggcaccatcgtgggcatcgtgctggcagtcctcctcgtggcggccatcatcctggctggaatttacatcaatggccaccccacatccaatgctgcgctcttcttcatcgagcgtagacctcaccactggccagccatgaagtttcgcagccaccctgaccattccacctatgcggaggtggagccctcgggccatgagaaggagggcttcatggaggctgagcagtgctgagaacaccaagtctcccctttgaagactttgaggccacagaaaagacagttaaagcaaagaagagaagtgacttttcctggcctctcccagcatgccctgggctgagatgagatggtggtttatggctccagagctgctgctcgcttcgtcagcacaccccgaatattgaagagggggccaaaaaacaaccacatggattttttataggaacaacaacctaatctcatcctgttttgatgcaagggttctcttctgtgtcttgtaaccatgaaacagcagaagaactaacataactaactccatttttgtttaaggggcctttacctattcctgcacctaggctaggataactttagagcactgacataaaacgcaaaaacaggaatcatgccgtttgcaaaactaactctgggattaaaggggaagcatgtaaacagctaactgtttttgttaaagatttataggaatgaggaggtttggctattgtcacatgacagactgttagccaaggacaaagaagttctgcaaacctcccctggacccttgctggtgtccagatgtctgcggttgtcagccccttcctttcccccgacctaaacataaaagacaaggcaaagcccgcataattttaagacggttctttaggacattagtccaccatcttcttggtttgctggctctccgaaataaagtccctttccttgctcc

SEQ ID NO: 204207 - DNA, 1503 bp, Artificial Sequence
  derived and/or modified sequence
atgcgcggtgaactgtggttactggtgctggttttaagggaggcagcccgagctctctccccccaacccggtgccggacacgacgagggtcccggatctgggtgggccgctaagggcacggtgagagggtggaaccggagagcacgagaatctccaggccacgtatccgaacccgacaggacccaactcagtcaggatctggggggtggaaccctcgccatggacacgctgcccgataaccgcacacgcgtggtagaggataaccacagttattacgtgtcacgtctttacggcccttctgagcctcacagtcgcgagctgtgggttgatgtggcggaagccaaccgtagtcaggtcaagattcacacgatcctaagcaacactcaccgccaggcttcccgcgtcgtcctgtccttcgatttccctttctacggacaccccctgcgccagattacgatcgctacaggtggttttatattcatgggagatgtgatccacaggatgctgacagctacccagtacgtcgcacccctcatggccaactttaaccctggctatagtgataattcaactgtggtgtactttgataacgggaccgtgtttgtggtgcagtgggaccacgtttatttacaggggtgggaagacaagggatcattcacattccaggctgccctgcaccacgatggaagaatcgtgtttgcatacaaggagatcccaatgagtgtgccagagatcagttcttcccagcaccctgttaagaccggcttgagcgatgcattcatgatccttaacccgagccccgatgtcccggagagccggagaagaagtatcttcgaataccaccgtatcgaactggacccatcaaaagtgacatcaatgtctgccgttgagttcactcccctgccgacttgcctccagcatcggagttgcgatgcttgtatgtcaagtgaccttaccttcaactgcagctggtgccacgttctgcaaagatgcagcagtgggtttgataggtatcgtcaggagtggatggactacggctgtgcccaggaagcagaagggcgaatgtgcgaggacttccaggatgaagatcatgatagcgccagccccgacacaagttttagtccctatgatggggacctaacgacgactagtagctccctgtttatcgactcactgactacagaggatgacacaaagctgaatccctacgccggaggcgacggcctgcaaaataacttatctcccaagaccaaaggcactcctgtgcacctcggcacaatagtggggatcgtcctggctgttttactggtagccgcaatcatcttggctggcatctacataaatggccaccccacctctaatgccgcactgtttttcatcgaacggagaccgcaccactggcctgcaatgaagtttaggtctcatcccgatcactccacgtacgccgaggttgaacccagcgggcatgagaaagaagggtttatggaggctgagcagtgctag

SEQ ID NO: 204208 - DNA, 1014 bp, Artificial Sequence
  derived and/or modified sequence
atgcggggagagttgtggttgctggtgctcgttctccgggaggccgctagagccctgtcacctcagccaggggcaggccatgacgaaggccctggatctggatgggctgccaagggaaccgtccgcggatggaaccgcagagctagagagtcccctggccatgtgtccgagccggatcggacccagctgagtcaggacctgggaggaggcaccctcgctatggacacactccccgacaaccgaaccagagtggtggaggacaatcactcgtactacgtgagtaggctgtacggaccttccgagccgcactcgagagagctctgggtggatgttgccgaagctaatagatcgcaagttaagatacacaccattctgagcaacactcacagacaggccagccgggtggtgcttagtttcgacttcccattctatggacatccccttcgtcagattactatcgccacaggtggcttcatcttcatgggtgacgtcatccaccggatgttgacagctacacagtacgtggccccattaatggccaatttcaatccagggtactctgataactccacagtcgtgtactttgacaatggaacagttttcgtggtgcagtgggatcacgtctacctgcagggttgggaggacaaggggagtttcactttccaagctgcacttcaccacgacggtcggatagtctttgcatacaaagagatccccatgtccgtgccagagatctcaagcagccagcatcctgtaaaaactggcctatcagacgcattcatgatcctgaaccctagcccggacgttcccgaaagccgacggagatcaatattcgaatatcaccgcatcgagttagacccatctaaggtgacatctatgagtgccgtcgaattcacaccgctgcctacttgtctgcaacatcggtcatgcgatgcttgcatgtcttccgatctcactttcaactgttcctggtgccatgtcctgcagagccgcgatgaggtaagcccgtgctag

SEQ ID NO: 204209 - DNA, 1284 bp, Artificial Sequence
  derived and/or modified sequence
atggatacgctgccagataatcgcactcgggttgtcgaggacaatcactcctattacgtgtcccgcctatacggaccctccgagccacattccagagaactctgggtcgacgtggccgaggcaaaccgctctcaagtcaagatacataccatactctcaaacacccatcgccaggcaagtagggtggtgctcagcttcgatttccccttctacggccatcccctgagacaaattactatcgcgaccggcggatttattttcatgggtgacgtcatccatagaatgctgacagcaacgcagtacgtggccccactgatggctaacttcaatcccggatactccgacaactctacagtggtgtactttgacaatgggacggttttcgtcgtacagtgggatcatgtgtatctgcagggatgggaggacaagggaagcttcaccttccaggccgcactacatcacgatggtcgcatcgtgttcgcctacaaggaaattccaatgagcgtgccggagattagcagcagtcaacatccagtgaaaaccggcctttccgacgcctttatgattcttaatccatccccggacgttccagagagcaggagaagatcaatattcgaatatcatcggattgaattggacccctccaaggtcacctctatgtcagcagtagagttcacccctttgcctacatgcctgcagcacaggagctgtgatgcgtgtatgagtagcgacttgactttcaattgttcttggtgccacgtactgcagcgttctttgaataaccaagatgagaacacctacgtgaactgccttgatagccagcaatgtcacgggtcatcagaaagcaggcggccattccaagacgaggatcatgactccgcgtcgcccgacacttcttttagcccttacgacggtgaccttaccaccacttcctcctctttgtttatcgatagtctcacaacagaggacgacactaagttaaacccgtatgccggtggggatggtttgcaaaataatctctctcctaaaacaaagggtactcccgtgcacctgggaaccattgtcggaattgtacttgctgtgctgcttgtcgcggcaataattttagccggtatttacatcaatggccaccctacctcaaacgccgctctgttctttatcgagcgcagaccacaccactggcccgcaatgaagtttcgaagtcaccccgatcacagcacgtatgccgaggtcgaacctagcggccacgagaaggagggttttatggaagctgagcagtgttag

SEQ ID NO: 204210 - DNA, 375 bp, Artificial Sequence
  derived and/or modified sequence
atggacactctcccagataaccggacgcgggtggtggaggataaccacagctattatgtgagcaggctgtatggtccatctgaaccacactccagggagctatgggtggatgtggcagaagccaaccggagccaggtcaagatccacactatcttgagcaatacacataggcaggcttctagggttgtactgtctttcgactttcctttctacggacatcccctgcggcagatcaccatcgccaccggcggattcatcttcatgggggacgtgatccataggatgttgaccgccacccagtatgttgcacctctaatggccaattttaatcctggatactcagacaactcaaccgtggtctactttgacaactag

SEQ ID NO: 204211 - DNA, 669 bp, Artificial Sequence
  derived and/or modified sequence
atggacacactgcctgataaccgaacccgggtcgtggaagacaatcactcctactatgtctctcggttgtacggcccttccgaacctcatagcagggagctatgggtggatgtcgccgaggccaataggagccaggtgaagattcacactatattaagcaacacgcacagacaagcttccagagtcgtcctgtctttcgattttccgttttacggccacccattgaggcagataactatcgcaactggcggtttcatctttatgggtgacgtgatacaccgtatgttgaccgccactcaatatgttgctccactgatggccaactttaaccctgggtattctgacaactctaccgtcgtctattttgacaacggcaccgtgttcgtggttcagtgggaccatgtgtatctccagggctgggaggacaaaggtagctttacttttcaagcagccttgcaccatgacgggagaatcgtgtttgcctataaagagatccccatgtcagtgccagaaataagtagttcccagcatcctgtcaaaaccggcctcagcgacgcgttcatgattcttaacccttcccccgatgtgcccgaatccaggaggcgcagcatcttcgaataccatcggatcgaattggacccaagtaaagtgaccagcatgtccgcatag

SEQ ID NO: 204212 - DNA, 198 bp, Artificial Sequence
  derived and/or modified sequence
tgatcatttacctttcaagctgcacttcatcacgacggccgaattgtttttgcttacaaggagatacccatgtctgtgcctgagatctcctccagccagcaccccgtgaaaaccggtcttagcgacgcattcatgatccttaaccctagccccgacgtacctggcttcagcgctgaaagcgccaaacacttgtggtag

SEQ ID NO: 204213 - DNA, 1383 bp, Artificial Sequence
  derived and/or modified sequence
atggccctgagcgttcgaaccctaccgcttcgcggtttcctcgttccgcgtccacagcccactcgttcccaggacgcaccctccccgagactgcccctttctagcgctccagccccttgcagacacaaaaatgaagaagacaatcatagttattacgtgtccaggctatatgggcctagcgaaccccattcgagagagctctgggttgatgtggcggaggctaatcggtcacaggtgaagatacatacaattcttagcaatacccataggcaggcgagccgcgtagtgctgtcattcgattttccattctatgggcaccctctccgccagattacaatagccaccggtggctttatatttatgggcgacgtgattcataggatgctgactgctactcagtacgttgccccattgatggctaatttcaatcctggatacagtgacaatagcacagtagtatacttcgataatggcactgtatttgtggttcaatgggaccacgtgtatctgcaaggttgggaggataaaggatcatttacttttcaggccgcattgcaccatgacggcaggatcgtgttcgcttacaaggagatccctatgtccgtcccggaaatatccagctcacagcatcccgtgaagacaggcttgagtgatgccttcatgatattaaaccctagccccgacgtgcctgagtctcggagaagatcgattttcgagtatcacagaatcgagcttgatccaagcaaagtgacctctatgagcgcggtggaatttactccactccccacctgtctgcaacatcgctcctgcgacgcgtgtatgtcctcagacctgacattcaattgctcatggtgccatgttcttcagagatgctcttctgggtttgaccggtacagacaggaatggatggactatggctgcgctcaggaagccgagggacgtatgtgtgaagacttccaggatgaagaccacgactccgcctccccggacacgtccttcagcccatacgacggcgatctgaccaccacaagctcttctctgttcatcgattcattgacgaccgaggacgataccaagttaaatccctatgccggaggtgatgggctccaaaacaacctgtcacctaagactaaaggaacccctgtccatttgggaactatagtcggcattgtgctggccgttctgttggttgctgctattattttggccggaatatatatcaacgggcacccgacaagcaatgctgccctattctttatcgaacgccgtccacaccactggcctgccatgaaattccgttctcaccctgatcattccacatacgccgaggttgagccctccggacacgaaaaagaggggtttatggaggcagagcagtgttag

SEQ ID NO: 204214 - DNA, 723 bp, Artificial Sequence
  derived and/or modified sequence
atggacaccctacctgataaccggacccgcgtggttgaagataatcactcttactatgtttccaggctatacggaccctcggagccacactcgcgagagctctgggtagatgtggcagaagctaatcgcagccaagtgaagattcatacaattctgtctaacactcacagacaagcaagtcgggtggttctgagctttgatttcccgttttacggccacccactacgccagatcactatagctacggggggatttatcttcatgggggatgtgattcacaggatgctcaccgccacgcaatatgtggcacccctcatggccaattttaaccccggatatagcgacaactcgaccgtggtgtactttgacaacggcacagtgtttgtggtccagtgggatcacgtctacctacaagggtgggaagacaaaggtagcttcacattccaggcagccctgcaccacgacggtcgcatcgtgttcgcttataaagagatcccaatgtccgtccccgagatatcctcttctcagcacccggttaagaccgggttgagcgacgcctttatgatcctcaacccctctcccgatgtgcccgaatcacggaggagatcaatctttgagtatcatcggattgagttagacccgagtaaagtgacatccatgtccgccgttgagttcactccattgcctagccctagtactacccgcatgaagacaaggatgtag

SEQ ID NO: 204215 - DNA, 1503 bp, Artificial Sequence
  derived and/or modified sequence
atgagaggcgagctgtggctgctggtgctggtgctgagagaggccgccagagccctgagcccccagcccggcgccggccacgacgagggccccggcagcggctgggccgccaagggcaccgtgagaggctggaacagaagagccagagagagccccggccacgtgagcgagcccgacagaacccagctgagccaggacctgggcggcggcaccctggccatggacaccctgcccgacaacagaaccagagtggtggaggacaaccacagctactacgtgagcagactgtacggccccagcgagccccacagcagagagctgtgggtggacgtggccgaggccaacagaagccaggtgaagatccacaccatcctgagcaacacccacagacaggccagcagagtggtgctgagcttcgacttccccttctacggccaccccctgagacagatcaccatcgccaccggcggcttcatcttcatgggcgacgtgatccacagaatgctgaccgccacccagtacgtggcccccctgatggccaacttcaaccccggctacagcgacaacagcaccgtggtgtacttcgacaacggcaccgtgttcgtggtgcagtgggaccacgtgtacctgcagggctgggaggacaagggcagcttcaccttccaggccgccctgcaccacgacggcagaatcgtgttcgcctacaaggagatccccatgagcgtgcccgagatcagcagcagccagcaccccgtgaagaccggcctgagcgacgccttcatgatcctgaaccccagccccgacgtgcccgagagcagaagaagaagcatcttcgagtaccacagaatcgagctggaccccagcaaggtgaccagcatgagcgccgtggagttcacccccctgcccacctgcctgcagcacagaagctgcgacgcctgcatgagcagcgacctgaccttcaactgcagctggtgccacgtgctgcagagatgcagcagcggcttcgacagatacagacaggagtggatggactacggctgcgcccaggaggccgagggcagaatgtgcgaggacttccaggacgaggaccacgacagcgccagccccgacaccagcttcagcccctacgacggcgacctgaccaccaccagcagcagcctgttcatcgacagcctgaccaccgaggacgacaccaagctgaacccctacgccggcggcgacggcctgcagaacaacctgagccccaagaccaagggcacccccgtgcacctgggcaccatcgtgggcatcgtgctggccgtgctgctggtggccgccatcatcctggccggcatctacatcaacggccaccccaccagcaacgccgccctgttcttcatcgagagaagaccccaccactggcccgccatgaagttcagaagccaccccgaccacagcacctacgccgaggtggagcccagcggccacgagaaggagggcttcatggaggccgagcagtgctag

SEQ ID NO: 204216 - DNA, 1014 bp, Artificial Sequence
  derived and/or modified sequence
atgagaggcgagctgtggctgctggtgctggtgctgagagaggccgccagagccctgagcccccagcccggcgccggccacgacgagggccccggcagcggctgggccgccaagggcaccgtgagaggctggaacagaagagccagagagagccccggccacgtgagcgagcccgacagaacccagctgagccaggacctgggcggcggcaccctggccatggacaccctgcccgacaacagaaccagagtggtggaggacaaccacagctactacgtgagcagactgtacggccccagcgagccccacagcagagagctgtgggtggacgtggccgaggccaacagaagccaggtgaagatccacaccatcctgagcaacacccacagacaggccagcagagtggtgctgagcttcgacttccccttctacggccaccccctgagacagatcaccatcgccaccggcggcttcatcttcatgggcgacgtgatccacagaatgctgaccgccacccagtacgtggcccccctgatggccaacttcaaccccggctacagcgacaacagcaccgtggtgtacttcgacaacggcaccgtgttcgtggtgcagtgggaccacgtgtacctgcagggctgggaggacaagggcagcttcaccttccaggccgccctgcaccacgacggcagaatcgtgttcgcctacaaggagatccccatgagcgtgcccgagatcagcagcagccagcaccccgtgaagaccggcctgagcgacgccttcatgatcctgaaccccagccccgacgtgcccgagagcagaagaagaagcatcttcgagtaccacagaatcgagctggaccccagcaaggtgaccagcatgagcgccgtggagttcacccccctgcccacctgcctgcagcacagaagctgcgacgcctgcatgagcagcgacctgaccttcaactgcagctggtgccacgtgctgcagagcagagacgaggtgagcccctgctag

SEQ ID NO: 204217 - DNA, 1284 bp, Artificial Sequence
  derived and/or modified sequence
atggacaccctgcccgacaacagaaccagagtggtggaggacaaccacagctactacgtgagcagactgtacggccccagcgagccccacagcagagagctgtgggtggacgtggccgaggccaacagaagccaggtgaagatccacaccatcctgagcaacacccacagacaggccagcagagtggtgctgagcttcgacttccccttctacggccaccccctgagacagatcaccatcgccaccggcggcttcatcttcatgggcgacgtgatccacagaatgctgaccgccacccagtacgtggcccccctgatggccaacttcaaccccggctacagcgacaacagcaccgtggtgtacttcgacaacggcaccgtgttcgtggtgcagtgggaccacgtgtacctgcagggctgggaggacaagggcagcttcaccttccaggccgccctgcaccacgacggcagaatcgtgttcgcctacaaggagatccccatgagcgtgcccgagatcagcagcagccagcaccccgtgaagaccggcctgagcgacgccttcatgatcctgaaccccagccccgacgtgcccgagagcagaagaagaagcatcttcgagtaccacagaatcgagctggaccccagcaaggtgaccagcatgagcgccgtggagttcacccccctgcccacctgcctgcagcacagaagctgcgacgcctgcatgagcagcgacctgaccttcaactgcagctggtgccacgtgctgcagagaagcctgaacaaccaggacgagaacacctacgtgaactgcctggacagccagcagtgccacggcagcagcgagagcagaagacccttccaggacgaggaccacgacagcgccagccccgacaccagcttcagcccctacgacggcgacctgaccaccaccagcagcagcctgttcatcgacagcctgaccaccgaggacgacaccaagctgaacccctacgccggcggcgacggcctgcagaacaacctgagccccaagaccaagggcacccccgtgcacctgggcaccatcgtgggcatcgtgctggccgtgctgctggtggccgccatcatcctggccggcatctacatcaacggccaccccaccagcaacgccgccctgttcttcatcgagagaagaccccaccactggcccgccatgaagttcagaagccaccccgaccacagcacctacgccgaggtggagcccagcggccacgagaaggagggcttcatggaggccgagcagtgctag

SEQ ID NO: 204218 - DNA, 375 bp, Artificial Sequence
  derived and/or modified sequence
atggacaccctgcccgacaacagaaccagagtggtggaggacaaccacagctactacgtgagcagactgtacggccccagcgagccccacagcagagagctgtgggtggacgtggccgaggccaacagaagccaggtgaagatccacaccatcctgagcaacacccacagacaggccagcagagtggtgctgagcttcgacttccccttctacggccaccccctgagacagatcaccatcgccaccggcggcttcatcttcatgggcgacgtgatccacagaatgctgaccgccacccagtacgtggcccccctgatggccaacttcaaccccggctacagcgacaacagcaccgtggtgtacttcgacaactag

SEQ ID NO: 204219 - DNA, 669 bp, Artificial Sequence
  derived and/or modified sequence
atggacaccctgcccgacaacagaaccagagtggtggaggacaaccacagctactacgtgagcagactgtacggccccagcgagccccacagcagagagctgtgggtggacgtggccgaggccaacagaagccaggtgaagatccacaccatcctgagcaacacccacagacaggccagcagagtggtgctgagcttcgacttccccttctacggccaccccctgagacagatcaccatcgccaccggcggcttcatcttcatgggcgacgtgatccacagaatgctgaccgccacccagtacgtggcccccctgatggccaacttcaaccccggctacagcgacaacagcaccgtggtgtacttcgacaacggcaccgtgttcgtggtgcagtgggaccacgtgtacctgcagggctgggaggacaagggcagcttcaccttccaggccgccctgcaccacgacggcagaatcgtgttcgcctacaaggagatccccatgagcgtgcccgagatcagcagcagccagcaccccgtgaagaccggcctgagcgacgccttcatgatcctgaaccccagccccgacgtgcccgagagcagaagaagaagcatcttcgagtaccacagaatcgagctggaccccagcaaggtgaccagcatgagcgcctag

SEQ ID NO: 204220 - DNA, 198 bp, Artificial Sequence
  derived and/or modified sequence
tgaagcttcaccttccaggccgccctgcaccacgacggcagaatcgtgttcgcctacaaggagatccccatgagcgtgcccgagatcagcagcagccagcaccccgtgaagaccggcctgagcgacgccttcatgatcctgaaccccagccccgacgtgcccggcttcagcgccgagagcgccaagcacctgtggtag

SEQ ID NO: 204221 - DNA, 1383 bp, Artificial Sequence
  derived and/or modified sequence
atggccctgagcgtgagaaccctgcccctgagaggcttcctggtgcccagaccccagcccaccagaagccaggacgcccccagccccagactgcccctgagcagcgcccccgccccctgcagacacaagaacgaggaggacaaccacagctactacgtgagcagactgtacggccccagcgagccccacagcagagagctgtgggtggacgtggccgaggccaacagaagccaggtgaagatccacaccatcctgagcaacacccacagacaggccagcagagtggtgctgagcttcgacttccccttctacggccaccccctgagacagatcaccatcgccaccggcggcttcatcttcatgggcgacgtgatccacagaatgctgaccgccacccagtacgtggcccccctgatggccaacttcaaccccggctacagcgacaacagcaccgtggtgtacttcgacaacggcaccgtgttcgtggtgcagtgggaccacgtgtacctgcagggctgggaggacaagggcagcttcaccttccaggccgccctgcaccacgacggcagaatcgtgttcgcctacaaggagatccccatgagcgtgcccgagatcagcagcagccagcaccccgtgaagaccggcctgagcgacgccttcatgatcctgaaccccagccccgacgtgcccgagagcagaagaagaagcatcttcgagtaccacagaatcgagctggaccccagcaaggtgaccagcatgagcgccgtggagttcacccccctgcccacctgcctgcagcacagaagctgcgacgcctgcatgagcagcgacctgaccttcaactgcagctggtgccacgtgctgcagagatgcagcagcggcttcgacagatacagacaggagtggatggactacggctgcgcccaggaggccgagggcagaatgtgcgaggacttccaggacgaggaccacgacagcgccagccccgacaccagcttcagcccctacgacggcgacctgaccaccaccagcagcagcctgttcatcgacagcctgaccaccgaggacgacaccaagctgaacccctacgccggcggcgacggcctgcagaacaacctgagccccaagaccaagggcacccccgtgcacctgggcaccatcgtgggcatcgtgctggccgtgctgctggtggccgccatcatcctggccggcatctacatcaacggccaccccaccagcaacgccgccctgttcttcatcgagagaagaccccaccactggcccgccatgaagttcagaagccaccccgaccacagcacctacgccgaggtggagcccagcggccacgagaaggagggcttcatggaggccgagcagtgctag

SEQ ID NO: 204222 - DNA, 723 bp, Artificial Sequence
  derived and/or modified sequence
atggacaccctgcccgacaacagaaccagagtggtggaggacaaccacagctactacgtgagcagactgtacggccccagcgagccccacagcagagagctgtgggtggacgtggccgaggccaacagaagccaggtgaagatccacaccatcctgagcaacacccacagacaggccagcagagtggtgctgagcttcgacttccccttctacggccaccccctgagacagatcaccatcgccaccggcggcttcatcttcatgggcgacgtgatccacagaatgctgaccgccacccagtacgtggcccccctgatggccaacttcaaccccggctacagcgacaacagcaccgtggtgtacttcgacaacggcaccgtgttcgtggtgcagtgggaccacgtgtacctgcagggctgggaggacaagggcagcttcaccttccaggccgccctgcaccacgacggcagaatcgtgttcgcctacaaggagatccccatgagcgtgcccgagatcagcagcagccagcaccccgtgaagaccggcctgagcgacgccttcatgatcctgaaccccagccccgacgtgcccgagagcagaagaagaagcatcttcgagtaccacagaatcgagctggaccccagcaaggtgaccagcatgagcgccgtggagttcacccccctgcccagccccagcaccaccagaatgaagaccagaatgtag

SEQ ID NO: 204223 - protein, 122 aa, Artificial Sequence
  derived and/or modified sequence
DPGSLRCPVCLSMEGCLEGTTEEICPKGTTHCYDGLLRLRGGGIFSNLRVQGCMPQPVCNLLNGTQEIGPVGMTENCDMKDFLQLKPVGLLEEHNVGEKERGQGQHQCVQLDWQKRAATGVS

SEQ ID NO: 204224 - protein, 248 aa, Artificial Sequence
  derived and/or modified sequence
MSAVLLLALLGFILPLPGVQALLCQFGTVQHVWKVSDLPRQWTPKNTSCDSGLGCQDTLMLIESGPQVSLVLSKGCTEAKDQEPRVTEHRMGPGLSLISYTFVCRQEDFCNNLVNSLPLWAPQPPADPGSLRCPVCLSMEGCLEGTTEEICPKGTTHCYDGLLRLRGGGIFSNLRVQGCMPQPVCNLLNGTQEIGPVGMTENCDMKDFLQLKPVGLLEEHNVGEKERGQGQHQCVQLDWQKRAATGIF

SEQ ID NO: 204225 - protein, 145 aa, Artificial Sequence
  derived and/or modified sequence
MSAVLLLALLGFILPLPGVQALLCQFGTVQHVWKVSDLPRQWTPKNTSCDSGLGCQDTLMLIESGPQVSLVLSKGCTEAKDQEPRVTEHRMGPGLSLISYTFVCRQEDFCNNLVNSLPLWAPQPPADPMMGAAEGPFGKAEQVDS

SEQ ID NO: 204226 - DNA, 369 bp, Artificial Sequence
  derived and/or modified sequence
gaccccggcagcctgagatgccccgtgtgcctgagcatggagggctgcctggagggcaccaccgaggagatctgccccaagggcaccacccactgctacgacggcctgctgagactgagaggcggcggcatcttcagcaacctgagagtgcagggctgcatgccccagcccgtgtgcaacctgctgaacggcacccaggagatcggccccgtgggcatgaccgagaactgcgacatgaaggacttcctgcagctgaagcccgtgggcctgctggaggagcacaacgtgggcgagaaggagagaggccagggccagcaccagtgcgtgcagctggactggcagaagagagccgccaccggcgtgagctag

SEQ ID NO: 204227 - DNA, 369 bp, Artificial Sequence
  derived and/or modified sequence
gacccagggtccctgcgctgtccagtttgcctgagcatggagggctgcctggaaggaactactgaagagatctgccctaagggcacgacccactgttacgatggcctgttgagactgcgcgggggcggaatttttagcaatctgagggtgcagggctgcatgcctcagcctgtatgcaatttgctgaatggtacccaagagataggtcccgtggggatgaccgagaactgtgatatgaaagatttcttacagcttaagcctgtaggcctgttggaagaacacaacgtcggggagaaggaaagggggcagggacaacaccagtgcgtacagcttgactggcagaagagggcagccactggagttagctag

SEQ ID NO: 204228 - DNA, 369 bp, Artificial Sequence
  derived and/or modified sequence
gaccccggcagcctgcgctgccctgtgtgcctgtccatggagggctgcctggagggcaccacagaggagatctgccccaagggcaccacccactgctatgatggcctgctgcggctgcggggcggcggcatcttcagcaacctgcgggtgcagggctgcatgccccagcctgtgtgcaacctgctgaatggcacccaggagatcggccctgtgggcatgacagagaactgtgacatgaaggacttcctgcagctgaagcctgtgggcctgctggaggagcacaacgtgggggagaaggagcggggccagggccagcaccagtgtgtgcagctggactggcagaagagagctgccactggagtgtcctag

SEQ ID NO: 204229 - DNA, 369 bp, Artificial Sequence
  derived and/or modified sequence
gaccccggcagcctgcggtgccccgtgtgcctgagcatggagggctgtctcgagggcaccacagaggaaatctgtccaaaaggtacaacacactgctatgatggattgctgcgactccgggggggcggtatcttctccaatcttcgagtacaaggctgcatgccccagcctgtgtgcaatcttctgaacggcacacaagagataggcccggtaggaatgacggaaaactgtgacatgaaggattttctgcagctgaaaccagtgggtctccttgaggagcataacgtcggggagaaggaacgcgggcagggacagcatcagtgcgtgcagttggactggcaaaaacgggccgcgacaggagtttcttag

SEQ ID NO: 204230 - DNA, 369 bp, Artificial Sequence
  derived and/or modified sequence
gatcccggaagcctccgttgccccgtgtgcctgtctatggagggctgcctggaaggcaccaccgaggaaatatgcccaaagggcacaactcactgctacgacggtctgcttcggttgcgagggggtggcatcttttccaaccttcgcgtgcaggggtgcatgccccagccggtctgcaacctgcttaacggaactcaggaaattggccctgtcgggatgacagagaactgcgacatgaaagatttcctccaactgaaacccgttggcttgctggaagaacacaacgttggtgagaaggaaagggggcagggccagcaccaatgtgtccagctggattggcagaagcgagccgctacaggcgtgagctag

SEQ ID NO: 204231 - DNA, 366 bp, Artificial Sequence
  derived and/or modified sequence
gacccaggatccttgaggtgcccagtctgcttgtctatggaaggctgtctggaggggacaacagaagagatctgccccaaggggaccacacactgttatgatggcctcctcaggctcaggggaggaggcatcttctccaatctgagagtccagggatgcatgccccagccagtttgcaacctgctcaatgggacacaggaaattgggcccgtgggtatgactgagaactgcgatatgaaagattttctgcagctcaagccagtaggattacttgaggaacacaatgtgggagagaaagagcgtggtcaaggacaacaccaatgtgttcagctagactggcagaaacgagccgccacgggtgtaagt

SEQ ID NO: 204232 - DNA, 747 bp, Artificial Sequence
  derived and/or modified sequence
atgtccgcggtgctgcttctcgctttgctcggctttatcctgccgcttccaggagtgcaagcactactgtgtcagttcggaactgtgcagcacgtgtggaaagtgtctgacctgccaaggcagtggactcctaagaacaccagctgcgattctggactcgggtgtcaggacaccctgatgttaattgagagtgggcctcaggtcagcctggtgctatcaaaaggatgcactgaggctaaggaccaggagccaagagtcacagagcacaggatgggtcctggtttgtcgctgattagttacacatttgtgtgccgccaggaagatttctgtaacaacctcgtgaacagcctcccattatgggcgcctcagccaccagctgacccgggctccctgaggtgtcccgtgtgtctttcaatggagggttgcctggagggaaccacagaggagatctgcccgaagggcactacacactgttacgacggcctgctccgactccgggggggtgggattttttccaaccttagagtccagggttgcatgccacagcccgtgtgcaatctgttgaacggcacccaggaaataggtcccgtgggtatgactgagaattgtgacatgaaggacttcctccagctcaaacccgtgggacttctagaagagcacaacgttggagagaaggagagaggacaaggacagcatcaatgcgtacagctcgattggcagaaaagggctgccactggtattttctag

SEQ ID NO: 204233 - DNA, 438 bp, Artificial Sequence
  derived and/or modified sequence
atgtctgctgtccttctattggcactgctcggttttatcctcccactgcccggcgtccaggcgctgctctgccaattcggaaccgttcaacacgtctggaaggtttctgatcttccgcggcaatggacgccaaagaacactagttgcgattctggactggggtgccaagatactctgatgctgatcgagagtgggcctcaggtgtccttagtgctgtctaagggttgcacggaggccaaggaccaggaacctcgtgtgactgaacaccggatgggcccgggcctgtcattgatcagctacacgtttgtatgtagacaggaagatttttgcaacaacttggtgaatagtcttccactatgggccccccagccacctgccgatccgatgatgggtgccgctgagggccctttcgggaaagcggaacaagttgactcctag

SEQ ID NO: 204234 - DNA, 438 bp, Artificial Sequence
  derived and/or modified sequence
atgagcgcagtgttactgctcgcgttgttgggatttatcctgcccctgcctggagtacaagctcttctctgccagtttgggactgtgcagcacgtttggaaagtgtcggatctgcctcggcagtggacgccaaaaaatacttcatgcgactctggactcgggtgccaggacaccctgatgcttattgaatccgggccacaggtgtctctcgtcctgagcaaaggttgtacagaggccaaggatcaggagccacgagtgacagaacacagaatgggtccaggactaagcctgatatcctatacatttgtgtgcagacaagaagacttctgtaacaacctggttaattcactccctctgtgggccccacagccaccggctgatcccatgatgggggcagccgaaggcccattcgggaaagctgaacaagtggatagttag

SEQ ID NO: 204235 - DNA, 747 bp, Artificial Sequence
  derived and/or modified sequence
atgtctgctgtgctgctgctggccctgctgggcttcatcctgcccctgcccggggtgcaggccctgctgtgccagtttggcaccgtgcagcacgtgtggaaggtgtctgacctgccccggcagtggacccccaagaacaccagctgtgacagcggcctgggctgccaggacaccctgatgctgattgagagcggcccccaggtgtccctggtgctgagcaagggctgcacagaggccaaggaccaggagccccgggtgacagagcacaggatgggccctggcctgagcctcatctcctacacctttgtgtgccggcaggaggacttctgcaacaacctggtgaacagcctgcccctgtgggccccccagcccccagctgaccccggcagcctgcgctgccctgtgtgcctgtccatggagggctgcctggagggcaccacagaggagatctgccccaagggcaccacccactgctatgatggcctgctgcggctgcggggcggcggcatcttcagcaacctgcgggtgcagggctgcatgccccagcctgtgtgcaacctgctgaatggcacccaggagatcggccctgtgggcatgacagagaactgtgacatgaaggacttcctgcagctgaagcctgtgggcctgctggaggagcacaacgtgggggagaaggagcggggccagggccagcaccagtgtgtgcagctggactggcagaagagagctgccaccggcatcttctag

SEQ ID NO: 204236 - DNA, 438 bp, Artificial Sequence
  derived and/or modified sequence
atgtctgctgtgctgctgctggccctgctgggcttcatcctgcccctgcccggggtgcaggccctgctgtgccagtttggcaccgtgcagcacgtgtggaaggtgtctgacctgccccggcagtggacccccaagaacaccagctgtgacagcggcctgggctgccaggacaccctgatgctgattgagagcggcccccaggtgtccctggtgctgagcaagggctgcacagaggccaaggaccaggagccccgggtgacagagcacaggatgggccctggcctgagcctcatctcctacacctttgtgtgccggcaggaggacttctgcaacaacctggtgaacagcctgcccctgtgggccccccagcccccagctgaccccatgatgggcgctgctgagggcccctttgggaaggccgagcaggtggacagctag

SEQ ID NO: 204237 - DNA, 747 bp, Artificial Sequence
  derived and/or modified sequence
atgagcgccgtgctgctgctggccctgctgggcttcatcctgcccctgccaggcgtgcaggcactgttgtgccagtttggcaccgtgcagcacgtatggaaggtgagcgatctcccacggcaatggacacctaaaaatacatcttgtgactccgggctgggatgccaggataccctgatgctgattgagtccggccctcaagtgagtctcgttctctccaaaggttgcaccgaggccaaggaccaggagccacgggttacagagcacagaatgggtcccggactcagcttgatcagctacacatttgtttgtcgtcaagaggatttctgcaacaatctggttaacagcctgccgttgtgggcaccccaaccccccgctgaccccggctccctgcggtgcccggtatgtttgtctatggaaggatgtttagagggaaccaccgaggagatctgccctaaaggaactacacactgctacgatggacttctgcgcttgcgcggtggcgggattttctcaaatttgcgtgttcagggttgtatgcctcagcccgtctgcaatctcctgaacgggactcaggagattggacctgtgggtatgaccgagaattgtgacatgaaggatttcctgcagctcaaacccgttgggctgttagaagagcacaacgtaggtgaaaaggagcgcggtcagggacagcaccaatgtgtgcaactcgactggcaaaagcgggctgcaaccggcattttctag

SEQ ID NO: 204238 - DNA, 438 bp, Artificial Sequence
  derived and/or modified sequence
atgagcgccgtgctgctgctggccctgctgggcttcatcctgcccctgcctggtgtgcaggctctcctctgtcagttcggcactgtgcagcatgtttggaaggtttcggatcttcctagacaatggacacctaagaatacaagctgtgattccggcctgggatgtcaggatacacttatgctgattgagagcggaccgcaggtgagcttggtgctttccaagggctgtactgaggccaaagatcaggagccacgtgttaccgaacatcgcatggggccaggcctctccctcatctcttacacattcgtctgtcgccaggaggacttctgtaataacctggtgaactcactcccactttgggcccctcaaccacccgctgacccaatgatgggcgctgctgaagggccattcggaaaagccgaacaggtcgactcatag

SEQ ID NO: 204239 - DNA, 438 bp, Artificial Sequence
  derived and/or modified sequence
atgagcgccgtgctgctgctggccctgctgggcttcatcctgcccctgcccggggtgcaagccctgctgtgtcagttcggaactgtgcagcacgtgtggaaagtcagcgatttgcctcggcaatggacccccaagaacacttcttgtgattctgggctcgggtgtcaagatactcttatgctgatcgagtcaggacctcaagtttcacttgtcctgtctaaagggtgtacggaggcgaaagaccaggaaccacgagttacagaacacagaatggggccagggctctctttgatttcctacacattcgtgtgcagacaggaggacttttgcaacaatctggtgaactcactgccactgtgggccccgcagccccctgctgacccgatgatgggggccgccgaaggaccctttggcaaggcagaacaggttgacagctag

SEQ ID NO: 204240 - DNA, 747 bp, Artificial Sequence
  derived and/or modified sequence
atgagtgcagtgttactgcttgctctgttgggttttatactacctcttcccggtgtgcaagctctgctgtgccagtttggcacagtgcagcacgtgtggaaggtgtctgacttaccacgccaatggacaccgaagaatacatcctgcgatagcggtcttggctgccaggataccctcatgctgatcgaaagcggaccgcaggtcagtctggtgctctccaagggatgtaccgaggctaaggatcaagagcctcgcgtgacagaacataggatgggtcctggcctaagtctgatttcctatacttttgtgtgtaggcaggaagacttctgcaacaatttggtaaatagcttgccgctttgggccccacagccaccagccgatccagggagccttagatgccccgtctgtctgtcaatggagggctgtctggagggtactacagaagaaatctgccccaagggcaccactcactgttatgatggtttactccgcctgcgaggcggaggaattttctccaatctccgcgtgcaagggtgcatgccgcaacccgtttgcaacctccttaatgggacccaggagataggacccgtcggtatgaccgaaaattgcgacatgaaggatttcctgcagctcaagcctgtgggcctgctggaagaacacaacgttggggaaaaggagagaggccaggggcagcaccagtgcgtgcagctcgattggcaaaaacgtgcagccacagggatattctag

SEQ ID NO: 204241 - DNA, 438 bp, Artificial Sequence
  derived and/or modified sequence
atgagcgctgttctgctgttggcactgctgggatttatactgccactgccgggtgtgcaggctttgctatgtcagttcgggaccgtccagcacgtctggaaggtaagcgacctgccgaggcagtggactccgaagaacaccagctgtgactccgggctaggatgtcaggatactctcatgcttatcgaatcaggccctcaagtgagccttgttctttcaaagggctgcaccgaagccaaggatcaggagccgagggtaaccgagcatcggatggggcctggactgagtctgattagctataccttcgtctgtcggcaagaagacttttgtaacaacctcgtgaattcactgcctctctgggcgcctcagcccccagctgatcccatgatgggtgcagccgagggtccatttggcaaggccgagcaagtagattcatag

SEQ ID NO: 204242 - DNA, 438 bp, Artificial Sequence
  derived and/or modified sequence
atgagtgccgtacttctcctcgccctcctcgggtttattttacctttgcccggagtgcaggccctgttgtgccagtttgggactgtacagcatgtttggaaagtctccgatcttccgcgacaatggacccctaaaaacacatcatgcgattccgggctggggtgccaggacaccttgatgctgatcgaatccggccctcaggtctccctcgttctatccaagggctgcaccgaggccaaggaccaggagccccgtgtaaccgagcatcgaatgggtcccggtttgtcactgatcagctacacatttgtgtgccgtcaggaagacttctgcaacaatctggtgaatagcctgccactatgggcacctcagcctcctgcagatcctatgatgggggctgctgagggcccatttggtaaagccgagcaggtcgattcttag

SEQ ID NO: 204243 - DNA, 2483 bp, Artificial Sequence
  derived and/or modified sequence
ctgctgaaaaagcagaaagagattaccagccacagacgggtcatgagcgcggtattactgctggccctcctggggttcatcctcccactgccaggagtgcaggcgctgctctgccagtttgggacagttcagcatgtgtggaaggtgtccgacctgccccggcaatggacccctaagaacaccagctgcgacagcggcttggggtgccaggacacgttgatgctcattgagagcggaccccaagtgagcctggtgctctccaagggctgcacggaggccaaggaccaggagccccgcgtcactgagcaccggatgggccccggcctctccctgatctcctacaccttcgtgtgccgccaggaggacttctgcaacaacctcgttaactccctcccgctttgggccccacagcccccagcagacccaggatccttgaggtgcccagtctgcttgtctatggaaggctgtctggaggggacaacagaagagatctgccccaaggggaccacacactgttatgatggcctcctcaggctcaggggaggaggcatcttctccaatctgagagtccagggatgcatgccccagccagtttgcaacctgctcaatgggacacaggaaattgggcccgtgggtatgactgagaactgcgatatgaaagattttctgcagctcaagccagtaggattacttgaggaacacaatgtgggagagaaagagcgtggtcaaggacaacaccaatgtgttcagctagactggcagaaacgagccgccacgggtattttctgacctgtcatcgggggaccaccattatgacacacggaaacttggctcaagaacccactgattggaccacatcgaataccgagatgtgcgaggtggggcaggtgtgtcaggagacgctgctgctcctagatgtaggactcacatcaaccctggtggcgacctaaagctgcagcgctgttggggctcaaaattcccagaagaccaccatccactcagcccctcctggggtgcttgtggcctcctatacccacttctgctcctcggacctgtgcaatagtgccagcagcagcagcgttctgctgaactccctccctcctcaagctgcccctgtcccaggagaccggcagtgtcctacctgtgtgcagccccttggaacctgttcaagtggctccccccgaatgacctgccccaggggcgccactcattgttatgatgggtacattcatctctcaggaggtgggctgtccaccaaaatgagcattcagggctgcgtggcccaaccttccagcttcttgttgaaccacaccagacaaatcgggatcttctctgcgcgtgagaagcgtgatgtgcagcctcctgcctctcagcatgagggaggtggggctgagggcctggagtctctcacttggggggtggggctggcactggccccagcgctgtggtggggagtggtttgcccttcctgctaactctattacccccacgattcttcaccgctgctgaccacccacactcaacctccctctgacctcataacctaatggccttggacaccagattctttcccattctgtccatgaatcatcttccccacacacaatcattcatatctactcacctaacagcaacactggggagagcctggagcatccggacttgccctatgggagaggggacgctggaggagtggctgcatgtatctgataatacagaccctgtcctttctcccagtgctgggatttctccatgtgagggggcagcaggacacccagggatctagcgtgggggaggagaggagcctaatgagaaaatgaccatctaaagcctgcccttcattggtctggttcacgtctccaaaccagcttggatggtagcagagacttcagggtgctccagccaaacgtatttgggcatcaccatgacctgggaggggaagatgcactgagacgtatgaggcttccagcctagcagccagggccctagcacaaacaggaggctcgccccatctgagcaactgcaggagaggttagtacagtcatgcattgcttaacgacagggacgtgtcgttagaaatgtgtcgttaggtgattttatgaccataggaacattgtagcgtgcacttacaccaacccagatggtacagcccaatacacacccaggatggacgctagagtcgactgctcctaggctacaagcctgcagtgcatgttatggtgtgaatactgcaggcaatcttaacaccacggcaagtatttgtgcatctacacacatctaaacatagaaaaggtacagcataaatacactattgtcatctcagcagaccaccgttctatacgcaattcgtcgctgacccaaacgttgctatgtagcatctgcgtatcgtgggataattgacatgagggcttgagagaactccagaaaaaaatgggttagcattttcccagagctgttatcattgggtctctcttaccaccata

SEQ ID NO: 204244 - DNA, 480 bp, Artificial Sequence
  derived and/or modified sequence
ctgctgaaaaagcagaaagagattaccagccacagacgggtcatgagcgcggtattactgctggccctcctggggttcatcctcccactgccaggagtgcaggcgctgctctgccagtttgggacagttcagcatgtgtggaaggtgtccgacctgccccggcaatggacccctaagaacaccagctgcgacagcggcttggggtgccaggacacgttgatgctcattgagagcggaccccaagtgagcctggtgctctccaagggctgcacggaggccaaggaccaggagccccgcgtcactgagcaccggatgggccccggcctctccctgatctcctacaccttcgtgtgccgccaggaggacttctgcaacaacctcgttaactccctcccgctttgggccccacagcccccagcagatcccatgatgggagctgcagaaggcccctttgggaaggctgagcaggttgactcttga

SEQ ID NO: 204245 - DNA, 1512 bp, Artificial Sequence
  derived and/or modified sequence
atgagcgcggtattactgctggccctcctggggttcatcctcccactgccaggagtgcaggcgctgctctgccagtttgggacagttcagcatgtgtggaaggtgtccgacctgccccggcaatggacccctaagaacaccagctgcgacagcggcttggggtgccaggacacgttgatgctcattgagagcggaccccaagtgagcctggtgctctccaagggctgcacggaggccaaggaccaggagccccgcgtcactgagcaccggatgggccccggcctctccctgatctcctacaccttcgtgtgccgccaggaggacttctgcaacaacctcgttaactccctcccgctttgggccccacagcccccagcagatcccatgatgggagctgcagaaggcccctttgggaaggctgagcaggttgactcttgaggccagcaaaagtggggtgcagagaaggtatctgatcaaatccagtgccctctcagtgccccctcactctgtctgtcactttcctagacccaggatccttgaggtgcccagtctgcttgtctatggaaggctgtctggaggggacaacagaagagatctgccccaaggggaccacacactgttatgatggcctcctcaggctcaggggaggaggcatcttctccaatctgagagtccagggatgcatgccccagccagtttgcaacctgctcaatgggacacaggaaattgggcccgtgggtatgactgagaactgcgatatgaaagattttctgacctgtcatcgggggaccaccattatgacacacggaaacttggctcaagaacccactgattggaccacatcgaataccgagatgtgcgaggtggggcaggtgtgtcaggagacgctgctgctcctagatgtaggactcacatcaaccctggtggcgacctaaagctgcagcgctgttggggctcaaaattcccagaagaccaccatccactcagcccctcctggggtgcttgtggcctcctatacccacttctgctcctcggacctgtgcaatagtgccagcagcagcagcgttctgctgaactccctccctcctcaagctgcccctgtcccaggagaccggcagtgtcctacctgtgtgcagccccttggaacctgttcaagtggctccccccgaatgacctgccccaggggcgccactcattgttatgatgggtacattcatctctcaggaggtgggctgtccaccaaaatgagcattcagggctgcgtggcccaaccttccagcttcttgttgaaccacaccagacaaatcgggatcttctctgcgcgtgagaagcgtgatgtgcagcctcctgcctctcagcatgagggaggtggggctgagggcctggagtctctcacttggggggtggggctggcactggccccagcgctgtggtggggagtggtttgcccttcctgctaactctattacccccacgattcttcaccgctgctgaccacccacactcaacctc

SEQ ID NO: 204246 - DNA, 747 bp, Artificial Sequence
  derived and/or modified sequence
atgagcgccgtgctgctgctggccctgctgggcttcatcctgcccctgcccggcgtgcaggccctgctgtgccagttcggcaccgtgcagcacgtgtggaaggtgagcgacctgcccagacagtggacccccaagaacaccagctgcgacagcggcctgggctgccaggacaccctgatgctgatcgagagcggcccccaggtgagcctggtgctgagcaagggctgcaccgaggccaaggaccaggagcccagagtgaccgagcacagaatgggccccggcctgagcctgatcagctacaccttcgtgtgcagacaggaggacttctgcaacaacctggtgaacagcctgcccctgtgggccccccagccccccgccgaccccggcagcctgagatgccccgtgtgcctgagcatggagggctgcctggagggcaccaccgaggagatctgccccaagggcaccacccactgctacgacggcctgctgagactgagaggcggcggcatcttcagcaacctgagagtgcagggctgcatgccccagcccgtgtgcaacctgctgaacggcacccaggagatcggccccgtgggcatgaccgagaactgcgacatgaaggacttcctgcagctgaagcccgtgggcctgctggaggagcacaacgtgggcgagaaggagagaggccagggccagcaccagtgcgtgcagctggactggcagaagagagccgccaccggcatcttctag

SEQ ID NO: 204247 - DNA, 438 bp, Artificial Sequence
  derived and/or modified sequence
atgagcgccgtgctgctgctggccctgctgggcttcatcctgcccctgcccggcgtgcaggccctgctgtgccagttcggcaccgtgcagcacgtgtggaaggtgagcgacctgcccagacagtggacccccaagaacaccagctgcgacagcggcctgggctgccaggacaccctgatgctgatcgagagcggcccccaggtgagcctggtgctgagcaagggctgcaccgaggccaaggaccaggagcccagagtgaccgagcacagaatgggccccggcctgagcctgatcagctacaccttcgtgtgcagacaggaggacttctgcaacaacctggtgaacagcctgcccctgtgggccccccagccccccgccgaccccatgatgggcgccgccgagggccccttcggcaaggccgagcaggtggacagctag

SEQ ID NO: 204248 - protein, 91 aa, Artificial Sequence
  derived and/or modified sequence
MAASSRAQVLSLYRAMLRESKRFSAYNYRTYAVRRIRDAFRENKNVKDPVEIQTLVNKAKRDLGVIRRQVHIGQLYSTDKLIIENRDMPRT

SEQ ID NO: 204249 - DNA, 276 bp, Artificial Sequence
  derived and/or modified sequence
atggctgcatcctctagggcccaagtgctgagtctgtaccgggcgatgctcagggagagtaagcggttttcagcttacaattacaggacgtatgcagttcgacggattcgagacgcctttagagagaataagaatgtgaaggatccagttgagatacagacactggtgaataaagccaagcgtgatctgggcgtcataaggaggcaagtgcacatcggtcaactttactccaccgacaagctcattattgagaaccgcgacatgcctagaacttag

SEQ ID NO: 204250 - DNA, 276 bp, Artificial Sequence
  derived and/or modified sequence
atggccgccagcagccgggcccaggtgctgagcctgtaccgggccatgctgcgggagagcaagcgcttcagcgcctacaactaccgcacctatgctgtgcggcgcatcagagatgccttccgggagaacaagaatgtgaaggaccctgtggagatccagaccctggtgaacaaggccaagagggacctgggcgtcatccggcggcaggtgcacatcggccagctgtacagcacagacaagctgatcatcgagaacagagacatgcccaggacatag

SEQ ID NO: 204251 - DNA, 1486 bp, Artificial Sequence
  derived and/or modified sequence
gcgcccgcccccgaagcggcgcgggacgcctggcgccgtccgcgatccgcagggctgcccgcttaggcttaggcccggcccgctggcaaagccgagccgcagcattttatttcgttcgtggtttccgcacaggctggagtttcgtgggttgggtcgtacttgggacctcggcgaagaggacccgtttatttttttttctttccaaaatggcagcctccagtcgcgcacaagtgttatctctgtaccgggcgatgctgagagagagcaagcgtttcagcgcctacaattacagaacatatgctgtcaggaggataagagatgccttcagagaaaataaaaatgtaaaggatcctgtagaaattcaaaccctagtgaataaagccaagagagaccttggagtaattcgtcgacaggtccacattggccaactgtattcaactgacaagctgatcattgagaatcgagacatgcccaggacctagcaagccggggaccagccaccagtggcggccagggaccaccttcagcatccactctctgtttgagatgggggctcccaaaaccagcttacaatagccttttgcgctgcctgtcctgtgggagctgataaaccaagtcacatttgcattctgttgcaggcttagtgaaaaaggactgctgtctttccttggttcaagtgttagaatggagagctggagttcgttcagaatagtgctgtgtgttaccacgtctcccctgcaccccattcctaccttgtagctcatgaccattgtgtatagcatttctacactttgtttcttggtccttggcaataaaaagaatgatctccctgagcctttgaccccagataaacccctcccaattaatgcattttcatttcctactgatacaaggcctggagagggctgttgggggccctcagggagggttcaactctgagacgagaactgccttggtgaaggcaagttcaagcaccacttgagactgggggcagcatggagtagggcagggctacggggatacacggtgcaccctgcaacttatacctgagcccagtacaacaaaggtgacgggtgtgtaggtacacacccagagatggagcactgcagatcagcaacctcagccccacctgggaatttgctggaaatgcaggctcaagcccctccccacacctggtgaatgagagagccccagcctgacccaagcccagggcgactcccataccctgaagcctggggcatgctgggcagcaccggtgcccaaatctggctggtggacagaagcacctggagagttggagagctttttaaaaagacatctctcagcacttccctctctgcagattctgactcagtaagtgaggggtgaggcacagtcatttttctctattctgaagctctcccactgttttcaatgtttaaccaactggggacccctgctctttaagtatattacaggtaataaagatattgtttgtatgctttta

SEQ ID NO: 204252 - DNA, 276 bp, Artificial Sequence
  derived and/or modified sequence
atggccgccagcagccgggcccaggtgctgagcctgtaccgggccatgctgcgggaatctaaacggttttcggcctataattatcgaacatacgcagtcaggcgcattcgcgacgctttcagagaaaacaaaaatgtcaaggatcccgtggagatacaaactttggtgaataaggcgaaaagggacctcggcgtgattaggagacaggtccatatcggtcagctgtatagtactgacaagctgattatcgagaatcgcgacatgccaagaacgtag

SEQ ID NO: 204253 - DNA, 276 bp, Artificial Sequence
  derived and/or modified sequence
atggctgcatcctcccgagcccaggtgttgagtctctacagagctatgttgcgggaaagcaagcggtttagcgcttataactatagaacttatgcagtgcggaggatcagagacgcattccgcgaaaataagaacgtaaaggatccagtggagattcagaccctggtgaacaaggccaaacgcgacctcggagtgatcagacgtcaggttcacataggccagctgtattctacagataagttgatcattgagaacagagacatgcctcgcacttag

SEQ ID NO: 204254 - DNA, 276 bp, Artificial Sequence
  derived and/or modified sequence
atggccgccagcagcagagcccaggtgctgagcctgtacagagccatgctgagagagagcaagagattcagcgcctacaactacagaacctacgccgtgagaagaatcagagacgccttcagagagaacaagaacgtgaaggaccccgtggagatccagaccctggtgaacaaggccaagagagacctgggcgtgatcagaagacaggtgcacatcggccagctgtacagcaccgacaagctgatcatcgagaacagagacatgcccagaacctag

SEQ ID NO: 204255 - protein, 199 aa, Artificial Sequence
  derived and/or modified sequence
MSNMEKHLFNLKFAAKELSRSAKKCDKEEKAEKAKIKKAIQKGNMEVARIHAENAIRQKNQAVNFLRMSARVDAVAARVQTAVTMGKVTKSMAGVVKSMDATLKTMNLEKISALMDKFEHQFETLDVQTQQMEDTMSSTTTLTTPQNQVDMLLQEMADEAGLDLNMELPQGQTGSVGTSVASAEQDELSQRLARLRDQV

SEQ ID NO: 204256 - DNA, 600 bp, Artificial Sequence
  derived and/or modified sequence
atgtcgaacatggagaagcacctatttaatttgaaatttgctgctaaagaactctctcggtctgctaagaagtgcgacaaggaggaaaaggctgaaaaggctaaaattaagaaggccatacagaaggggaacatggaagttgcccggattcacgccgagaacgctatccggcagaagaatcaagccgtgaatttcctgcgaatgtctgcaagagttgatgcagtcgcagctcgggtccagaccgccgtcacaatgggtaaagtcactaagagtatggcaggagtagttaagtctatggacgccactctgaaaacaatgaatcttgaaaaaatttccgcgctgatggataaatttgagcaccaattcgaaaccctagatgtgcagacccagcagatggaggacactatgagtagcacaaccactctgaccactcctcagaatcaggtggatatgcttttacaggaaatggccgacgaggctgggcttgacctgaacatggagttgccccaggggcagactggctcagtgggtactagtgttgcgtctgccgagcaggatgaactgtcccagcgactcgccaggctgagagaccaggtgtag

SEQ ID NO: 204257 - DNA, 600 bp, Artificial Sequence
  derived and/or modified sequence
atgagcaacatggagaagcacctgttcaacctgaagtttgctgccaaggagctgagccgcagcgccaagaagtgtgacaaggaggagaaggccgagaaggccaagatcaagaaggccatccagaagggcaacatggaggtggcccgcatccacgcagaaaatgccatccggcagaagaaccaggccgtgaacttcctgaggatgtctgcccgggtggatgctgtggccgcccgggtgcagacagctgtgaccatgggcaaggtgaccaagtccatggccggcgtggtgaagtccatggatgccaccctgaagaccatgaacctggagaagatcagcgccctgatggacaagtttgagcaccagtttgagaccctggatgtgcagacccagcagatggaggacaccatgagcagcaccaccaccctgaccaccccccagaaccaggtggacatgctgctgcaggagatggctgatgaggccggcctggacctgaacatggagctgccccagggccagacaggctctgtgggcacctctgtggccagcgctgagcaggatgagctgagccagaggctggcccggctgcgggaccaggtgtag

SEQ ID NO: 204258 - DNA, 600 bp, Artificial Sequence
  derived and/or modified sequence
atgagcaacatggagaagcacctgttcaacctgaagttcgccgccaaggagttgtctcgttctgcaaagaagtgcgacaaagaagagaaggctgagaaagcaaaaatcaaaaaagccatccagaaggggaacatggaggtggctcgcatccacgcagagaacgcgatcaggcaaaagaaccaagcggtgaactttcttcgtatgtctgcccgggtggacgccgtggcggccagagtccagactgctgtaacaatgggcaaagtgacaaaatccatggctggggtcgtaaaatcaatggatgctaccctgaagaccatgaacctagagaagatctctgccctgatggataagttcgaacaccagtttgaaactctcgacgtgcagactcagcagatggaggacaccatgtcatccactacaacactgactaccccacagaaccaggtcgatatgctgctccaggagatggccgatgaagccggcttagaccttaacatggaactcccgcagggccagacgggctccgtggggacctcagtggcaagcgctgaacaggatgagctgagtcaaaggctcgctcggctgcgggatcaggtttag

SEQ ID NO: 204259 - DNA, 600 bp, Artificial Sequence
  derived and/or modified sequence
atgtctaacatggaaaagcacttgttcaacttgaaattcgctgctaaggagctatcaagatcagccaagaagtgcgacaaagaggaaaaggccgaaaaagcgaaaatcaaaaaggccattcagaaagggaacatggaagttgcccgtattcacgcagaaaacgcaattagacagaagaaccaagcagtcaattttctgcgcatgagtgcacgagtggatgccgttgcggcacgggtgcagactgctgtaactatgggcaaagtgaccaagtcaatggcaggtgtggtcaaaagtatggacgcaaccctgaaaactatgaatttggagaaaatatccgcattaatggataagttcgagcaccagtttgagacactcgacgtacagacccagcagatggaggacacaatgagctctaccacaaccctcactaccccacaaaaccaagtcgacatgctattacaggagatggctgacgaggctggattggatcttaatatggagctccctcagggccagactggtagcgtgggcacttctgtggcaagcgctgaacaggacgagctttcccagagactggccagactgcgagatcaggtctag

SEQ ID NO: 204260 - DNA, 3010 bp, Artificial Sequence
  derived and/or modified sequence
ggacttaccttaccttctctgccttcggcgcgcttctcagccgggccgccgacccaaaggagccgtccgactatgtctaacatggagaaacacctgttcaacctgaagttcgcggccaaagaactgagtaggagtgccaaaaaatgcgataaggaggaaaaggccgaaaaggccaaaattaaaaaggccattcagaagggcaacatggaagttgcgaggatacacgccgaaaatgccatccgccagaagaaccaggcggtgaatttcttgagaatgagtgcgcgagtcgatgcagtggctgccagggtccagacggcggtgacgatgggcaaggtgaccaagtcgatggctggtgtggttaagtcgatggatgcgacattgaagaccatgaatctggagaagatttctgctttgatggacaaattcgagcaccagtttgagactctggacgtccagacgcagcaaatggaagacacgatgagcagcacgacgacgctcaccactccccagaaccaagtggatatgctgctccaggaaatggcagatgaggcgggcctcgacctcaacatggagctgccgcagggccagaccggctccgtgggcacgagcgtggcttcggcggagcaggatgaactgtctcagagactggcccgccttcgggatcaagtgtgacggcagaacccgctctgaggtttcctggccatagccaccctttgaaatgctctctgtgtgttagagagatactataccctagaaactctgaacacgccagaatgctgaaatgcccttctacctttgggtttacagccccctccacataaattaagaaattcagtatttctgcactcttagctggattctaaagttctgtatagctcgtaatgatggtatttttatagcagccttttaacagaactagttaatttcgtgtatatgaatctttctcgaagatctggtcaaaactgtattcagtttcctgcccagaatgatcagattgaaggtggttggtttttattattatttagtgtgattgatagtatctagaatggcaggtggtgcataaaagttaaagagaggggaaagattacttagtttggttatacagttataaacaccatgcagtgtattcggtggactgtgctatttctgtttatcctttgggttttggtttttgttttttttttttttgccttcacagtgagactgcaaatgattgttctcataacgtatattattaataaatgtggtcctataatttatactgaaattaccttaggatatttttgcataatactctcttactgcttacattctataaatttttcacgtgataattgtctttgcgtaactgggaaaaatgccgaataacttcctttattatctggaaaaattaaatttgttcatttatattttctacttactaaattgagtttttaaaaagacttagtgtgacatttgacagtgtctttcaaacgaacttctctaacaagtttatagttattttcctgtttcaacactattagaagtcttataaattatgctaattagcatggcagtcatgttacacactcttaacattgccaaagaactgttgatttcgtttgagaaaaccctaggactgtgtgtgtgtaggttttgttttgattttaacaaccaaaaatagaaataaaattagaactgcgttttaagttctaatttgcatttattaatttgtccaaaagcaagaactcttggaaatccttgaaaatataagctggaatgttttacttagccatgcaagtcatttatgtatacatccagccagctggaaatctgagaagtaaagaggtaggactggaaggaaggagaaagcttgagtctttaaggctagagcccagctgtgctgcctgccatcttctcaggaatggcagtgcgtattttctggctgaaaagtaaagcatgtatccaccgctttctcatagcctcgaaacatggagaaaagcaacttgcttttgccttggcaagcatgctaacctaagttaattcaagttttttttaacttaccctttccttcactggaagatttttccataagagaattccattgtttcagaaaataattataggggcccttccaagttctttgaaagattcataaccaactattcactattataacatgtttcccagtgtaaatgagtaaggaaaaaaaaagtgtaacaggtgcgtgcagatgaggagtgaccctcatatttaagttattttatatttgactggacattgttcagaagtgtgctttaagggacacttgttagttgtctgcccagcatctctcaagaatatccctcctgtcctccacatggttgtgcagggccatgtgtgaagacagcatgagtcttaacccctcttttattttatttttgagacagagtctcgctctgttgcccaggctggagtgctgtggcgcgatctctgctcactgcaacctccacctcccgggttcaagtgattctcctgcctcagcctgccgagtagctggaattacaggtgtgcaccaccatgcccagctagtttttttgtatttttagtagagacagggtttcactatgttggccaggctggtcttgaactcctgacctcaggtgatccgcccacctcagcctcccaaagtgctgggattacaggcatgagccactgcacctggccttaacccctctttagattggaaaaaataattacaactttaaaaatagcttagtgttgaaccctttggtaaactaaagacccttttataatgcacatattcccaacaaaattaatatattttgtgagattaaacaatgcttgtatatgcttgaactttcttaaaatatgtccatgtcatactattatgaatgtacatttttatgagtcataaatattattttcaaaagcactacaggcccatgaattacttcctcacttttgcagttgattactgaaatgtaaatcacaagaatttgtcaattaaatcattttaaactgcatgtta

SEQ ID NO: 204261 - DNA, 600 bp, Artificial Sequence
  derived and/or modified sequence
atgagcaacatggagaagcacctgttcaacctgaagttcgccgccaaggagctgagcagaagcgccaagaagtgcgacaaggaggagaaggccgagaaggccaagatcaagaaggccatccagaagggcaacatggaggtggccagaatccacgccgagaacgccatcagacagaagaaccaggccgtgaacttcctgagaatgagcgccagagtggacgccgtggccgccagagtgcagaccgccgtgaccatgggcaaggtgaccaagagcatggccggcgtggtgaagagcatggacgccaccctgaagaccatgaacctggagaagatcagcgccctgatggacaagttcgagcaccagttcgagaccctggacgtgcagacccagcagatggaggacaccatgagcagcaccaccaccctgaccaccccccagaaccaggtggacatgctgctgcaggagatggccgacgaggccggcctggacctgaacatggagctgccccagggccagaccggcagcgtgggcaccagcgtggccagcgccgagcaggacgagctgagccagagactggccagactgagagaccaggtgtag

SEQ ID NO: 204262 - protein, 447 aa, Artificial Sequence
  derived and/or modified sequence
MGEDTDTRKINHSFLRDHSYVTEADIISTVEFNHTGELLATGDKGGRVVIFQREPESKNAPHSQGEYDVYSTFQSHEPEFDYLKSLEIEEKINKIKWLPQQNAAHSLLSTNDKTIKLWKITERDKRPEGYNLKDEEGKLKDLSTVTSLQVPVLKPMDLMVEVSPRRIFANGHTYHINSISVNSDCETYMSADDLRINLWHLAITDRSFNIVDIKPANMEDLTEVITASEFHPHHCNLFVYSSSKGSLRLCDMRAAALCDKHSKLFEEPEDPSNRSFFSEIISSVSDVKFSHSGRYMLTRDYLTVKVWDLNMEARPIETYQVHDYLRSKLCSLYENDCIFDKFECAWNGSDSVIMTGAYNNFFRMFDRNTKRDVTLEASRESSKPRAVLKPRRVCVGGKRRRDDISVDSLDFTKKILHTAWHPAENIIAIAATNNLYIFQDKVNSDMH

SEQ ID NO: 204263 - DNA, 1344 bp, Artificial Sequence
  derived and/or modified sequence
atgggtgaggacacagatacaaggaaaattaaccattcttttctcagagaccattcctatgtcaccgaagccgacataataagcaccgtcgagtttaatcataccggcgaactcctggccactggtgataaaggaggaagggtagtgatctttcagcgggaacctgaatctaagaatgctcctcatagccagggggagtatgacgtgtattccacattccagtcacacgaacccgagttcgattacctgaaatcattggaaatcgaggagaaaataaataagatcaaatggctcccccaacagaacgccgctcactccttgttgtccactaacgataaaactatcaagctctggaaaattacggagcgtgacaagcgccctgaaggttacaacttaaaagacgaggagggcaaactgaaagatctgtctaccgtgacttccttgcaagtgccagtcttgaagcctatggatttaatggtagaggtgagccctaggcggatcttcgccaatggccacacctaccacattaactctatcagtgtcaactcagactgcgaaacctacatgagtgcggatgacctgcgtatcaacctgtggcacttggctattaccgacagatctttcaatatcgtcgacataaagcccgccaatatggaggacctcaccgaggtgatcaccgctagtgaattccaccctcatcattgcaacctgttcgtgtatagttcaagtaaaggcagcctccgactatgcgatatgagggccgccgcactgtgtgacaagcacagcaagcttttcgaggagcccgaggaccccagcaacagaagctttttcagtgagatcatttcctcagtgagtgatgtgaagtttagccacagcggacggtacatgttgacgagagattacctcactgtgaaagtctgggatctcaatatggaagcccggccgatcgagacctatcaggtccacgattaccttaggagcaaactctgctctctttacgaaaatgactgcatctttgacaagtttgagtgtgcatggaatgggtcggacagcgtaataatgactggagcctataataacttcttccggatgttcgatcggaatactaaaagagacgtgacgctcgaagcgagccgcgaatcatctaagcccagagctgtattaaagccaaggcgcgtgtgtgtcggggggaaacggcgccgcgacgatatcagcgtcgattcactcgattttaccaagaagattttgcacacagcatggcatccagccgagaacatcatagctatagccgccaccaataacctatacatcttccaggacaaggtgaattcagacatgcattag

SEQ ID NO: 204264 - DNA, 1344 bp, Artificial Sequence
  derived and/or modified sequence
atgggagaggacacagacaccaggaagatcaaccacagcttcctgcgggaccacagctatgtgacagaggccgacatcatcagcacagtggagttcaaccacactggagagctgctggccactggagacaagggcggccgggtggtgatcttccagcgggagcctgagagcaagaatgccccccacagccagggcgagtatgatgtgtacagcaccttccagagccatgagcctgagtttgactacctgaagagcctggagattgaggagaagatcaacaagatcaagtggctgccccagcagaatgctgcccacagcctgctgagcaccaatgacaagaccatcaagctgtggaagatcacagagcgggacaagaggcctgagggctacaacctgaaggatgaggagggcaagctgaaggacctgagcacagtgaccagcctgcaggtgcctgtgctgaagcccatggacctgatggtggaggtgagcccccggcgcatctttgccaacggccacacctaccacatcaacagcatctctgtgaacagcgactgtgagacctacatgtctgcagatgacctgcgcatcaacctgtggcacctggccatcacagaccgctccttcaacatcgtggacatcaagccagccaacatggaggacctgacagaggtgatcacagccagcgagttccacccccaccactgcaacctgtttgtgtacagcagcagcaagggcagcctgcggctgtgtgacatgagagctgctgccctgtgtgacaagcacagcaagctgtttgaggagcctgaggaccccagcaacagaagcttcttcagcgagatcatcagctctgtgtctgatgtgaagttcagccacagcggccgctacatgctgacccgggactacctgactgtgaaggtgtgggacctgaacatggaggcccggcccatcgagacctaccaggtgcatgactacctgcggagcaagctgtgcagcctgtatgaaaatgactgcatctttgacaagtttgaatgtgcctggaatggaagtgacagcgtcatcatgactggagcctacaacaacttcttcaggatgtttgacaggaacaccaagagagatgtgaccctggaggccagccgggagagcagcaagcccagggctgtgctgaagcccaggagagtgtgtgtgggcggcaagagaagaagagatgacatctctgtggacagcctggacttcaccaagaagatcctgcacacagcctggcaccctgctgagaacatcatcgccatcgccgccaccaacaacctgtacatcttccaggacaaggtgaacagcgacatgcactag

SEQ ID NO: 204265 - DNA, 1344 bp, Artificial Sequence
  derived and/or modified sequence
atgggcgaggacaccgacacccggaagatcaaccacagcttcctgagagatcacagctatgtcacagaagcagatattatatctaccgtagagttcaaccacaccggcgagctccttgcgaccggtgacaagggcggccgagtggtcatctttcagcgagagccggaaagcaaaaatgccccccacagccagggtgagtacgatgtgtacagcacatttcagtcccacgagccagagtttgactacttaaagtctctggaaatcgaggaaaagatcaataagatcaaatggctgccccagcagaatgcagctcactccctcctctcaaccaatgataagactattaaactctggaagatcaccgagcgcgacaagagacccgaggggtacaatttaaaggacgaggaagggaagttgaaggacttaagtactgtaacatccctgcaggttccggtcttaaaacctatggatctgatggtcgaagtgtctcccagacggatattcgccaacggacacacataccacattaactcaatctccgtgaacagcgattgtgagacctacatgagcgctgatgacctccgcattaacctctggcacttagctatcactgaccgctccttcaacattgtcgacataaagcccgctaacatggaggacctgactgaagtgatcactgcaagtgagtttcatccacaccactgcaacctcttcgtctacagctcctctaaagggtcactcagattgtgtgacatgagagctgcagcgctctgcgataaacacagcaaactattcgaggagcctgaagatccctcgaatcggagtttttttagcgagatcatatcatcagtaagcgatgtgaagttctctcatagcggtaggtacatgctgaccagggactatctgactgttaaagtctgggatcttaatatggaagcccgaccgatcgagacgtatcaggtgcatgactacctgcgatccaagctatgctccctgtatgaaaatgactgtatctttgacaagttcgagtgcgcatggaatgggagcgattccgtgattatgacgggtgcttacaacaacttctttcgaatgtttgatcgtaataccaagcgagacgtgaccttggaagccagccgcgaaagcagcaaaccccgagctgtcctgaaaccacgacgcgtatgcgtgggaggaaaacgtaggagagatgatattagcgtcgattctctggactttactaaaaagattctgcataccgcttggcatcctgctgaaaatatcatcgctattgcagccacgaataacctctatattttccaagacaaggtgaattcagacatgcattag

SEQ ID NO: 204266 - DNA, 1344 bp, Artificial Sequence
  derived and/or modified sequence
atgggcgaggatacggatactcggaaaatcaaccactcgttcctgcgggaccactcgtatgtcactgaggctgatatcatcagcaccgtcgagtttaatcataccggtgagctgctggctacaggggacaagggcggaagagtggtcatttttcaaagagagcctgagtccaagaacgcacctcactcccagggggagtatgatgtgtacagcacctttcaatcacacgagcccgaattcgattacctcaaaagcttggaaatcgaggagaagattaacaagatcaaatggctcccacagcagaacgctgcacacagcctcctgagcacaaacgacaaaaccattaagctgtggaagataacagagagggacaagcgcccagagggctacaatctgaaggacgaggaggggaagctaaaggatctgagtacggtgactagcttgcaggtgcccgtgctcaagccgatggacctgatggtggaagtttcgccaagacgcatttttgccaacggtcacacctaccatataaactccatctctgtgaactccgattgtgaaacctacatgagcgctgatgaccttaggattaatctctggcatctggctattaccgataggtcgtttaacatcgtcgacatcaaacccgcaaatatggaggatctgacggaagtcataacggccagcgaattccatccccatcattgtaacctcttcgtgtactcaagctcgaaaggctccctgcgcttgtgtgacatgcgggcagcagccttgtgtgataaacacagcaaattgtttgaagaaccagaggatccgtcaaaccgctctttctttagtgaaattatatctagcgtgagtgacgtgaagttttcccacagtgggaggtacatgttgacgagggattacctcactgtgaaggtgtgggatctgaacatggaggctaggccaatcgaaacttaccaggtccatgattacctgaggtcgaaactttgcagtctctacgaaaatgactgtatcttcgacaagttcgagtgcgcttggaacggtagtgattcggtgattatgactggtgcatacaataacttcttccggatgttcgataggaataccaagcgggatgtgaccctcgaagcatctagagagtcctccaaaccccgtgccgtgttgaagcccaggcgagtgtgcgttggtggcaagcgacgacgtgacgatatcagtgtggactccctcgactttaccaaaaagatcctgcataccgcatggcacccagcagagaacattattgcaattgccgctacaaacaatttgtacatatttcaagataaggtgaatagcgatatgcattag

SEQ ID NO: 204267 - DNA, 1807 bp, Artificial Sequence
  derived and/or modified sequence
gcggccgccgcccgcccaccgcgcgctcgcttgaccgcggcgcccgcccccggccgcccccgcccgtccccctgccgcgatgccctcccttcggggccccggcggcccgcgcccctgctaggctgcggcggcatggcccgcgcgcccggcgcgacctctgcggattgcatcggtgtgtggcggcggggcatgcccagagcaccgggcacggccttcaatgggcgaggacacggacacgcggaaaattaaccacagcttcctgcgggaccacagctatgtgactgaagctgacatcatctctaccgttgagttcaaccacacgggagagctgctggccacaggtgacaagggcggccgggtcgtcatcttccagcgggaaccagagagtaaaaatgcgccccacagccagggcgaatacgacgtgtacagcactttccagagccacgagccggagtttgactatctcaagagcctggagatagaggagaagatcaacaagatcaagtggctcccacagcagaacgccgcccactcactcctgtccaccaacgataaaactatcaaattatggaagattaccgaacgagataaaaggcccgaaggatacaacctgaaggatgaagaggggaaacttaaggacctgtccacggtgacgtcactgcaggtgccagtgctgaagcccatggatctgatggtggaggtgagccctcggaggatctttgccaatggccacacctaccacatcaactccatctccgtcaacagtgactgcgagacctacatgtcggcggatgacctgcgcatcaacctctggcacctggccatcaccgacaggagcttcaacatcgtggacatcaagccggccaacatggaggaccttacggaggtgatcacagcatctgagttccatccgcaccactgcaacctcttcgtctacagcagcagcaagggctccctgcggctctgcgacatgcgggcagctgccctgtgtgacaagcattccaagctctttgaagagcctgaggaccccagtaaccgctcattcttctcggaaatcatctcctccgtgtccgacgtgaagttcagccacagcggccgctacatgctcacccgggactaccttacagtcaaggtctgggacctgaacatggaggcaagacccatagagacctaccaggtccatgactaccttcggagcaagctctgttccctgtacgagaacgactgcattttcgacaagtttgaatgtgcctggaacgggagcgacagcgtcatcatgaccggggcctacaacaacttcttccgcatgttcgatcggaacaccaagcgggacgtgaccctggaggcctcgagggaaagcagcaagccccgggctgtgctcaagccacggcgcgtgtgcgtggggggcaagcgccggcgtgatgacatcagtgtggacagcttggacttcaccaagaagatcctgcacacggcctggcacccggctgagaacatcattgccatcgccgccaccaacaacctgtacatcttccaggacaaggtaaactctgacatgcactaggtatgtgcagttcccggcccctgccacccagcctcatgcaagtcatccccgacatgaccttcacgaccgcaatgcaaggaggggaagaaagtcacagcactgatgaggacagctgcagaggtggcagtgtgtggacacaggaagtttgggccccctccctgccccagctttcctaggccagaattgtgtttggcagtaattgtctgtttaaaaaaataaaaaggaaaggaagcgttcaccgccaca

SEQ ID NO: 204268 - DNA, 1344 bp, Artificial Sequence
  derived and/or modified sequence
atgggcgaggacaccgacaccagaaagatcaaccacagcttcctgagagaccacagctacgtgaccgaggccgacatcatcagcaccgtggagttcaaccacaccggcgagctgctggccaccggcgacaagggcggcagagtggtgatcttccagagagagcccgagagcaagaacgccccccacagccagggcgagtacgacgtgtacagcaccttccagagccacgagcccgagttcgactacctgaagagcctggagatcgaggagaagatcaacaagatcaagtggctgccccagcagaacgccgcccacagcctgctgagcaccaacgacaagaccatcaagctgtggaagatcaccgagagagacaagagacccgagggctacaacctgaaggacgaggagggcaagctgaaggacctgagcaccgtgaccagcctgcaggtgcccgtgctgaagcccatggacctgatggtggaggtgagccccagaagaatcttcgccaacggccacacctaccacatcaacagcatcagcgtgaacagcgactgcgagacctacatgagcgccgacgacctgagaatcaacctgtggcacctggccatcaccgacagaagcttcaacatcgtggacatcaagcccgccaacatggaggacctgaccgaggtgatcaccgccagcgagttccacccccaccactgcaacctgttcgtgtacagcagcagcaagggcagcctgagactgtgcgacatgagagccgccgccctgtgcgacaagcacagcaagctgttcgaggagcccgaggaccccagcaacagaagcttcttcagcgagatcatcagcagcgtgagcgacgtgaagttcagccacagcggcagatacatgctgaccagagactacctgaccgtgaaggtgtgggacctgaacatggaggccagacccatcgagacctaccaggtgcacgactacctgagaagcaagctgtgcagcctgtacgagaacgactgcatcttcgacaagttcgagtgcgcctggaacggcagcgacagcgtgatcatgaccggcgcctacaacaacttcttcagaatgttcgacagaaacaccaagagagacgtgaccctggaggccagcagagagagcagcaagcccagagccgtgctgaagcccagaagagtgtgcgtgggcggcaagagaagaagagacgacatcagcgtggacagcctggacttcaccaagaagatcctgcacaccgcctggcaccccgccgagaacatcatcgccatcgccgccaccaacaacctgtacatcttccaggacaaggtgaacagcgacatgcactag

SEQ ID NO: 204269 - protein, 390 aa, Artificial Sequence
  derived and/or modified sequence
MSAANPETPNSTISREASTQSSSAAASQGWVLPEGKIVPNTVFVGGIDARMDETEIGSCFGRYGSVKEVKIITNRTGVSKGYGFVSFVNDVDVQKIVGSQIHFHGKKLKLGPAIRKQKLCARHVQPRPLVVNPPPPPQFQNVWRNPNTETYLQPQITPNPVTQHVQAYSAYPHSPGQVITGCQLLVYNYQEYPTYPDSAFQVTTGYQLPVYNYQPFPAYPRSPFQVTAGYQLPVYNYQAFPAYPNSPFQVATGYQFPVYNYQPFPAYPSSPFQVTAGYQLPVYNYQAFPAYPNSPVQVTTGYQLPVYNYQAFPAYPSSPFQVTTGYQLPVYNYQAFPAYPNSAVQVTTGYQFHVYNYQMPPQCPVGEQRRNLWTEAYKWWYLVCLIQRRD

SEQ ID NO: 204270 - protein, 390 aa, Artificial Sequence
  derived and/or modified sequence
MSAANPETPNSTISREASTQSSSAAASQGWVLPEGKIVPNTVFVGGIDARMDETEIGSCFGRYGSVKEVKIITNRTGVSKGYGFVSFVNDVDVQKIVGSQIHFHGKKLKLGPAIRKQKLCARHVQPRPLVVNPPPPPQFQNVWRNPNTETYLQPQITPNPVTQHVQAYSAYPHSPGQVITGCQLLVYNYQEYPTYPDSAFQVTTGYQLPVYNYQPFPAYPRSPFQVTAGYQLPVYNYQAFPAYPNSPFQVATGYQFPVYNYQPFPAYPSSPFQVTAGYQLPVYNYQAFPAYPNSPFQVATGYQFPVYNYQAFPAYPNSPVQVTTGYQLPVYNYQAFPAYPNSAVQVTTGYQFHVYNYQMPPQCPVGEQRRNLWTEAYKWWYLVCLIQRRD

SEQ ID NO: 204271 - protein, 361 aa, Artificial Sequence
  derived and/or modified sequence
MSAANPETPNSTISREASTQSSSAAASQGWVLPEGKIVPNTVFVGGIDARMDETEIGSCFGRYGSVKEVKIITNRTGVSKGYGFVSFVNDVDVQKIVGSQIHFHGKKLKLGPAIRKQKLCARHVQPRPLVVNPPPPPQFQNVWRNPNTETYLQPQITPNPVTQHVQAYSAYPHSPGQVITGCQLLVYNYQEYPTYPDSAFQVTTGYQLPVYNYQPFPAYPRSPFQVTAGYQLPVYNYQAFPAYPNSPFQVATGYQFPVYNYQPFPAYPSSPFQVTAGYQLPVYNYQAFPAYPNSPFQVATGYQFPVYNYQAFPAYPNSPFQVATGYQFPVYNYQAFPAYPNSPVQVTTGYQLPVYNYQMPP

SEQ ID NO: 204272 - protein, 361 aa, Artificial Sequence
  derived and/or modified sequence
MSAANPETPNSTISREASTQSSSAAASQGWVLPEGKIVPNTVFVGGIDARMDETEIGSCFGRYGSVKEVKIITNRTGVSKGYGFVSFVNDVDVQKIVGSQIHFHGKKLKLGPAIRKQKLCARHVQPRPLVVNPPPPPQFQNVWRNPNTETYLQPQITPNPVTQHVQAYSAYPHSPGQVITGCQLLVYNYQEYPTYPDSAFQVTTGYQLPVYNYQPFPAYPRSPFQVTAGYQLPVYNYQAFPAYPNSPFQVATGYQFPVYNYQAFPAYPNSPVQVTTGYQLPVYNYQAFPAYPNSPFQVATGYQFPVYNYQAFPAYPNSPVQVTTGYQLPVYNYQAFPAYPNSPVQVTTGYQLPVYNYQMPP

SEQ ID NO: 204273 - protein, 390 aa, Artificial Sequence
  derived and/or modified sequence
MSAANPETPNSTISREASTQSSSAAASQGWVLPEGKIVPNTVFVGGIDARMDETEIGSCFGRYGSVKEVKIITNRTGVSKGYGFVSFVNDVDVQKIVGSQIHFHGKKLKLGPAIRKQKLCARHVQPRPLVVNPPPPPQFQNVWRNPNTETYLQPQITPNPVTQHVQAYSAYPHSPGQVITGCQLLVYNYQEYPTYPDSAFQVTTGYQLPVYNYQPFPAYPRSPFQVTAGYQLPVYNYQAFPAYPNSPFQVATGYQFPVYNYQAFPAYPNSPVQVTTGYQLPVYNYQAFPAYPNSPFQVATGYQFPVYNYQAFPAYPNSPVQVTTGYQLPVYNYQAFPAYPNSAVQVTTGYQFHVYNYQMPPQCPVGEQRRNLWTEAYKWWYLVCLIQRRD

SEQ ID NO: 204274 - DNA, 1005 bp, Artificial Sequence
  derived and/or modified sequence
atgagcgccgccaaccccgagacccccaacagcaccatcagcagagaggccagcacccagagcagcagcgccgccgccagccagggctgggtgctgcccgagggcaagatcgtgcccaacaccgtgttcgtgggcggcatcgacgccagaatggacgagaccgagatcggcagctgcttcggcagatacggcagcgtgaaggaggtgaagatcatcaccaacagaaccggcgtgagcaagggctacggcttcgtgagcttcgtgaacgacgtggacgtgcagaagatcgtgggcagccagatccacttccacggcaagaagctgaagctgggccccgccatcagaaagcagaagctgtgcgccagacacgtgcagcccagacccctggtggtgaacccccccccccccccccagttccagaacgtgtggagaaaccccaacaccgagacctacctgcagccccagatcacccccaaccccgtgacccagcacgtgcaggcctacagcgcctacccccacagccccggccaggtgatcaccggctgccagctgctggtgtacaactaccaggagtaccccacctaccccgacagcgccttccaggtgaccaccggctaccagctgcccgtgtacaactaccagcccttccccgcctaccccagaagccccttccaggtgaccgccggctaccagctgcccgtgtacaactaccaggccttccccgcctaccccaacagccccttccaggtggccaccggctaccagttccccgtgtacaactaccagcccttccccgcctaccccagcagccccttccaggtgaccgccggctaccagctgcccgtgtacaactaccaggccttccccgcctaccccaacagccccttccaggtggccaccggctaccagttccccgtgtacaactaccaggccttccccgcctaccccaacagccccgtgcaggtgaccaccggctaccagctgcccgtgtacaactaccagtag

SEQ ID NO: 204275 - DNA, 1173 bp, Artificial Sequence
  derived and/or modified sequence
atgagcgccgccaaccccgagacccccaacagcaccatcagcagagaggccagcacccagagcagcagcgccgccgccagccagggctgggtgctgcccgagggcaagatcgtgcccaacaccgtgttcgtgggcggcatcgacgccagaatggacgagaccgagatcggcagctgcttcggcagatacggcagcgtgaaggaggtgaagatcatcaccaacagaaccggcgtgagcaagggctacggcttcgtgagcttcgtgaacgacgtggacgtgcagaagatcgtgggcagccagatccacttccacggcaagaagctgaagctgggccccgccatcagaaagcagaagctgtgcgccagacacgtgcagcccagacccctggtggtgaacccccccccccccccccagttccagaacgtgtggagaaaccccaacaccgagacctacctgcagccccagatcacccccaaccccgtgacccagcacgtgcaggcctacagcgcctacccccacagccccggccaggtgatcaccggctgccagctgctggtgtacaactaccaggagtaccccacctaccccgacagcgccttccaggtgaccaccggctaccagctgcccgtgtacaactaccagcccttccccgcctaccccagaagccccttccaggtgaccgccggctaccagctgcccgtgtacaactaccaggccttccccgcctaccccaacagccccttccaggtggccaccggctaccagttccccgtgtacaactaccagcccttccccgcctaccccagcagccccttccaggtgaccgccggctaccagctgcccgtgtacaactaccaggccttccccgcctaccccaacagccccgtgcaggtgaccaccggctaccagctgcccgtgtacaactaccaggccttccccgcctaccccagcagccccttccaggtgaccaccggctaccagctgcccgtgtacaactaccaggccttccccgcctaccccaacagcgccgtgcaggtgaccaccggctaccagttccacgtgtacaactaccagatgcccccccagtgccccgtgggcgagcagagaagaaacctgtggaccgaggcctacaagtggtggtacctggtgtgcctgatccagagaagagactag

SEQ ID NO: 204276 - DNA, 1101 bp, Artificial Sequence
  derived and/or modified sequence
atgagcgccgccaaccccgagacccccaacagcaccatcagcagagaggccagcacccagagcagcagcgccgccgccagccagggctgggtgctgcccgagggcaagatcgtgcccaacaccgtgttcgtgggcggcatcgacgccagaatggacgagaccgagatcggcagctgcttcggcagatacggcagcgtgaaggaggtgaagatcatcaccaacagaaccggcgtgagcaagggctacggcttcgtgagcttcgtgaacgacgtggacgtgcagaagatcgtgggcagccagatccacttccacggcaagaagctgaagctgggccccgccatcagaaagcagaagctgtgcgccagacacgtgcagcccagacccctggtggtgaacccccccccccccccccagttccagaacgtgtggagaaaccccaacaccgagacctacctgcagccccagatcacccccaaccccgtgacccagcacgtgcaggcctacagcgcctacccccacagccccggccaggtgatcaccggctgccagctgctggtgtacaactaccaggagtaccccacctaccccgacagcgccttccaggtgaccaccggctaccagctgcccgtgtacaactaccagcccttccccgcctaccccagaagccccttccaggtgaccgccggctaccagctgcccgtgtacaactaccaggccttccccgcctaccccaacagccccttccaggtggccaccggctaccagttccccgtgtacaactaccagcccttccccgcctaccccagcagccccttccaggtgaccgccggctaccagctgcccgtgtacaactaccaggccttccccgcctaccccaacagccccgtgcaggtgaccaccggctaccagctgcccgtgtacaactaccaggccttccccgcctaccccaacagcgccgtgcaggtgaccaccggctaccagttccacgtgtacaactaccagatgcccccccagtgccccgtgggcgagcagagaagaaacctgtggaccgaggcctacaagtggtggtacctggtgtgcctgatccagagaagagactag

SEQ ID NO: 204277 - DNA, 864 bp, Artificial Sequence
  derived and/or modified sequence
atggacgagaccgagatcggcagctgcttcggcagatacggcagcgtgaaggaggtgaagatcatcaccaacagaaccggcgtgagcaagggctacggcttcgtgagcttcgtgaacgacgtggacgtgcagaagatcgtgggcagccagatccacttccacggcaagaagctgaagctgggccccgccatcagaaagcagaagctgtgcgccagacacgtgcagcccagacccctggtggtgaacccccccccccccccccagttccagaacgtgtggagaaaccccaacaccgagacctacctgcagccccagatcacccccaaccccgtgacccagcacgtgcaggcctacagcgcctacccccacagccccggccaggtgatcaccggctgccagctgctggtgtacaactaccaggagtaccccacctaccccgacagcgccttccaggtgaccaccggctaccagctgcccgtgtacaactaccagcccttccccgcctaccccagaagccccttccaggtgaccgccggctaccagctgcccgtgtacaactaccaggccttccccgcctaccccaacagccccttccaggtggccaccggctaccagttccccgtgtacaactaccagcccttccccgcctaccccagcagccccttccaggtgaccgccggctaccagctgcccgtgtacaactaccaggccttccccgcctaccccaacagccccttccaggtggccaccggctaccagttccccgtgtacaactaccaggccttccccgcctaccccaacagccccgtgcaggtgaccaccggctaccagctgcccgtgtacaactaccagaagttcccctag

SEQ ID NO: 204278 - DNA, 1173 bp, Artificial Sequence
  derived and/or modified sequence
atgagcgccgccaaccccgagacccccaacagcaccatcagcagagaggccagcacccagagcagcagcgccgccgccagccagggctgggtgctgcccgagggcaagatcgtgcccaacaccgtgttcgtgggcggcatcgacgccagaatggacgagaccgagatcggcagctgcttcggcagatacggcagcgtgaaggaggtgaagatcatcaccaacagaaccggcgtgagcaagggctacggcttcgtgagcttcgtgaacgacgtggacgtgcagaagatcgtgggcagccagatccacttccacggcaagaagctgaagctgggccccgccatcagaaagcagaagctgtgcgccagacacgtgcagcccagacccctggtggtgaacccccccccccccccccagttccagaacgtgtggagaaaccccaacaccgagacctacctgcagccccagatcacccccaaccccgtgacccagcacgtgcaggcctacagcgcctacccccacagccccggccaggtgatcaccggctgccagctgctggtgtacaactaccaggagtaccccacctaccccgacagcgccttccaggtgaccaccggctaccagctgcccgtgtacaactaccagcccttccccgcctaccccagaagccccttccaggtgaccgccggctaccagctgcccgtgtacaactaccaggccttccccgcctaccccaacagccccttccaggtggccaccggctaccagttccccgtgtacaactaccagcccttccccgcctaccccagcagccccttccaggtgaccgccggctaccagctgcccgtgtacaactaccaggccttccccgcctaccccaacagccccttccaggtggccaccggctaccagttccccgtgtacaactaccaggccttccccgcctaccccaacagccccgtgcaggtgaccaccggctaccagctgcccgtgtacaactaccaggccttccccgcctaccccaacagcgccgtgcaggtgaccaccggctaccagttccacgtgtacaactaccagatgcccccccagtgccccgtgggcgagcagagaagaaacctgtggaccgaggcctacaagtggtggtacctggtgtgcctgatccagagaagagactag

SEQ ID NO: 204279 - DNA, 1005 bp, Artificial Sequence
  derived and/or modified sequence
atgtccgctgccaatcctgagacaccaaactctaccatttctagggaagcctccacacagtcctcgagcgccgccgcctctcaaggatgggtcctgccggaaggaaaaattgtgcctaatacggtattcgtaggtggaattgacgccagaatggatgaaaccgagattggcagctgcttcgggagatatgggtctgtcaaagaagtgaagattataactaatcgcactggggtctcaaagggttatggctttgtctccttcgtcaatgacgtggatgtgcaaaaaattgtgggaagccagatccactttcatggaaaaaagctgaagttaggaccagcaatccggaagcaaaagctgtgtgccaggcacgtgcagcccagacccctggtcgtgaaccccccccccccgccccagttccagaatgtgtggagaaaccctaacactgagacttacctgcagccccaaattacacccaaccccgtcactcagcatgttcaggcttattccgcctacccacattctcctggccaggtgatcacaggatgtcagctactggtttacaattaccaggagtaccctacataccctgattctgcattccaggtgactacggggtaccagctgccggtttataattatcagccatttccagcttacccacgatcccctttccaggttacagccgggtatcaactgcctgtctataattaccaggccttccctgcttacccgaattcaccctttcaggtagctacaggctaccagttccccgtctacaattatcaaccattcccagcttatcccagtagcccatttcaggtaaccgctgggtaccaactgccggtatacaactatcaagcattccccgcttaccccaatagccccttccaggtagccaccggctatcaattccctgtgtacaattaccaagcttttcccgcctacccgaactcacccgtgcaagtgactaccggctatcaactgcctgtatataactatcagtag

SEQ ID NO: 204280 - DNA, 1173 bp, Artificial Sequence
  derived and/or modified sequence
atgtcggccgctaaccctgagactccaaacagcaccatttcaagggaggcgtcaacacagtcctcctccgccgctgcaagccagggttgggtcctgccggaaggtaaaatagtgccgaacaccgtgtttgtaggcggtattgatgcccgtatggacgaaacggaaatcggatcctgcttcgggagatacgggagtgttaaggaagtcaaaattatcacaaaccgcaccggggtcagcaaaggctacgggttcgtgtcattcgtcaacgacgtggacgttcagaagatcgtgggctcacagatccatttccatggaaaaaagctaaaactcggtccagctattcgcaagcaaaaactgtgcgcacgacacgtccaacctcggccactggtggtaaacccccctccaccaccacagtttcagaatgtgtggagaaacccaaacactgaaacttatttacagccccagatcaccccaaaccctgtgacgcagcacgtgcaggcatactcagcgtatccccactctcctggccaagtgattactggctgccagctgttagtgtataattatcaggaatatccaacgtacccagattctgcctttcaagtgactacggggtatcagctccctgtgtataactatcagccattcccagcgtaccctagatccccttttcaggttactgcaggctatcagctgccggtctacaattaccaagcttttccggcttaccccaactcaccctttcaggtcgccactggatatcagtttccggtttacaattaccagccattccccgcctacccatcatcaccatttcaggtcacagcaggataccagcttccagtgtacaactatcaggcgttccccgcgtatcccaactcccctgtgcaggtgaccaccgggtatcagttacctgtctacaactaccaggcattccctgcttacccttccagtccgttccaggttacgaccgggtatcaacttcctgtgtataactaccaggcctttcctgcctaccctaacagtgccgtgcaagtcacgactgggtatcaattccatgtgtacaattaccaaatgcctcctcagtgccctgtgggcgaacagcgcagaaacctgtggaccgaggcctataaatggtggtatctggtatgcctaatccagaggagagactag

SEQ ID NO: 204281 - DNA, 1173 bp, Artificial Sequence
  derived and/or modified sequence
atgagtgccgccaaccctgagacccccaactctactatctctcgcgaagcttccacccagtctagctcagctgctgcaagccaggggtgggtgttgccagaagggaagatcgtgcccaatactgtatttgtaggaggcatcgacgcacgtatggacgaaacagaaattggatcgtgttttgggcggtacggcagcgtgaaagaagttaagatcataactaatcggacaggtgtgtctaaagggtacggttttgtctcattcgtgaacgacgtggacgtacagaaaatcgtcgggtctcagatccattttcatggcaaaaagttgaagctggggcccgccattagaaagcagaagctgtgcgcgaggcacgtgcagcctaggcccctggtcgtgaacccccccccccccccacagtttcagaatgtatggaggaaccccaacacggagacctacctgcaaccacagatcactcctaaccccgtaacccagcacgtccaggcttacagcgcctacccccatagccctggacaggtgataacaggatgccagctgctcgtttataactatcaggagtacccgacgtatccggatagcgcttttcaggtgacgacaggctatcagctcccggtgtacaattatcaacctttccctgcttacccaaggtctcccttccaagtcaccgccggataccagctgcctgtatacaactatcaggcgttcccagcgtacccaaacagcccctttcaagtcgccacaggttaccagttccctgtgtataactaccagccattccccgcatatccatccagtccattccaagttaccgccggctatcagcttcctgtttacaattaccaggcctttccggcttatcccaactcacccgtgcaagttaccaccggatatcagctcccagtatacaattaccaagcattccccgcatatccctcttcacccttccaggtcactacaggctaccaactacctgtttataactaccaggcattcccggcctacccaaacagcgccgttcaagtcaccaccgggtatcaattccatgtctataactaccagatgcctcctcaatgccccgtgggcgaacagcgccgcaatttgtggaccgaggcctacaaatggtggtatctggtttgcctcatacagaggcgggattag

SEQ ID NO: 204282 - DNA, 1101 bp, Artificial Sequence
  derived and/or modified sequence
atgagcgccgcaaacccagagactccgaattctactatatccagggaagcttccacacagtcaagttctgcagcagcctcgcagggctgggtcctccctgagggaaagattgtccctaacacggtgttcgtaggtggcattgacgctagaatggacgagaccgaaattggaagctgcttcggacgctacgggagcgtgaaagaggtgaagataatcactaaccgtacaggagtgagcaaggggtatggatttgtgagctttgtgaacgacgtcgatgtgcagaagattgtcggctcacagatccacttccatggaaagaaactcaagttgggcccggctatacgcaaacagaaactctgtgcacgtcacgttcaaccgagacccttggttgtgaaccccccgccacctccacaattccaaaatgtttggcggaatccgaatactgagacctatttacaaccacaaatcacaccaaatccagtgacccaacacgtccaggcttactctgcgtatccacactctccaggccaggtcataacaggttgtcaacttttggtgtataattatcaggaatatccaacctaccccgacagtgcctttcaggtgactacaggataccagttgcctgtttacaattatcaacctttccctgcatatcctcggagcccctttcaagtcaccgctggctaccagctgcctgtgtacaactaccaggcgttccctgcttatcctaacagccctttccaggtggcaaccggctatcaatttccggtgtacaactaccagccttttcctgcatatcctagtagtcctttccaggtgactgccgggtatcaactacctgtgtataactaccaagcattccctgcttatccaaatagccctgtgcaagtgaccaccggttaccagctgcctgtgtacaattaccaggcctttccagcataccccaactctgccgtgcaggtgacaacgggttaccagtttcatgtgtacaattaccagatgccccctcagtgtcccgtcggggagcaacgaagaaacctctggactgaggcgtacaaatggtggtatctggtatgtctcatccagaggagggactag

SEQ ID NO: 204283 - DNA, 864 bp, Artificial Sequence
  derived and/or modified sequence
atggatgaaactgaaatagggtcctgcttcggccggtatgggtcagttaaggaggttaagattatcactaaccggacgggcgtgagcaagggctacggctttgtgagcttcgtgaacgacgtggatgtgcagaagattgttggcagccagattcactttcatggcaagaagctgaagctgggacccgcaattaggaaacagaagctgtgtgctagacacgtgcaacccagacccctggttgtcaacccacctccccctccccagttccagaatgtatggcgcaatcctaacactgaaacgtatctacagccacagattacacccaaccctgtgacgcagcatgtccaggcctactcggcctatcctcatagtcctggacaggtaattacgggctgccagctcctggtttacaactaccaggagtaccccacttatccagactccgcctttcaagtgacgactgggtatcagctgcctgtgtataactatcagccctttccagcatatccccgtagcccctttcaagtgacggcggggtaccagctgcccgtttacaattaccaagcttttcccgcttatcctaactcccctttccaagtagctactggataccagttcccagtctacaactaccagccatttcccgcctatccttcttcaccatttcaggttacagccggctatcaactcccggtgtataattatcaggcgttccccgcctaccctaattctccattccaggtcgcaacagggtaccagttccctgtctacaactaccaggcctttccagcttatcccaatagccctgtccaggttactacaggctatcaactacccgtctacaactatcagaaattcccttag

SEQ ID NO: 204284 - DNA, 1173 bp, Artificial Sequence
  derived and/or modified sequence
atgtccgccgccaatccagagacccccaattcaacaatttccagggaagcaagcacacaaagtagttccgcagcggctagtcaggggtgggtgttgcccgagggtaagatcgtgccaaatactgtgtttgttggcggtattgacgctcgcatggacgaaacagaaatcggaagttgttttgggaggtacggaagcgtgaaagaggtaaaaatcattaccaacaggaccggagtcagcaagggatacggtttcgtctcattcgtcaacgatgtggacgtccagaagattgtgggaagtcagattcactttcatgggaaaaagctgaagctcgggccagcaatacggaaacagaagctgtgtgccagacacgtccagccccgccctctggtggtaaatccccccccccctcctcagtttcaaaacgtctggagaaatcccaatacagaaacctaccttcagccccaaatcaccccaaaccctgtcacacaacatgtccaggcctactccgcttatccccactcccccggacaggtgattactggctgccagcttcttgtctataactatcaagaatatcctacctatcctgattccgcattccaggttaccacaggctaccagctgccggtctacaattaccagccttttcctgcatatcctcgcagccctttccaggtgacagctggatatcagctgcctgtctacaattatcaggcattccctgcctatcctaactctcccttccaggtcgcaacgggctatcagttccctgtttacaactaccagcccttccctgcttacccatcaagccccttccaggtgacagccgggtatcagctccctgtgtacaactaccaggccttccccgcatatcccaattccccttttcaggtagctacgggataccaattcccggtgtataactatcaggccttccccgcctaccctaactctcctgtacaggtcacaacgggatatcagttacctgtgtataattatcaggctttccctgcatacccaaatagcgccgtgcaggtaactactggataccagtttcacgtgtacaattatcaaatgccgccacagtgccccgttggagaacagcggcgaaacctgtggaccgaagcctataaatggtggtacctggtgtgcctgattcagcggagagactag

SEQ ID NO: 204285 - DNA, 1173 bp, Artificial Sequence
  derived and/or modified sequence
atgtcggcagcgaaccctgagactcctaatagtaccatttctcgagaggcctccacacagtcgtcttcagctgctgcttcacagggctgggtgcttcctgaaggaaagattgtacccaacaccgtgtttgtagggggtatcgacgctagaatggatgaaacagaaattgggtcttgtttcgggagatatggcagcgtgaaggaggtaaaaatcattactaatcgtaccggagtgagcaagggttacggcttcgtatccttcgttaatgacgtcgacgtgcagaagatagtaggctcacagatccactttcacggcaagaaactcaaactcgggcctgccattagaaaacagaagctctgcgcacgccacgttcagccgcgtcccttggtggttaaccctcccccgccgcctcagtttcagaacgtgtggaggaaccccaataccgagacatacttgcagccacagatcaccccaaaccctgtcacccaacacgttcaagcctacagcgcataccctcattcaccaggtcaggtcattactggctgccaattgctggtgtataattaccaggagtatcccacttacccagatagcgcattccaggtaaccactggatatcagctgcccgtgtacaattatcagccattcccagcttatcctcgctccccgtttcaggtgaccgccggttatcagctgcccgtgtataattaccaggcattcccagcctacccaaattcccctttccaggtggcaacaggataccagtttcccgtctacaattaccagccttttcctgcatatccctcatcccctttccaagttaccgccggttatcagctgccagtctacaattaccaggcattccccgcctacccaaactccccatttcaggtcgcgaccggctatcaatttcccgtttataattatcaggcgttccccgcataccctaacagtccagtccaggtgaccaccggatatcagcttccagtctacaactatcaggccttcccggcctaccctaactcggcagtccaagtgactacaggctatcagttccacgtatataactatcaaatgcccccacagtgccctgtgggcgagcagaggcgcaatctgtggactgaggcctataagtggtggtacctggtttgcctcatccaacgccgagactag

SEQ ID NO: 204286 - DNA, 1005 bp, Artificial Sequence
  derived and/or modified sequence
atgtctgctgccaaccctgagacccccaacagcaccatcagccgggaggccagcacccagagcagcagcgctgctgccagccagggctgggtgctgcctgagggcaagatcgtgcccaacacagtgtttgtgggcggcattgatgccaggatggatgaaacagagatcggcagctgcttcggccgctatggctctgtgaaggaggtgaagatcatcaccaacagaactggagtgtccaagggctacggctttgtgtcctttgtgaatgatgtggatgtgcagaagatcgtgggcagccagatccacttccacggcaagaagctgaagctgggccctgccatcaggaagcagaagctgtgtgcccggcacgtgcagccccggcccctggtggtgaaccccccacctccaccccagttccagaatgtgtggaggaaccccaacacagagacctacctgcagccccagatcacccccaaccctgtgacccagcacgtgcaggcctacagcgcctacccccacagccctggccaggtgatcaccggctgccagctgctggtgtacaactaccaggagtaccccacctacccagacagcgccttccaggtgaccaccggctaccagctgcctgtgtacaactaccagcccttccctgcctaccccaggagccccttccaggtgacagctggctaccagctgcctgtgtacaactaccaggccttccctgcctaccccaacagccccttccaggtggccaccggctaccagtttcctgtgtacaactaccagcccttccctgcctaccccagcagccccttccaggtgacagctggctaccagctgcctgtgtacaactaccaggccttccctgcctaccccaacagccccttccaggtggccaccggctaccagtttcctgtgtacaactaccaggccttccctgcctaccccaacagccctgtgcaggtgaccaccggctaccagctgcctgtgtacaactaccagtag

SEQ ID NO: 204287 - DNA, 1173 bp, Artificial Sequence
  derived and/or modified sequence
atgtctgctgccaaccctgagacccccaacagcaccatcagccgggaggccagcacccagagcagcagcgctgctgccagccagggctgggtgctgcctgagggcaagatcgtgcccaacacagtgtttgtgggcggcattgatgccaggatggatgaaacagagatcggcagctgcttcggccgctatggctctgtgaaggaggtgaagatcatcaccaacagaactggagtgtccaagggctacggctttgtgtcctttgtgaatgatgtggatgtgcagaagatcgtgggcagccagatccacttccacggcaagaagctgaagctgggccctgccatcaggaagcagaagctgtgtgcccggcacgtgcagccccggcccctggtggtgaaccccccacctccaccccagttccagaatgtgtggaggaaccccaacacagagacctacctgcagccccagatcacccccaaccctgtgacccagcacgtgcaggcctacagcgcctacccccacagccctggccaggtgatcaccggctgccagctgctggtgtacaactaccaggagtaccccacctacccagacagcgccttccaggtgaccaccggctaccagctgcctgtgtacaactaccagcccttccctgcctaccccaggagccccttccaggtgacagctggctaccagctgcctgtgtacaactaccaggccttccctgcctaccccaacagccccttccaggtggccaccggctaccagtttcctgtgtacaactaccagcccttccctgcctaccccagcagccccttccaggtgacagctggctaccagctgcctgtgtacaactaccaggccttccctgcctaccccaacagccctgtgcaggtgaccaccggctaccagctgcctgtgtacaactaccaggccttccctgcctaccccagcagccccttccaggtgaccaccggctaccagctgcctgtgtacaactaccaggccttccctgcctaccccaacagcgctgtgcaggtgaccaccggctaccagttccacgtgtacaactaccagatgccaccccagtgccctgtgggggagcagaggaggaacctgtggacagaggcctacaagtggtggtacctggtgtgcctgatccagaggcgggactag

SEQ ID NO: 204288 - DNA, 1101 bp, Artificial Sequence
  derived and/or modified sequence
atgtctgctgccaaccctgagacccccaacagcaccatcagccgggaggccagcacccagagcagcagcgctgctgccagccagggctgggtgctgcctgagggcaagatcgtgcccaacacagtgtttgtgggcggcattgatgccaggatggatgaaacagagatcggcagctgcttcggccgctatggctctgtgaaggaggtgaagatcatcaccaacagaactggagtgtccaagggctacggctttgtgtcctttgtgaatgatgtggatgtgcagaagatcgtgggcagccagatccacttccacggcaagaagctgaagctgggccctgccatcaggaagcagaagctgtgtgcccggcacgtgcagccccggcccctggtggtgaaccccccacctccaccccagttccagaatgtgtggaggaaccccaacacagagacctacctgcagccccagatcacccccaaccctgtgacccagcacgtgcaggcctacagcgcctacccccacagccctggccaggtgatcaccggctgccagctgctggtgtacaactaccaggagtaccccacctacccagacagcgccttccaggtgaccaccggctaccagctgcctgtgtacaactaccagcccttccctgcctaccccaggagccccttccaggtgacagctggctaccagctgcctgtgtacaactaccaggccttccctgcctaccccaacagccccttccaggtggccaccggctaccagtttcctgtgtacaactaccagcccttccctgcctaccccagcagccccttccaggtgacagctggctaccagctgcctgtgtacaactaccaggccttccctgcctaccccaacagccctgtgcaggtgaccaccggctaccagctgcctgtgtacaactaccaggccttccctgcctaccccaacagcgctgtgcaggtgaccaccggctaccagttccacgtgtacaactaccagatgccaccccagtgccctgtgggggagcagaggaggaacctgtggacagaggcctacaagtggtggtacctggtgtgcctgatccagaggcgggactag

SEQ ID NO: 204289 - DNA, 864 bp, Artificial Sequence
  derived and/or modified sequence
atggatgaaacagagatcggcagctgcttcggccgctatggctctgtgaaggaggtgaagatcatcaccaacagaactggagtgtccaagggctacggctttgtgtcctttgtgaatgatgtggatgtgcagaagatcgtgggcagccagatccacttccacggcaagaagctgaagctgggccctgccatcaggaagcagaagctgtgtgcccggcacgtgcagccccggcccctggtggtgaaccccccacctccaccccagttccagaatgtgtggaggaaccccaacacagagacctacctgcagccccagatcacccccaaccctgtgacccagcacgtgcaggcctacagcgcctacccccacagccctggccaggtgatcaccggctgccagctgctggtgtacaactaccaggagtaccccacctacccagacagcgccttccaggtgaccaccggctaccagctgcctgtgtacaactaccagcccttccctgcctaccccaggagccccttccaggtgacagctggctaccagctgcctgtgtacaactaccaggccttccctgcctaccccaacagccccttccaggtggccaccggctaccagtttcctgtgtacaactaccagcccttccctgcctaccccagcagccccttccaggtgacagctggctaccagctgcctgtgtacaactaccaggccttccctgcctaccccaacagccccttccaggtggccaccggctaccagtttcctgtgtacaactaccaggccttccctgcctaccccaacagccctgtgcaggtgaccaccggctaccagctgcctgtgtacaactaccagaagttcccctag

SEQ ID NO: 204290 - DNA, 1173 bp, Artificial Sequence
  derived and/or modified sequence
atgtctgctgccaaccctgagacccccaacagcaccatcagccgggaggccagcacccagagcagcagcgctgctgccagccagggctgggtgctgcctgagggcaagatcgtgcccaacacagtgtttgtgggcggcattgatgccaggatggatgaaacagagatcggcagctgcttcggccgctatggctctgtgaaggaggtgaagatcatcaccaacagaactggagtgtccaagggctacggctttgtgtcctttgtgaatgatgtggatgtgcagaagatcgtgggcagccagatccacttccacggcaagaagctgaagctgggccctgccatcaggaagcagaagctgtgtgcccggcacgtgcagccccggcccctggtggtgaaccccccacctccaccccagttccagaatgtgtggaggaaccccaacacagagacctacctgcagccccagatcacccccaaccctgtgacccagcacgtgcaggcctacagcgcctacccccacagccctggccaggtgatcaccggctgccagctgctggtgtacaactaccaggagtaccccacctacccagacagcgccttccaggtgaccaccggctaccagctgcctgtgtacaactaccagcccttccctgcctaccccaggagccccttccaggtgacagctggctaccagctgcctgtgtacaactaccaggccttccctgcctaccccaacagccccttccaggtggccaccggctaccagtttcctgtgtacaactaccagcccttccctgcctaccccagcagccccttccaggtgacagctggctaccagctgcctgtgtacaactaccaggccttccctgcctaccccaacagccccttccaggtggccaccggctaccagtttcctgtgtacaactaccaggccttccctgcctaccccaacagccctgtgcaggtgaccaccggctaccagctgcctgtgtacaactaccaggccttccctgcctaccccaacagcgctgtgcaggtgaccaccggctaccagttccacgtgtacaactaccagatgccaccccagtgccctgtgggggagcagaggaggaacctgtggacagaggcctacaagtggtggtacctggtgtgcctgatccagaggcgggactag

SEQ ID NO: 204291 - DNA, 1392 bp, Artificial Sequence
  derived and/or modified sequence
tcagtcggcctgcgctcctcagcctggcggttctacctccgagggttcgcccgcccttggttttccttacaccttagcctttggctcctttgaccactcgaagccccacagcgtgttccagcggacttcaccagcagacccagaagtggtgggtgaaacactgcctctgttcctccttgagcctgtcgggagctgctgcctgccaccaccatgtctgctgcaaatcctgagactccaaactcaaccatctccagagaggccagcacccagtcttcatcagctgcagctagccaaggctgggtgttaccagaaggcaaaatcgtgccaaacactgtttttgttggtggaattgatgctaggatggatgaaactgagattggaagctgctttggtagatacggttcagtgaaagaagtgaagataatcacgaatcgaactggtgtgtccaaaggctatggatttgtttcgtttgttaatgacgtggatgtccagaagatagtaggatcacagatacatttccatggtaaaaagctgaagctgggccctgcaatcaggaaacaaaagttatgtgctcgtcatgtgcagccacgtcctttggtagttaatcctcctcctccaccacagtttcagaacgtctggcggaatccaaacactgaaacctacctgcagccccaaatcacgccgaatcctgtaactcagcacgttcaggcttactctgcttatccacattcaccaggtcaggtcatcactggatgtcagttgcttgtatataattatcaggaatatcctacttatcccgattcagcatttcaggtcaccactggatatcagttgcctgtatataattatcagccatttcctgcttatccaagatcaccatttcaggtcactgctggatatcagttgcctgtatataattatcaggcatttcctgcttatccaaattcaccatttcaagtcgccactggatatcagttccctgtatacaattatcagccatttcctgcttatccaagttcaccatttcaggtcactgctggatatcagttgcctgtatataattatcaggcatttcctgcttatccaaattcaccagttcaggtcaccactggatatcagttgcctgtatacaattatcaggcatttcctgcttatccaagttcaccatttcaggtcaccactggatatcagttgcctgtatataattatcaggcatttcctgcttatccaaattcagcagttcaggtcaccactggatatcagttccatgtatacaattaccagatgccaccgcagtgccctgttggggagcaaaggagaaatctgtggaccgaagcatacaaatggtggtatcttgtctgtttaatccagagaagagactgataaattccg

SEQ ID NO: 204292 - DNA, 3273 bp, Artificial Sequence
  derived and/or modified sequence
tcagtcggcctgcgctcctcagcctggcggttctacctccgagggttcgcccgcccttggttttccttacaccttagcctttggctcctttgaccactcgaagccccacagcgtgttccagcggacttcaccagcagacccagaagtggtgggtgaaacactgcctctgttcctccttgagcctgtcgggagctgctgcctgccaccaccatgtctgctgcaaatcctgagactccaaactcaaccatctccagagaggccagcacccagtcttcatcagctgcagctagccaaggctgggtgttaccagaaggcaaaatcgtgccaaacactgtttttgttggtggaattgatgctaggatggatgaaactgagattggaagctgctttggtagatacggttcagtgaaagaagtgaagataatcacgaatcgaactggtgtgtccaaaggctatggatttgtttcgtttgttaatgacgtggatgtccagaagatagtaggatcacagatacatttccatggtaaaaagctgaagctgggccctgcaatcaggaaacaaaagttatgtgctcgtcatgtgcagccacgtcctttggtagttaatcctcctcctccaccacagtttcagaacgtctggcggaatccaaacactgaaacctacctgcagccccaaatcacgccgaatcctgtaactcagcacgttcaggcttactctgcttatccacattcaccaggtcaggtcatcactggatgtcagttgcttgtatataattatcaggaatatcctacttatcccgattcagcatttcaggtcaccactggatatcagttgcctgtatataattatcagccatttcctgcttatccaagatcaccatttcaggtcactgctggatatcagttgcctgtatataattatcaggcatttcctgcttatccaaattcaccatttcaagtcgccactggatatcagttccctgtatacaattatcagccatttcctgcttatccaagttcaccatttcaggtcactgctggatatcagttgcctgtatataattatcaggcatttcctgcttatccaaattcaccagttcaggtcaccactggatatcagttgcctgtatacaattatcaggcatttcctgcttatccaagttcaccatttcaggtcaccactggatatcagttgcctgtatataattatcaggcatttcctgcttatccaaattcagcagttcaggtcaccactggatatcagttccatgtatacaattaccagatgccaccgcagtgccctgttggggagcaaaggagaaatctgtggaccgaagcatacaaatggtggtatcttgtctgtttaatccagagaagagactgataaattccgttgttactcaagatgactgcttcaagggtaaaagagtgcatcgctttagaagaagtttggcagtatttaaatctgttggatcctctcagctatctagtttcatgggaagttgctggttttgaatattaagctaaaagttttccactattacagaaattctgaattttggtaaatcacactgaaactttctgtataacttgtattattagactctctagttttatcttaacactgaaactgttcttcattagatgtttatttagaacctggttctgtgtttaatatatagtttaaagtaacaaataatcgagactgaaagaatgttaagatttatctgcaaggatttttaaaaaattgaaacttgcattttaagtgtttaaaagcaaatactgactttcaaaaaagtttttaaaacctgatttgaaagctaacaattttgatagtctgaacacaagcatttcacttctccaagaagtacctgtgaacagtacaatatttcagtattgagctttgcatttatgatttatctagaaatttacctcaaaagcagaatttttaaaactgcatttttaatcagtggaactcaatgtatagttagctttattgaagtcttatccaaacccagtaaaacagattctaagcaaacagtccaatcagtgagtcataatgtttattcaaagtattttatcttttatctagaatccacatatgtatgtccaatttgattgggatagtagttaggataactaaaattctgggcctaattttttaaagaatccaagacaaactaaactttactgggtatataaccttctcaatgagttaccattcttttttataaaaaaaattgttccttgaaatgctaaacttaatggctgtatgtgaaatttgcaaaatactggtattaaagaacgctgcagcttttttatgtcactcaaaggttaatcggagtatctgaaaggaattgtttttataaaaacattgaagtattagttacttgctataaatagatttttatttttgttttttagcctgttatatttccttctgtaaaataaaatatgtccagaagaggcatgttgtttctagattaggtagtgtcctcattttatattgtgaccacacagctagagcaccagagcccttttgctatactcacagtcttgttttcccagcctcttttactagtctttcaggaggtttgctcttagaactggtgatgtaaagaatggaagtagctgtatgagcagttcaaaggccaagccgtggaatggtagcaatgggatataatacctttctaagggaaacatttgtatcagtatcatttgatctgccatggacatgtgtttaaagtggctttctggcccttctttcaatggcttcttccctaaaacgtggagactctaagttaatgtcgttactatgggccatattactaatgcccactggggtctatgatttctcaaaattttcattcggaatccgaaggatacagtctttaaactttagaattcccaagaaggctttattacacctcagaaattgaaagcaccatgactttgtccattaaaaaattatccatagtttttttagtgcttttaacattccgacatacatcattctgtgattaaatctccagatttctgtaaatgatacctacattctaaagagttaattctaattattccgatatgaccttaaggaaaagtaaaggaataaatttttgtctttgttgaagtatttaatagagtaaggtaaagaagatattaagtccctttcaaaatggaaaattaattctaaactgagaaaaatgttcctactacctattgctgatactgtctttgcataaatgaataaaaataaactttttttcttcaaatg

SEQ ID NO: 204293 - DNA, 3287 bp, Artificial Sequence
  derived and/or modified sequence
gctgccacccattggctcaggccgataccacgcgccccgatacccggcacaggagccacctcccagagccccgcagtccatgcctcagtcggcctgcgctcctcagcctggcggttctacctccgagggttcgcccgcccttggttttccttacaccttagcctttggctcctttgaccactcgaagccccacagcgtgttccagcggacttcaccagcagacccagaagtggtgggtgaaacactgcctctgttcctccttgagcctgtcgggagctgctgcctgccaccaccatgtctgctgcaaatcctgagactccaaactcaaccatctccagagaggccagcacccagtcttcatcagctgcagctagccaaggctgggtgttaccagaaggcaaaatcgtgccaaacactgtttttgttggtggaattgatgctaggatggatgaaactgagattggaagctgctttggtagatacggttcagtgaaagaagtgaagataatcacgaatcgaactggtgtgtccaaaggctatggatttgtttcgtttgttaatgacgtggatgtccagaagatagtaggatcacagatacatttccatggtaaaaagctgaagctgggccctgcaatcaggaaacaaaagttatgtgctcgtcatgtgcagccacgtcctttggtagttaatcctcctcctccaccacagtttcagaacgtctggcggaatccaaacactgaaacctacctgcagccccaaatcacgccgaatcctgtaactcagcacgttcaggcttactctgcttatccacattcaccaggtcaggtcatcactggatgtcagttgcttgtatataattatcaggaatatcctacttatcccgattcagcatttcaggtcaccactggatatcagttgcctgtatataattatcagccatttcctgcttatccaagatcaccatttcaggtcactgctggatatcagttgcctgtatataattatcaggcatttcctgcttatccaaattcaccatttcaagtcgccactggatatcagttccctgtatacaattatcagccatttcctgcttatccaagttcaccatttcaggtcactgctggatatcagttgcctgtatataattatcaggcatttcctgcttatccaaattcaccagttcaggtcaccactggatatcagttgcctgtatacaattatcaggcatttcctgcttatccaaattcagcagttcaggtcaccactggatatcagttccatgtatacaattaccagatgccaccgcagtgccctgttggggagcaaaggagaaatctgtggaccgaagcatacaaatggtggtatcttgtctgtttaatccagagaagagactgataaattccgttgttactcaagatgactgcttcaagggtaaaagagtgcatcgctttagaagaagtttggcagtatttaaatctgttggatcctctcagctatctagtttcatgggaagttgctggttttgaatattaagctaaaagttttccactattacagaaattctgaattttggtaaatcacactgaaactttctgtataacttgtattattagactctctagttttatcttaacactgaaactgttcttcattagatgtttatttagaacctggttctgtgtttaatatatagtttaaagtaacaaataatcgagactgaaagaatgttaagatttatctgcaaggatttttaaaaaattgaaacttgcattttaagtgtttaaaagcaaatactgactttcaaaaaagtttttaaaacctgatttgaaagctaacaattttgatagtctgaacacaagcatttcacttctccaagaagtacctgtgaacagtacaatatttcagtattgagctttgcatttatgatttatctagaaatttacctcaaaagcagaatttttaaaactgcatttttaatcagtggaactcaatgtatagttagctttattgaagtcttatccaaacccagtaaaacagattctaagcaaacagtccaatcagtgagtcataatgtttattcaaagtattttatcttttatctagaatccacatatgtatgtccaatttgattgggatagtagttaggataactaaaattctgggcctaattttttaaagaatccaagacaaactaaactttactgggtatataaccttctcaatgagttaccattcttttttataaaaaaaattgttccttgaaatgctaaacttaatggctgtatgtgaaatttgcaaaatactggtattaaagaacgctgcagcttttttatgtcactcaaaggttaatcggagtatctgaaaggaattgtttttataaaaacattgaagtattagttacttgctataaatagatttttatttttgttttttagcctgttatatttccttctgtaaaataaaatatgtccagaagaggcatgttgtttctagattaggtagtgtcctcattttatattgtgaccacacagctagagcaccagagcccttttgctatactcacagtcttgttttcccagcctcttttactagtctttcaggaggtttgctcttagaactggtgatgtaaagaatggaagtagctgtatgagcagttcaaaggccaagccgtggaatggtagcaatgggatataatacctttctaagggaaacatttgtatcagtatcatttgatctgccatggacatgtgtttaaagtggctttctggcccttctttcaatggcttcttccctaaaacgtggagactctaagttaatgtcgttactatgggccatattactaatgcccactggggtctatgatttctcaaaattttcattcggaatccgaaggatacagtctttaaactttagaattcccaagaaggctttattacacctcagaaattgaaagcaccatgactttgtccattaaaaaattatccatagtttttttagtgcttttaacattccgacatacatcattctgtgattaaatctccagatttctgtaaatgatacctacattctaaagagttaattctaattattccgatatgaccttaaggaaaagtaaaggaataaatttttgtctttgttgaagtatttaatagagtaaggtaaagaagatattaagtccctttcaaaatggaaaattaattctaaactgagaaaaatgttcctactacctattgctgatactgtctttgcataaatgaataaaaataaactttttttcttcaaatgtg

SEQ ID NO: 204294 - DNA, 1005 bp, Artificial Sequence
  derived and/or modified sequence
atgagcgccgccaaccccgagacccccaacagcaccatcagccgggaggcttcgacccagagtagctctgccgcggctagccaggggtgggtcctgcccgagggtaaaatagttcccaatactgtgttcgtaggcggtattgatgcccgaatggacgaaactgagatcgggtcttgctttggaagatacggctctgtaaaagaggtaaaaataattaccaaccgcaccggggtttcgaagggatacgggttcgtcagtttcgtaaatgacgtggacgtgcagaagatcgtggggtctcaaatccactttcatggaaagaaactgaaactggggcctgctattcgaaaacagaaactgtgcgcgcggcatgtgcagccaaggcctctcgtggtgaacccgcctcctcctccacagttccagaacgtgtggcggaatccgaatacagagacatatctccaaccccagatcactcccaaccctgtcactcaacatgtccaggcctatagtgcctatccccactcccctggccaggtaattactgggtgccagcttctggtgtataactatcaggagtatcctacatatcctgattcggccttccaagtgaccactggctaccagctcccagtgtacaattaccagcccttccccgcatatccccggagccccttccaggtgactgctggctatcagctgcccgtgtacaactaccaggcattccctgcttacccaaacagcccgtttcaggtggctacgggctaccagtttcccgtttacaattatcagccgtttcctgcatatccctcctccccatttcaggtcaccgccggctaccaactcccggtctacaattaccaggcttttccggcgtacccgaacagtcctttccaggtagccactggctaccagttccctgtctataattaccaggccttccccgcatacccaaattcccccgtgcaggtgaccacgggttaccagctaccagtgtacaactatcagtag

SEQ ID NO: 204295 - DNA, 1173 bp, Artificial Sequence
  derived and/or modified sequence
atgagcgccgccaaccccgagacccccaacagcaccatcagccgggaggcttcaacccaatcatcatctgccgctgccagccaggggtgggttttgccggagggtaagattgttcccaatacagttttcgtgggaggtatagacgccaggatggacgaaacagagattggttcctgctttggccggtacggttccgtgaaggaggttaaaatcatcaccaatcggacgggcgttagtaagggctacgggtttgttagtttcgtgaacgatgtggatgtgcaaaaaattgtagggtctcagatccattttcatggcaagaagctcaagctcggccccgctatcagaaaacaaaaattatgtgcccggcatgtgcagcctagacccttggtcgtaaaccccccaccaccaccacagttccagaatgtgtggaggaatcctaatactgagacataccttcagccacaaatcacaccaaaccctgtaactcagcatgtgcaagcctatagtgcctatccgcattctcccggccaggtcataaccggttgtcagctgcttgtctacaactatcaagagtatcccacttacccagatagtgcttttcaggtgaccactggttaccaattacccgtttacaattaccagccattccctgcttatcccaggagcccgttccaggtgactgccggctaccagcttccagtgtacaattatcaggcatttccggcttaccctaattccccctttcaggtagccaccggataccaatttccggtgtataattaccaaccatttcctgcatatccttcctctccttttcaggtgacagccggataccaattgccggtttacaattaccaagcctttcctgcctacccaaatagtcctgtccaggtcactaccgggtatcagcttcccgtatataactaccaggccttcccagcttatccaagcagtccatttcaggtgaccacgggctaccaactacctgtttacaactatcaggcctttcccgcataccccaactccgccgttcaggtgacgacagggtaccaatttcacgtctacaattaccaaatgccgccacagtgtcccgtgggcgagcaacggcggaacctgtggaccgaggcctataaatggtggtatctcgtctgtctgattcagcgaagggactag

SEQ ID NO: 204296 - DNA, 1173 bp, Artificial Sequence
  derived and/or modified sequence
atgagcgccgccaaccccgagacccccaacagcaccatcagccgggaggcctccacccaatcatcctcagccgcagcttctcaggggtgggtgctccccgagggcaaaatcgttcctaatacagtttttgtaggaggcatagacgcgaggatggatgaaaccgaaattggatcttgttttgggcgatatggcagtgttaaggaggtaaagatcatcacaaacaggacgggcgtgagtaaggggtatggttttgtttcattcgtgaacgacgtggacgtgcagaaaattgtcggtagtcagatccactttcatgggaaaaagcttaagttggggccggccatccgaaagcagaagctgtgtgccagacacgttcagccgagaccattggtggtcaatccccctcctcctccccagttccaaaacgtgtggagaaaccccaataccgagacatacctacaaccacaaattacccctaaccctgtaacacagcatgtgcaggcttactcggcatacccacactcccctggtcaggtgataactggctgccagctcctggtttataattaccaagagtaccccacttatccagactcagcttttcaggtcacgaccggataccagctgccagtttacaactaccagccatttcccgcttacccacggtccccattccaggtgacagccggataccagttgcccgtgtacaattatcaagctttccccgcctatcctaatagtccttttcaggtggctacagggtaccaattccccgtgtacaactaccaaccattccccgcctaccccagctctcccttccaggtaactgcaggctatcagctgcccgtgtacaactaccaggccttcccggcctacccgaattcacctgtccaggttacaactggttatcagttgccagtgtacaactaccaagctttccctgcctatcccagcagtccgttccaagtcactacagggtaccaattgcctgtatacaactaccaggcgtttccagcatacccgaatagcgctgttcaggttacaaccggatatcagtttcacgtgtataattaccaaatgccccctcagtgccctgtgggggaacagcgacggaacctgtggacagaagcgtataagtggtggtacctcgtgtgtctgatacagcggcgcgactag

SEQ ID NO: 204297 - DNA, 1101 bp, Artificial Sequence
  derived and/or modified sequence
atgagcgccgccaaccccgagacccccaacagcaccatcagccgggaggctagcactcaaagtagctcagccgctgcgagtcagggctgggtgctgccagaaggtaagatcgttccaaacaccgtctttgtgggagggattgatgctagaatggatgagacagaaatcggtagctgttttgggcggtatggctctgtgaaagaagtgaaaatcatcacaaatagaaccggtgtgagtaaggggtatggcttcgtgagcttcgttaacgacgtggatgtgcagaaaatagtgggctcccagatccactttcatggcaaaaagcttaaactggggcccgccatcaggaaacaaaagctatgcgcaaggcacgtgcagccgcgtccactggtcgtgaacccccctccacctcctcagttccagaacgtctggcgcaacccaaataccgagacatacctgcaaccccagattactcccaatccagtcacccaacacgtgcaggcatattccgcgtacccccactcccccggacaggtgatcaccggctgccagcttttggtctacaactaccaagagtatcccacttatcctgatagcgcattccaggtcacaacagggtatcagcttccagtctacaactaccagccgttccccgcatatccccgatctcctttccaggttacggcgggctaccagctgccagtctataattaccaagcttttcctgcttacccaaactctccctttcaagttgctaccgggtaccagttccccgtatacaactaccaaccctttccagcatatccctcctctccattccaggttacagcaggctaccaacttccagtgtacaactaccaggccttcccagcatatcccaattctccagtccaggtaacaactggttaccagctacccgtttataattaccaggccttcccagcttaccccaattctgcagtccaagtgacgacaggctaccaattccacgtgtataactaccaaatgcccccgcagtgtcctgttggcgagcagcgccgaaacctctggaccgaagcatacaagtggtggtatctggtgtgtctgatacagagaagagactag

SEQ ID NO: 204298 - DNA, 864 bp, Artificial Sequence
  derived and/or modified sequence
atggacgagaccgagatcggcagctgcttcggccggtacggcagcgtgaaggaggtcaaaatcattaccaatcgcaccggtgtaagtaaaggctacgggtttgttagtttcgttaacgacgttgatgtacagaagattgtggggtctcagatacattttcatggtaaaaagttgaagctcggacccgccattcgcaaacaaaagctttgcgcccgtcacgttcagccaaggccgttggttgtgaaccctcctcctccccctcagttccagaacgtgtggcggaatcccaacactgaaacatacctacaacctcagattacccccaacccagttacccagcacgtgcaggcttactctgcttatccccatagccccggtcaggtaatcaccggctgccaactgttagtgtataactaccaggagtatcccacgtaccccgacagcgctttccaggtgacaaccgggtatcagttgcccgtttataactaccagccatttcccgcataccctcgctcaccatttcaggtcaccgctggttaccagcttccagtctacaactatcaggctttccctgcctatccaaattcaccctttcaggtcgcaacaggatatcagttcccagtgtacaactaccagccttttccagcatatccatcatccccgtttcaagtgactgccggctaccagctccctgtgtataattaccaggcttttcctgcataccctaacagccccttccaggtggcgaccggctatcagttccccgtgtacaactatcaagctttcccagcctacccaaacagcccagtgcaggtcacaacaggctatcagctccctgtctacaactatcagaaattcccatag

SEQ ID NO: 204299 - DNA, 1173 bp, Artificial Sequence
  derived and/or modified sequence
atgagcgccgccaaccccgagacccccaacagcaccatcagccgggaagcaagcacccaaagctccagcgcagctgctagccaggggtgggtgctgccggagggtaagatcgtccctaatacagtattcgtcggcggtattgacgctcgtatggatgaaaccgagataggttcctgcttcggaagatatggcagtgtgaaggaggtgaaaattatcacaaacaggactggtgtgtccaagggctacggctttgtgtctttcgtcaatgacgtcgacgttcagaaaatagttgggtctcagattcatttccatgggaaaaaactcaagctgggacccgccattaggaagcagaagctttgcgctaggcacgtgcagcctcggccactggtcgtgaatccccctccacccccacaatttcagaatgtgtggaggaatcctaacaccgaaacttatctgcagccccagattacgcctaacccagttacccagcacgtgcaagcatactcggcctacccgcactctcctggccaggtgatcaccggctgtcaattgctggtctataactatcaggagtaccccacttaccccgatagcgcctttcaagtgaccacgggttaccagctgcctgtgtacaactaccagccctttcccgcctaccccagatctcctttccaggttacggctggctaccagctgccggtgtacaactaccaggcctttcccgcttatcctaactccccatttcaggtcgctaccggttatcagttccctgtgtataattaccagcccttcccggcctacccctcatctcccttccaggtgactgctggttatcagctgcccgtctacaattatcaggcatttcccgcctaccccaactccccctttcaggtggctacaggttaccagtttcctgtctataattaccaggccttcccagcgtaccccaactcccccgtgcaagtgacaacaggctaccagctgccagtttacaattatcaagcttttcccgcataccctaatagcgcagtacaggtaaccacgggataccagtttcacgtgtacaactaccaaatgcctcctcagtgtcctgtgggcgagcagagacgaaatctctggacagaggcctataaatggtggtatctggtctgcctgatacagcgtagagattag

SEQ ID NO: 204300 - DNA, 1173 bp, Artificial Sequence
  derived and/or modified sequence
atgagcgccgccaaccccgagacccccaacagcaccatcagccgggaggccagcacgcaaagttctagtgccgccgcatctcaggggtgggtcttgcccgaagggaagatcgtcccaaatactgttttcgtgggaggaatagacgctcgcatggatgagacagagattggctcttgcttcggccgatacggatctgttaaggaggtcaagatcattactaaccgtaccggggtgtccaaaggatatggattcgtgtctttcgtgaatgacgtggatgtccagaaaattgtcggcagccagatacactttcatgggaaaaaacttaaactaggccccgccatccgaaagcagaagctgtgtgcccggcacgtgcagcctagacctttggtggtaaatccaccccctcctccacagttccagaacgtttggcgaaaccccaacacagaaacctatcttcaaccacaaatcacccctaatccggtcacccagcacgtgcaggcttactcagcttacccccatagccccgggcaggtgatcaccggctgccaactgctggtatacaactaccaggagtatccgacatatcctgattctgctttccaagtgacaactggttatcagctccccgtatacaattatcagccattccctgcctacccccggagccccttccaggtgaccgccggttatcagcttccggtgtacaattaccaggcgtttcccgcataccccaacagtccattccaagtcgccactgggtatcagtttcccgtgtacaattaccagccgtttcccgcctacccttcttcaccatttcaagttacggccggttaccaactccccgtctataactatcaagcattccccgcatatccaaactccccatttcaggttgccacggggtaccagtttcctgtatacaattaccaggcttttcctgcctatccaaatagtccagttcaagtaactacaggctatcaattgcccgtttataactatcaggccttcccagcatatccaaacagcgccgtacaggtgacaaccgggtatcagtttcatgtctacaactatcagatgcctcctcaatgccctgtcggggagcagagacggaatctgtggactgaagcctataagtggtggtatctagtgtgcttaatacaacgccgtgactag

SEQ ID NO: 204301 - DNA, 1005 bp, Artificial Sequence
  derived and/or modified sequence
atgagcgcagcgaatccagagacaccaaacagcacaatctccagggaagcttccacacagagctcatccgccgctgcttcacaaggctgggtgctgcctgaaggtaaaatcgtgcccaacacggtttttgtgggcggaatcgatgccagaatggacgagacagaaatcggttcctgtttcgggcgatacggatctgttaaagaagttaagatcatcacgaatcggacaggggtaagcaagggctatggctttgtctcctttgtgaacgacgtggacgtccagaagattgttggcagccagattcactttcacgggaaaaagttaaaattgggacctgccatccgcaagcagaagttgtgtgctaggcatgtgcagcccagacctctggttgtcaacccaccccctccaccccagttccagaacgtttggcgcaatcccaacacagaaacctacctgcagccccagataacccccaacccagttacccaacacgtacaggcctattcggcctatccacattctcccggacaggtgattacagggtgccagctgctggtgtataattaccaggagtacccaacataccccgattcagctttccaagtcaccacgggctaccagctacctgtgtacaactaccaacccttcccagcttatccgcgaagcccatttcaggtgacagcaggttaccagttgccagtttataactatcaagcattccccgcttatcccaactcgccctttcaggtggcgactggctatcagttccctgtgtataactatcagcctttccctgcatacccgtctagcccttttcaggtgaccgctgggtatcaacttcccgtatacaattatcaagcattccccgcataccctaattccccattccaggtcgcaacgggctaccagttccccgtctataactaccaggcattcccggcttatcctaactccccagtgcaggtcacaaccgggtaccagctgccagtgtacaattaccaatag

SEQ ID NO: 204302 - DNA, 1173 bp, Artificial Sequence
  derived and/or modified sequence
atgagcgccgcaaaccccgagaccccaaactccaccatatcgagagaggcaagcacacagtcttccagcgccgctgcatcacagggctgggttctgcccgagggcaagatcgttcccaatactgtgtttgtcgggggtatagacgcacgaatggacgaaacagaaatagggagctgcttcgggaggtatggtagtgttaaggaagtcaagatcataacaaataggaccggtgtgtccaaagggtatggcttcgtgtcttttgtaaacgacgtcgacgtgcagaagatcgtaggttcccaaattcacttccatggcaagaaattgaaactgggccctgctattcgcaagcagaaactctgtgcgagacacgtccaaccaaggcccttggtggtgaaccctccacctccccctcagttccaaaatgtgtggaggaatcctaatactgaaacatacctgcagccccagatcacccccaacccagtcacacagcacgttcaggcctacagcgcctacccccatagcccaggccaagtgattaccggttgccagttattagtatacaattaccaggagtacccaacctacccggattctgccttccaggttactacgggataccagttgcctgtctacaactaccagcctttccctgcctatcccaggtccccatttcaggtgacagccggataccagttaccagtctacaactaccaggccttcccggcatatcccaattcaccattccaggtagcaacggggtatcagttccctgtctacaactaccagcccttcccagcctatccaagttcaccatttcaggtcactgctgggtaccaactgcccgtatataactatcaggcatttcctgcctatccaaactcgccagtacaggttactacaggctatcagttgcccgtatacaattaccaggctttccccgcatacccaagctcacccttccaggtgacaaccgggtaccagctcccagtgtacaactaccaggctttcccagcctaccccaactccgctgtgcaggttaccactgggtaccagtttcatgtgtacaattatcagatgccgccacagtgccccgtgggagagcagcgcagaaatctctggaccgaagcctataagtggtggtacttggtttgtctaatccagaggcgtgactag

SEQ ID NO: 204303 - DNA, 1173 bp, Artificial Sequence
  derived and/or modified sequence
atgtcagcagctaatcccgagacacctaacagcaccatctccagagaagcttccacacaaagctccagcgctgcagcctctcaggggtgggtgctccccgaaggcaaaattgtcccaaatacagtctttgtcggtggaattgacgcaaggatggacgagacggagattggctcatgtttcggcagatatggatctgtaaaggaagtcaagatcattactaataggaccggagtatctaaaggatatggattcgttagcttcgtcaacgacgtggatgtgcagaaaattgtgggcagtcagattcatttccacggcaagaagctcaaattgggcccagccattcgaaagcagaaactgtgcgctagacatgtgcagccgagacctcttgtggtcaatccccctcccccaccgcagttccagaacgtgtggcgaaatccgaacaccgagacttacctacagcctcagataacccctaaccctgtgacccagcatgtacaagcctacagtgcctatcctcacagccccggacaggtgataacaggatgccagcttcttgtgtataactatcaggaatatccgacctatcccgactccgcttttcaggtgacgaccggctaccaattgcccgtgtataattaccagccctttcctgcctatccacggagcccgttccaagttacggccggttatcagctccctgtttataattaccaggccttcccagcctatccgaatagcccctttcaggtggctacaggctaccagtttcccgtttataactaccagccttttccagcctatccttcatctcccttccaggtgaccgctgggtaccaactgcctgtgtacaactaccaagcttttccagcttacccaaactccccggtccaggtcacaaccggttaccagttgcctgtgtataactaccaggcttttccggcttacccttcatccccatttcaggttacaacgggctatcagcttcccgtgtataattatcaggcatttcctgcgtacccgaattccgccgtccaagtgacaacgggctatcagttccacgtttacaattatcagatgccccctcagtgccccgtaggggaacagcgacggaacctttggacagaggcctataagtggtggtatctggtgtgtctgatccagcgcagggactag

SEQ ID NO: 204304 - DNA, 1101 bp, Artificial Sequence
  derived and/or modified sequence
atgtctgcagctaatcctgagacaccaaatagcactatcagtagggaggcctccactcagtcctcctctgccgctgcaagtcagggttgggtgctgcctgagggaaagatagtccctaatactgtgtttgtgggtgggatcgatgcaagaatggacgaaaccgaaattgggagttgcttcggacgctacggatccgtaaaggaagttaaaatcattaccaaccgcaccggtgtgtctaagggatacgggtttgtttcgtttgtgaatgacgtggatgttcagaagatcgtaggcagccagattcactttcacgggaagaagctcaaactgggccctgcaattcgcaagcaaaaactttgcgctcggcacgtccagcccaggccactcgtcgtcaatcctcctccgcctcctcagttccaaaatgtctggcggaacccgaacactgagacgtatcttcagccacagataactcccaatccagttacacaacatgtccaagcgtactcagcataccctcacagtcccggacaggtcatcactggatgccagctgctggtgtataattaccaggagtaccccacttatcccgactcagcattccaggtgacaacaggttatcagctacccgtctacaattatcagccgttcccggcttaccccagatcgccattccaggtcaccgctgggtaccagctccctgtgtataactatcaggcattcccggcatatcccaatagccctttccaggttgccaccgggtaccaatttcctgtgtataattatcagcccttcccagcctatcccagcagtccattccaggtcactgccggataccagctgccagtgtacaactaccaggcgttcccagcatatcccaatagccccgtccaggtgactactgggtatcagctgccggtctataattaccaagcattccccgcataccctaactcagccgtgcaggtcaccaccggatatcagtttcacgtgtataattatcagatgccccctcagtgccctgttggagagcagcggaggaatctgtggaccgaagcctataaatggtggtaccttgtgtgcctgatacagagacgcgattag

SEQ ID NO: 204305 - DNA, 864 bp, Artificial Sequence
  derived and/or modified sequence
atggatgaaactgagatagggtcttgttttggtcgctacggatctgtgaaagaagtgaaaattatcacgaacaggacaggagtgtccaaaggatacggctttgttagttttgtgaatgacgtggatgttcagaaaattgtgggcagtcagattcattttcatggaaagaagctaaagcttggtccagccattcggaaacagaagttgtgcgccagacacgtgcagccccgacctctggtggtgaaccctcctccgcctcctcagttccaaaacgtctggcggaatcccaataccgaaacatatctgcagccccagataacgcccaaccctgtgacgcagcatgttcaggcttatagcgcttatccccactctccgggtcaagtgatcactggctgtcagctgcttgtctataactatcaggaataccctacttacccggactcggcatttcaggtgaccaccggataccagctgcctgtttacaactatcaacccttcccagcataccctagaagtccattccaggttaccgccggttaccagctgcccgtctataattatcaggctttcccagcgtacccaaattctccttttcaggttgctactggataccagtttccagtttacaattaccagccttttccagcttacccttcctcgccatttcaagtaacagccggataccagctgcccgtgtacaattatcaagccttcccagcttatcccaattcgccttttcaggttgccacaggatatcagtttccagtctacaattatcaggccttccctgcatatcctaattcacctgtgcaagtgacaactgggtaccagctgcccgtgtacaattaccagaaattcccatag

SEQ ID NO: 204306 - DNA, 1173 bp, Artificial Sequence
  derived and/or modified sequence
atgtctgccgcaaatcccgagacacctaatagtaccattagtcgcgaagccagcacccagagttcctcagctgccgctagtcagggttgggtgttgcccgagggaaaaattgtcccaaacactgtgtttgtgggtggcatagatgcacgaatggacgagaccgagatcggatcttgcttcggaaggtatggctccgttaaggaggtgaaaatcatcaccaacagaaccggagtgagcaaggggtacggctttgttagcttcgtgaatgatgtcgatgtgcagaaaattgtcggttcacagattcacttccacggcaagaagctcaaattaggccctgcaatcaggaagcaaaaactctgcgcacgccacgttcagccccgaccattggtcgtcaacccaccgcctcctcctcagttccagaacgtttggcgcaatcccaacaccgaaacttatctgcagccacagattacaccaaatcccgtcactcagcatgtgcaggcttatagcgcgtacccccactcccctggtcaggtgattactggttgtcaattgctagtatacaactaccaggaatatcccacatatccagatagcgctttccaagtaaccaccggttaccagctccccgtatacaattaccaacccttccccgcttatcccaggtcaccgtttcaggtaacggcaggctatcagttgccagtgtacaattaccaggcctttccggcttacccaaactctccctttcaagtagcaactggttaccagtttcctgtgtataactatcagccattccccgcttacccaagtagcccattccaggtcaccgcaggttatcagctgcccgtctataactatcaggccttcccagcctacccaaattccccctttcaggtggctaccggatatcagttccctgtgtacaactaccaggccttccccgcttaccctaacagcccggtacaggtgacgactgggtaccagctcccggtctacaattatcaggcttttccagcctatcccaactcagcagttcaagtgacaactggataccaatttcatgtttataactaccagatgccccctcagtgcccagtcggagaacaaagacggaacctctggacagaggcgtacaagtggtggtacctggtttgtcttattcagcgtcgcgattag

SEQ ID NO: 204307 - DNA, 1173 bp, Artificial Sequence
  derived and/or modified sequence
atgtccgccgcaaaccctgagacccccaacagcactatttcaagagaggcttcaacacagagcagcagcgctgcagcttctcagggctgggtgctgcccgagggaaagattgtccctaacaccgtgttcgttggcggaattgatgccagaatggacgaaacagaaattggtagttgcttcggaaggtatggttctgtgaaggaagtgaaaatcataacaaatagaactggggtatctaaagggtacggttttgtctcttttgtgaacgatgtggacgttcagaaaatagtgggctcacagatccacttccatggtaagaagcttaaactgggaccagccatccggaagcaaaagctttgcgctagacatgtccagcccaggcctttggtagttaaccccccacccccaccacagttccagaatgtgtggaggaatcctaacaccgagacctatctgcagccccagatcacccccaaccctgtgacgcagcatgtgcaggcctactctgcttacccgcatagtccgggacaggtaatcacgggatgtcagctcctagtctataactatcaggagtatccgacatatcccgactccgcattccaggtgaccaccgggtatcagctccctgtctacaactaccagccttttcccgcatacccacgtagcccattccaagttactgccggatatcaactgcctgtatacaactatcaggctttccccgcataccctaacagtccatttcaggtagctaccgggtaccagtttccggtttacaactatcagcccttccctgcgtatccttcaagccctttccaggtcaccgccggatatcagttacctgtgtataactaccaagcctttccagcttacccaaattcacccttccaggtcgccaccggctaccagttccccgtatacaattatcaagcattcccagcttatccaaactcaccagttcaggtgactaccggctaccaactgcccgtctacaattaccaggcatttcccgcatacccgaactctgccgttcaggttactacaggataccagttccacgtctataactatcagatgccgcctcagtgcccagtcggagaacagcgaagaaacctttggacagaagcgtataagtggtggtatttggtgtgcctgatccagcgtcgcgactag

SEQ ID NO: 204308 - DNA, 861 bp, Artificial Sequence
  derived and/or modified sequence
atggatgaaactgagattggaagctgctttggtagatacggttcagtgaaagaagtgaagataatcacgaatcgaactggtgtgtccaaaggctatggatttgtttcgtttgttaatgacgtggatgtccagaagatagtaggatcacagatacatttccatggtaaaaagctgaagctgggccctgcaatcaggaaacaaaagttatgtgctcgtcatgtgcagccacgtcctttggtagttaatcctcctcctccaccacagtttcagaacgtctggcggaatccaaacactgaaacctacctgcagccccaaatcacgccgaatcctgtaactcagcacgttcaggcttactctgcttatccacattcaccaggtcaggtcatcactggatgtcagttgcttgtatataattatcaggaatatcctacttatcccgattcagcatttcaggtcaccactggatatcagttgcctgtatataattatcagccatttcctgcttatccaagatcaccatttcaggtcactgctggatatcagttgcctgtatataattatcaggcatttcctgcttatccaaattcaccatttcaagtcgccactggatatcagttccctgtatacaattatcagccatttcctgcttatccaagttcaccatttcaggtcactgctggatatcagttgcctgtatataattatcaggcatttcctgcttatccaaattcaccatttcaagtcgccactggatatcagttccctgtatacaattatcaggcatttcctgcttatccaaattcaccagttcaggtcaccactggatatcagttgcctgtatacaattatcagaaatttcct

SEQ ID NO: 204309 - DNA, 3271 bp, Artificial Sequence
  derived and/or modified sequence
tcagtcggcctgcgctcctcagcctggcggttctacctccgagggttcgcccgcccttggttttccttacaccttagcctttggctcctttgaccactcgaagccccacagcgtgttccagcggacttcaccagcagacccagaagtggtgggtgaaacactgcctctgttcctccttgagcctgtcgggagctgctgcctgccaccaccatgtctgctgcaaatcctgagactccaaactcaaccatctccagagaggccagcacccagtcttcatcagctgcagctagccaaggctgggtgttaccagaaggcaaaatcgtgccaaacactgtttttgttggtggaattgatgctaggatggatgaaactgagattggaagctgctttggtagatacggttcagtgaaagaagtgaagataatcacgaatcgaactggtgtgtccaaaggctatggatttgtttcgtttgttaatgacgtggatgtccagaagatagtaggatcacagatacatttccatggtaaaaagctgaagctgggccctgcaatcaggaaacaaaagttatgtgctcgtcatgtgcagccacgtcctttggtagttaatcctcctcctccaccacagtttcagaacgtctggcggaatccaaacactgaaacctacctgcagccccaaatcacgccgaatcctgtaactcagcacgttcaggcttactctgcttatccacattcaccaggtcaggtcatcactggatgtcagttgcttgtatataattatcaggaatatcctacttatcccgattcagcatttcaggtcaccactggatatcagttgcctgtatataattatcagccatttcctgcttatccaagatcaccatttcaggtcactgctggatatcagttgcctgtatataattatcaggcatttcctgcttatccaaattcaccatttcaagtcgccactggatatcagttccctgtatacaattatcagccatttcctgcttatccaagttcaccatttcaggtcactgctggatatcagttgcctgtatataattatcaggcatttcctgcttatccaaattcaccatttcaagtcgccactggatatcagttccctgtatacaattatcaggcatttcctgcttatccaaattcaccagttcaggtcaccactggatatcagttgcctgtatacaattatcaggcatttcctgcttatccaaattcagcagttcaggtcaccactggatatcagttccatgtatacaattaccagatgccaccgcagtgccctgttggggagcaaaggagaaatctgtggaccgaagcatacaaatggtggtatcttgtctgtttaatccagagaagagactgataaattccgttgttactcaagatgactgcttcaagggtaaaagagtgcatcgctttagaagaagtttggcagtatttaaatctgttggatcctctcagctatctagtttcatgggaagttgctggttttgaatattaagctaaaagttttccactattacagaaattctgaattttggtaaatcacactgaaactttctgtataacttgtattattagactctctagttttatcttaacactgaaactgttcttcattagatgtttatttagaacctggttctgtgtttaatatatagtttaaagtaacaaataatcgagactgaaagaatgttaagatttatctgcaaggatttttaaaaaattgaaacttgcattttaagtgtttaaaagcaaatactgactttcaaaaaagtttttaaaacctgatttgaaagctaacaattttgatagtctgaacacaagcatttcacttctccaagaagtacctgtgaacagtacaatatttcagtattgagctttgcatttatgatttatctagaaatttacctcaaaagcagaatttttaaaactgcatttttaatcagtggaactcaatgtatagttagctttattgaagtcttatccaaacccagtaaaacagattctaagcaaacagtccaatcagtgagtcataatgtttattcaaagtattttatcttttatctagaatccacatatgtatgtccaatttgattgggatagtagttaggataactaaaattctgggcctaattttttaaagaatccaagacaaactaaactttactgggtatataaccttctcaatgagttaccattcttttttataaaaaaaattgttccttgaaatgctaaacttaatggctgtatgtgaaatttgcaaaatactggtattaaagaacgctgcagcttttttatgtcactcaaaggttaatcggagtatctgaaaggaattgtttttataaaaacattgaagtattagttacttgctataaatagatttttatttttgttttttagcctgttatatttccttctgtaaaataaaatatgtccagaagaggcatgttgtttctagattaggtagtgtcctcattttatattgtgaccacacagctagagcaccagagcccttttgctatactcacagtcttgttttcccagcctcttttactagtctttcaggaggtttgctcttagaactggtgatgtaaagaatggaagtagctgtatgagcagttcaaaggccaagccgtggaatggtagcaatgggatataatacctttctaagggaaacatttgtatcagtatcatttgatctgccatggacatgtgtttaaagtggctttctggcccttctttcaatggcttcttccctaaaacgtggagactctaagttaatgtcgttactatgggccatattactaatgcccactggggtctatgatttctcaaaattttcattcggaatccgaaggatacagtctttaaactttagaattcccaagaaggctttattacacctcagaaattgaaagcaccatgactttgtccattaaaaaattatccatagtttttttagtgcttttaacattccgacatacatcattctgtgattaaatctccagatttctgtaaatgatacctacattctaaagagttaattctaattattccgatatgaccttaaggaaaagtaaaggaataaatttttgtctttgttgaagtatttaatagagtaaggtaaagaagatattaagtccctttcaaaatggaaaattaattctaaactgagaaaaatgttcctactacctattgctgatactgtctttgcataaatgaataaaaataaactttttttcttcaaa

SEQ ID NO: 204310 - DNA, 3268 bp, Artificial Sequence
  derived and/or modified sequence
tcagtcggcctgcgctcctcagcctggcggttctacctccgagggttcgcccgcccttggttttccttacaccttagcctttggctcctttgaccactcgaagccccacagcgtgttccagcggacttcaccagcagacccagaagtggtgggtgaaacactgcctctgttcctccttgagcctgtcgggagctgctgcctgccaccaccatgtctgctgcaaatcctgagactccaaactcaaccatctccagagaggccagcacccagtcttcatcagctgcagctagccaaggctgggtgttaccagaaggcaaaatcgtgccaaacactgtttttgttggtggaattgatgctaggatggatgaaactgagattggaagctgctttggtagatacggttcagtgaaagaagtgaagataatcacgaatcgaactggtgtgtccaaaggctatggatttgtttcgtttgttaatgacgtggatgtccagaagatagtaggatcacagatacatttccatggtaaaaagctgaagctgggccctgcaatcaggaaacaaaagttatgtgctcgtcatgtgcagccacgtcctttggtagttaatcctcctcctccaccacagtttcagaacgtctggcggaatccaaacactgaaacctacctgcagccccaaatcacgccgaatcctgtaactcagcacgttcaggcttactctgcttatccacattcaccaggtcaggtcatcactggatgtcagttgcttgtatataattatcaggaatatcctacttatcccgattcagcatttcaggtcaccactggatatcagttgcctgtatataattatcagccatttcctgcttatccaagatcaccatttcaggtcactgctggatatcagttgcctgtatataattatcaggcatttcctgcttatccaaattcaccatttcaagtcgccactggatatcagttccctgtatacaattatcagccatttcctgcttatccaagttcaccatttcaggtcactgctggatatcagttgcctgtatataattatcaggcatttcctgcttatccaaattcaccatttcaagtcgccactggatatcagttccctgtatacaattatcaggcatttcctgcttatccaaattcaccagttcaggtcaccactggatatcagttgcctgtatacaattatcaggcatttcctgcttatccaaattcagcagttcaggtcaccactggatatcagttccatgtatacaattaccagatgccaccgcagtgccctgttggggagcaaaggagaaatctgtggaccgaagcatacaaatggtggtatcttgtctgtttaatccagagaagagactgataaattccgttgttactcaagatgactgcttcaagggtaaaagagtgcatcgctttagaagaagtttggcagtatttaaatctgttggatcctctcagctatctagtttcatgggaagttgctggttttgaatattaagctaaaagttttccactattacagaaattctgaattttggtaaatcacactgaaactttctgtataacttgtattattagactctctagttttatcttaacactgaaactgttcttcattagatgtttatttagaacctggttctgtgtttaatatatagtttaaagtaacaaataatcgagactgaaagaatgttaagatttatctgcaaggatttttaaaaaattgaaacttgcattttaagtgtttaaaagcaaatactgactttcaaaaaagtttttaaaacctgatttgaaagctaacaattttgatagtctgaacacaagcatttcacttctccaagaagtacctgtgaacagtacaatatttcagtattgagctttgcatttatgatttatctagaaatttacctcaaaagcagaatttttaaaactgcatttttaatcagtggaactcaatgtatagttagctttattgaagtcttatccaaacccagtaaaacagattctaagcaaacagtccaatcagtgagtcataatgtttattcaaagtattttatcttttatctagaatccacatatgtatgtccaatttgattgggatagtagttaggataactaaaattctgggcctaattttttaaagaatccaagacaaactaaactttactgggtatataaccttctcaatgagttaccattcttttttataaaaaaaattgttccttgaaatgctaaacttaatggctgtatgtgaaatttgcaaaatactggtattaaagaacgctgcagcttttttatgtcactcaaaggttaatcggagtatctgaaaggaattgtttttataaaaacattgaagtattagttacttgctataaatagatttttatttttgttttttagcctgttatatttccttctgtaaaataaaatatgtccagaagaggcatgttgtttctagattaggtagtgtcctcattttatattgtgaccacacagctagagcaccagagcccttttgctatactcacagtcttgttttcccagcctcttttactagtctttcaggaggtttgctcttagaactggtgatgtaaagaatggaagtagctgtatgagcagttcaaaggccaagccgtggaatggtagcaatgggatataatacctttctaagggaaacatttgtatcagtatcatttgatctgccatggacatgtgtttaaagtggctttctggcccttctttcaatggcttcttccctaaaacgtggagactctaagttaatgtcgttactatgggccatattactaatgcccactggggtctatgatttctcaaaattttcattcggaatccgaaggatacagtctttaaactttagaattcccaagaaggctttattacacctcagaaattgaaagcaccatgactttgtccattaaaaaattatccatagtttttttagtgcttttaacattccgacatacatcattctgtgattaaatctccagatttctgtaaatgatacctacattctaaagagttaattctaattattccgatatgaccttaaggaaaagtaaaggaataaatttttgtctttgttgaagtatttaatagagtaaggtaaagaagatattaagtccctttcaaaatggaaaattaattctaaactgagaaaaatgttcctactacctattgctgatactgtctttgcataaatgaataaaaataaactttttttcttc

SEQ ID NO: 204311 - DNA, 1086 bp, Artificial Sequence
  derived and/or modified sequence
atgagcgccgccaacccggaaactcccaactcaaccatatcgagggaagcaagcacacagtcaagctcagccgcagcaagccagggttgggtcttgccggagggtaagatcgtcccgaacacagtatttgtgggcggtatcgacgctaggatggacgagaccgagatcggctcttgttttgggcgctatgggtctgtaaaggaagtcaaaatcatcacaaacagaacaggggtgtcgaaaggctacggcttcgtcagcttcgtgaacgacgtggacgtacaaaaaattgtcggatcccagatccacttccacggcaagaagctgaagctgggccctgcaatccgcaagcagaagctgtgtgcaaggcacgtacagccgcgcccattagtagtaaatcccccccctcctccacagttccagaatgtgtggaggaatcccaacaccgaaacatatttgcagcctcaaatcacccccaaccccgtcacccaacatgtccaggcatacagtgcatatcctcacagccctgggcaggtgatcaccggttgccagcttttagtgtacaattaccaggagtacccaacctaccccgactcagcctttcaggttactaccggataccaactgcctgtgtataactatcaaccctttccagcataccctagatccccatttcaagtcactgccgggtaccagctgcccgtgtacaattatcaggcattccctgcctatccaaattcaccattccaagtcgccacgggataccagtttcctgtgtataactaccaacccttccctgcataccccagttcaccatttcaggttacagccgggtaccagctgcccgtgtataattatcaagccttcccagcgtacccaaactccccgtttcaggtggccactggttatcaatttcccgtctacaactaccaagcctttcctgcataccctaacagccctttccaggttgcaacggggtaccagtttccagtatataattatcaggctttccctgcctaccccaactcaccggtgcaagtcactaccggataccaacttcccgtgtacaattatcagatgcctccatag

SEQ ID NO: 204312 - DNA, 1173 bp, Artificial Sequence
  derived and/or modified sequence
atgtcagctgccaatcccgaaacccccaattctaccatctcgcgggaggcttcaacccaatcttcctccgctgctgcctcccagggctgggtcctcccagaggggaaaatcgtccccaataccgtatttgtggggggaatcgacgctaggatggatgagaccgaaatagggagttgtttcggacggtatggatccgtgaaagaggtgaaaatcatcacaaaccgtactggcgtcagcaaaggttatggcttcgttagcttcgtcaacgacgtagatgtccaaaaaattgtgggctcacaaatccactttcacggtaagaaactcaaattgggccctgctattcggaaacagaagctgtgtgccagacatgtacagccgaggccactggtcgttaaccccccacccccacctcaatttcagaacgtgtggcgaaatcctaatacagaaacctatctccagccacagataaccccaaacccggtaacacagcacgtgcaggcctattccgcctaccctcattcccccggccaggtgatcactggttgccaactgctcgtctataattatcaggaatatcctacataccctgattccgccttccaggttacaaccggctatcaactgcctgtgtacaattatcagccatttccggcctatccacggtctccctttcaggtcaccgctggctaccaactgcccgtgtacaactaccaagcatttcccgcctatcccaactccccatttcaggtggcaacaggttaccagttccccgtatataactatcaaccatttccagcttatccttcttctccattccaggtcacggcggggtaccagctgccagtctacaactaccaagcatttccagcttacccgaacagcccctttcaggtcgcgactgggtaccagtttccagtatacaactatcaggcctttccggcatacccaaatagtcctgtgcaggtcacaactggatatcaactgccggtgtataattaccaggcgttccctgcttatccaaactccgctgtgcaagtgactaccggatatcaatttcacgtgtacaattaccaaatgccaccgcaatgccccgtgggggagcagaggcgcaacctatggaccgaggcctacaaatggtggtaccttgtgtgtctaatccagcgccgggactag

SEQ ID NO: 204313 - DNA, 1173 bp, Artificial Sequence
  derived and/or modified sequence
atgtccgctgcaaatccagagaccccaaactccacaatatcccgtgaagcaagtactcagtcaagctccgccgctgcttcccaagggtgggtgctcccagaagggaaaattgtaccaaatacggttttcgtcggagggatagacgcccgaatggatgaaacggaaatcggtagctgcttcggccgctatgggtccgtgaaggaagtgaagattattacaaaccgcacaggcgtgtctaaagggtacggttttgtgtcgtttgtcaatgacgtcgatgttcagaaaattgtgggcagccagattcacttccacgggaagaaattaaaattgggtcctgcaatcaggaagcagaagctgtgtgctcgacatgtgcaaccgcggccacttgtcgtgaatccccctccccccccccagttccaaaacgtgtggcgcaacccaaacactgaaacatacctacagcctcagatcaccccaaacccagtcacacagcatgtccaggcatactccgcctatccccattccccaggccaggtcattactggatgtcagctcctggtgtacaactaccaggaataccctacatatcccgattctgcattccaggtgacaacgggataccagcttccagtctacaattaccagcccttccctgcctatcctcgttctccattccaagtgacagcaggttaccagctgccagtctataactaccaggcctttcccgcctacccaaattcaccctttcaggttgcaaccggttatcaatttcccgtgtataattaccaggcttttccagcctatcccaattctcccgtgcaggtaaccacaggataccagctaccagtttacaactatcaggcgtttcccgcctaccccaactccccatttcaggtcgccactggctatcagttccctgtttacaactatcaagccttccccgcctatcctaatagtccagtgcaggtaacgaccggatatcagctgcctgtttataattaccaggctttccctgcatacccaaacagcgctgtgcaagtgactacagggtaccaattccacgtatataactatcagatgccgccccaatgccctgtaggggaacagcgtaggaacctgtggacagaggcctacaaatggtggtaccttgtgtgtctgatccagcggcgtgactag

SEQ ID NO: 204314 - DNA, 1086 bp, Artificial Sequence
  derived and/or modified sequence
atgtctgctgccaaccctgagacccccaacagcaccatcagccgggaggccagcacccagagcagcagcgctgctgccagccagggctgggtgctgcctgagggcaagatcgtgcccaacacagtgtttgtgggcggcattgatgccaggatggatgaaacagagatcggcagctgcttcggccgctatggctctgtgaaggaggtgaagatcatcaccaacagaactggagtgtccaagggctacggctttgtgtcctttgtgaatgatgtggatgtgcagaagatcgtgggcagccagatccacttccacggcaagaagctgaagctgggccctgccatcaggaagcagaagctgtgtgcccggcacgtgcagccccggcccctggtggtgaaccccccacctccaccccagttccagaatgtgtggaggaaccccaacacagagacctacctgcagccccagatcacccccaaccctgtgacccagcacgtgcaggcctacagcgcctacccccacagccctggccaggtgatcaccggctgccagctgctggtgtacaactaccaggagtaccccacctacccagacagcgccttccaggtgaccaccggctaccagctgcctgtgtacaactaccagcccttccctgcctaccccaggagccccttccaggtgacagctggctaccagctgcctgtgtacaactaccaggccttccctgcctaccccaacagccccttccaggtggccaccggctaccagtttcctgtgtacaactaccagcccttccctgcctaccccagcagccccttccaggtgacagctggctaccagctgcctgtgtacaactaccaggccttccctgcctaccccaacagccccttccaggtggccaccggctaccagtttcctgtgtacaactaccaggccttccctgcctaccccaacagccccttccaggtggccaccggctaccagtttcctgtgtacaactaccaggccttccctgcctaccccaacagccctgtgcaggtgaccaccggctaccagctgcctgtgtacaactaccagatgccaccctag

SEQ ID NO: 204315 - DNA, 1173 bp, Artificial Sequence
  derived and/or modified sequence
atgtctgctgccaaccctgagacccccaacagcaccatcagccgggaggccagcacccagagcagcagcgctgctgccagccagggctgggtgctgcctgagggcaagatcgtgcccaacacagtgtttgtgggcggcattgatgccaggatggatgaaacagagatcggcagctgcttcggccgctatggctctgtgaaggaggtgaagatcatcaccaacagaactggagtgtccaagggctacggctttgtgtcctttgtgaatgatgtggatgtgcagaagatcgtgggcagccagatccacttccacggcaagaagctgaagctgggccctgccatcaggaagcagaagctgtgtgcccggcacgtgcagccccggcccctggtggtgaaccccccacctccaccccagttccagaatgtgtggaggaaccccaacacagagacctacctgcagccccagatcacccccaaccctgtgacccagcacgtgcaggcctacagcgcctacccccacagccctggccaggtgatcaccggctgccagctgctggtgtacaactaccaggagtaccccacctacccagacagcgccttccaggtgaccaccggctaccagctgcctgtgtacaactaccagcccttccctgcctaccccaggagccccttccaggtgacagctggctaccagctgcctgtgtacaactaccaggccttccctgcctaccccaacagccccttccaggtggccaccggctaccagtttcctgtgtacaactaccaggccttccctgcctaccccaacagccctgtgcaggtgaccaccggctaccagctgcctgtgtacaactaccaggccttccctgcctaccccaacagccccttccaggtggccaccggctaccagtttcctgtgtacaactaccaggccttccctgcctaccccaacagccctgtgcaggtgaccaccggctaccagctgcctgtgtacaactaccaggccttccctgcctaccccaacagcgctgtgcaggtgaccaccggctaccagttccacgtgtacaactaccagatgccaccccagtgccctgtgggggagcagaggaggaacctgtggacagaggcctacaagtggtggtacctggtgtgcctgatccagaggcgggactag

SEQ ID NO: 204316 - DNA, 1086 bp, Artificial Sequence
  derived and/or modified sequence
atgagcgccgccaaccccgagacccccaacagcaccatcagccgggaggcctccacccagtcatcctctgctgcagcatcacagggatgggtcctgccagaaggaaagatcgttccaaataccgtgttcgtgggcggcatcgacgcccgcatggatgaaacagagatcggtagctgcttcggtcgatacgggagcgtgaaggaggtgaagatcattacaaatcgtactggagtgtcgaaaggctatgggtttgttagctttgttaacgacgttgatgtgcaaaagatcgtagggtcacagatccacttccatgggaagaagctgaagttgggtccggcaattaggaaacagaagctttgcgctagacacgtgcagccaagaccccttgtggtgaatccgcctccacctccccagttccagaatgtctggaggaatccaaacaccgaaacctatttgcagccacagattacaccgaacccagttactcagcacgtacaggcctactcagcgtatcctcacagccccggacaggtaatcacaggctgccaattgctcgtgtataactatcaggagtatcctacctaccccgactccgcctttcaggtgaccaccgggtatcagctccctgtatataactaccaaccatttcctgcatatccacggtcccctttccaagtgacggcaggataccaactgcctgtctataactaccaggccttcccagcatacccaaacagtccatttcaagtcgcgaccggatatcaattcccagtttacaattaccagccattcccagcctatccctcctctccattccaggtgaccgctggttaccagctccccgtgtataactatcaagctttccccgcatacccgaactccccgtttcaggttgctaccggctatcagttccccgtctacaactatcaagcgttcccagcctatccgaattcccccttccaggtggcaactggctaccagttccccgtctataattaccaggcttttcccgcttacccaaactctcccgtgcaggtcacgactggataccaactccctgtgtacaactatcagatgcccccatag

SEQ ID NO: 204317 - DNA, 1173 bp, Artificial Sequence
  derived and/or modified sequence
atgagcgccgccaaccccgagacccccaacagcaccatcagccgggaagctagtacccaaagtagctcagctgctgccagccagggctgggtgcttccggaggggaagattgtaccgaatactgtgttcgtggggggcatagatgcccggatggacgaaaccgagatcggcagttgcttcggcaggtacggaagtgtcaaggaggtcaaaattattactaacaggactggagtgtccaaaggttacggttttgtgtcattcgtgaatgatgttgatgtacagaagattgtgggcagccagatccacttccacggtaagaaattgaagttgggcccagctatacgtaaacagaaactgtgtgcaagacacgtgcagccacgtcctctggtagtgaaccccccaccccctcctcaattccagaacgtgtggcgcaaccccaatacagagacttacttacagcctcaaatcaccccaaacccagtgacgcagcacgtgcaggcttattccgcttacccacattcccctgggcaggtgataaccggctgccagctgcttgtctacaactatcaagaatacccaacatatccggattccgcattccaagtcaccactggctaccagctccctgtgtataactaccagccatttcccgcttacccgagaagtcccttccaggtcaccgcgggctatcagttgccagtgtacaactatcaggcctttcctgcgtatcccaatagccccttccaagttgccacagggtaccagtttccagtgtacaattaccaaccattcccggcgtacccatcaagcccttttcaggttacagcgggctaccagctacccgtctataattaccaagctttcccagcctaccctaattccccattccaggtggcaacagggtaccagttccccgtttacaattatcaggccttcccagcctatccaaatagccctgttcaggtaaccacgggatatcagctgccagtatataattaccaggccttccctgcctatcccaactcggctgttcaagtgacaacagggtaccaatttcatgtttacaactaccagatgccaccccagtgtcctgtgggagagcagaggagaaacctctggaccgaagcctacaagtggtggtatctggtgtgtctaattcagcgaagagactag

SEQ ID NO: 204318 - DNA, 1173 bp, Artificial Sequence
  derived and/or modified sequence
atgagcgccgccaaccccgagacccccaacagcaccatcagccgggaggcaagcacccaatcttcatctgcggccgcttcccaaggctgggtgctcccagaagggaaaattgttccaaatacagtattcgtcggcggaattgatgccaggatggacgaaaccgaaataggatcctgtttcgggcggtatgggtctgtgaaggaagtgaagatcatcactaaccgcaccggagtgtccaagggatacggcttcgtaagctttgtgaatgatgtggatgttcagaagattgtcggtagtcagattcacttccatggcaagaaattgaaattaggacctgcgattcgcaaacaaaagctctgtgcccgccacgtacagccccgaccactggtcgtcaaccctcctccacccccgcagttccagaacgtttggaggaacccaaacactgagacatacctgcaacctcagatcacccccaacccggtgactcaacacgttcaggcctacagcgcttatcctcattcgccaggccaggtgatcaccggctgtcaacttctagtctataactaccaagaatatcctacctaccctgacagcgctttccaggttaccactgggtatcagctgccagtgtacaattaccagccatttcctgcctaccctcggtccccgttccaggtaacagccggataccagctgcccgtgtacaattaccaggcgttccccgcttatccaaatagccccttccaggtcgccaccggctaccagttccctgtctataactaccaagccttccctgcttatcccaatagtcctgtgcaagtgactacaggctaccagttgcctgtctacaattaccaggcctttcctgcttatccgaattctccctttcaggtggcaaccggttaccaatttcctgtttataattaccaggcctttcctgcatatccaaactctcccgttcaggtaactacaggctatcagctgcctgtctataactaccaagcttttcctgcctaccctaactctgcggtgcaagtcaccactggctaccaattccacgtttacaattaccaaatgcccccccagtgtccggttggggaacaaaggagaaatttgtggaccgaagcctataaatggtggtaccttgtttgcttgattcagagaagagattag

SEQ ID NO: 204319 - DNA, 1086 bp, Artificial Sequence
  derived and/or modified sequence
atgagcgcagcgaatcccgagaccccaaattccacaatctctcgcgaagcgagcactcagtcatcatccgccgcagcctcccagggatgggtgctgcccgagggcaaaatcgttccgaatacggtgtttgtcgggggaattgacgctcggatggatgagacagagatcggcagctgctttggaagatacgggtcggttaaagaggtgaagatcattacaaaccgaacaggcgtgagcaaaggttatggatttgtgtccttcgtgaacgacgtggacgttcagaagattgtcggttctcagattcacttccatgggaaaaaattgaaactgggaccagcgattaggaagcagaaactgtgtgccagacatgtgcaaccacggcctttagtggttaatcccccaccaccaccgcagttccagaacgtctggcggaacccgaatactgagacatatctgcagcctcagattacccccaatcctgtgacgcaacacgttcaggcttactcagcctaccctcactcccccggacaggtgataacagggtgccagctccttgtctacaactaccaagagtacccaacataccctgattccgcctttcaggttaccactgggtatcagctgccagtctataactaccaacctttcccggcatatcctaggtctccgtttcaggttacagcaggttaccagctgcctgtatacaattaccaggccttcccagcgtatccgaacagccccttccaggtcgcaactgggtatcagttccccgtttataattatcaaccgttccctgcatacccctcctcaccgtttcaggtcaccgcagggtatcagctccctgtatataattaccaggcatttcccgcttatccaaacagccccttccaggtggctacgggttaccagttccctgtgtataattaccaggcctttcctgcttaccctaatagcccgttccaggtggccacgggctatcagttcccagtttacaactatcaagccttccccgcataccccaattctcctgtgcaagtcacgaccgggtaccagctgccagtgtataactaccagatgcccccatag

SEQ ID NO: 204320 - DNA, 1173 bp, Artificial Sequence
  derived and/or modified sequence
atgtctgcggctaacccagaaactccaaactcaacaatctcccgagaggccagcacccaatcgtcctcggctgctgcttcacagggctgggttctccctgaaggcaaaatagtgccaaacacagtgtttgtgggcggtatagatgctcgaatggatgagacagagattgggtcatgtttcggccgttatggaagcgtgaaagaggtcaaaataattacaaaccgcaccggcgtgtctaaaggatatggatttgtgtctttcgtgaacgatgtggacgtacagaaaattgtgggtagccaaattcatttccacgggaaaaagctgaagctaggccctgcaatacgaaagcagaagttgtgtgctaggcacgtgcagcctaggccccttgtggtcaatccaccccctccgccacagttccagaatgtttggcgaaatccaaacaccgagacttatttacagccccaaatcacccccaatcccgtcacacaacacgtacaagcctattcagcttaccctcactcccccggtcaagtgattacgggatgccagcttctcgtttataattatcaggaataccctacctaccccgacagtgcattccaggtgaccaccgggtatcagctgccagtctacaactaccagcccttcccagcctaccccagaagccctttccaagtcacagctgggtatcaactgcccgtttacaactaccaggctttcccagcataccccaacagtccttttcaggtcgctaccggttaccagtttccagtgtataattatcagccattccccgcatacccttcctcccctttccaggtgaccgcgggttaccagctgcctgtgtacaactatcaggcctttcccgcttaccccaattccccttttcaggtcgctactggctaccagttcccagtgtataattatcaggcttttccggcatatcccaattctccagttcaggtcacgacgggctaccagctccccgtttacaattatcaggcctttcccgcatacccaaatagtgcagttcaagtaacgaccggatatcaattccacgtgtacaactaccagatgcctcctcagtgcccggtcggcgaacagcgacgcaacctctggacggaagcctacaaatggtggtatctcgtctgcctgattcaacgcagagattag

SEQ ID NO: 204321 - DNA, 1173 bp, Artificial Sequence
  derived and/or modified sequence
atgtcggctgccaaccccgagacaccaaatagtaccatatccagagaagccagcacccagtccagttccgccgcagcttctcagggttgggtgctgccagaaggcaagattgtccccaacacggttttcgtcgggggaatagacgctcgtatggacgagacagagattggttcatgcttcggaaggtatggttctgttaaggaagtgaagatcattactaatcgcactggagtcagcaagggttatggcttcgtctccttcgtgaatgacgtagatgttcagaagattgtgggctctcagatacacttccacgggaagaaactgaagctcggtccagctatcaggaagcagaagctgtgcgcacggcacgtgcagcctagacctttagtggtcaacccccctccaccaccgcagtttcaaaatgtgtggagaaatcccaataccgagacgtatctacaaccccagattacccccaatcccgtcacccagcacgtccaggcgtactcagcctacccccattctccgggacaggttattacaggctgccagctgctggtctacaactaccaggaatatccaacatatcccgactcggcgtttcaggtgacaaccggatatcagctgcccgtatataactaccaaccatttccggcttacccgaggagtccgttccaggtaaccgccggatatcaactccctgtatacaattaccaagcctttcctgcctatcccaacagccccttccaagtggctaccggctatcagttccctgtgtacaactaccaggcatttccggcttacccaaacagtccagtacaggtgaccactggatatcagctgcccgtatataactaccaggccttcccggcttaccccaacagccctttccaggtcgccaccggataccagtttcctgtgtacaactaccaggcgtttcccgcatacccaaattctccggttcaggtgacgaccggttatcagctcccagtgtataactaccaggccttccctgcatacccaaacagcgctgtgcaagtgacaaccggttaccagttccatgtatataactaccagatgccaccacagtgcccagtaggtgagcagagacgcaacctgtggactgaggcgtataagtggtggtacctagtttgtttgattcaacgacgcgattag

SEQ ID NO: 204322 - DNA, 1086 bp, Artificial Sequence
  derived and/or modified sequence
atgagcgccgccaaccccgagacccccaacagcaccatcagcagagaggccagcacccagagcagcagcgccgccgccagccagggctgggtgctgcccgagggcaagatcgtgcccaacaccgtgttcgtgggcggcatcgacgccagaatggacgagaccgagatcggcagctgcttcggcagatacggcagcgtgaaggaggtgaagatcatcaccaacagaaccggcgtgagcaagggctacggcttcgtgagcttcgtgaacgacgtggacgtgcagaagatcgtgggcagccagatccacttccacggcaagaagctgaagctgggccccgccatcagaaagcagaagctgtgcgccagacacgtgcagcccagacccctggtggtgaacccccccccccccccccagttccagaacgtgtggagaaaccccaacaccgagacctacctgcagccccagatcacccccaaccccgtgacccagcacgtgcaggcctacagcgcctacccccacagccccggccaggtgatcaccggctgccagctgctggtgtacaactaccaggagtaccccacctaccccgacagcgccttccaggtgaccaccggctaccagctgcccgtgtacaactaccagcccttccccgcctaccccagaagccccttccaggtgaccgccggctaccagctgcccgtgtacaactaccaggccttccccgcctaccccaacagccccttccaggtggccaccggctaccagttccccgtgtacaactaccagcccttccccgcctaccccagcagccccttccaggtgaccgccggctaccagctgcccgtgtacaactaccaggccttccccgcctaccccaacagccccttccaggtggccaccggctaccagttccccgtgtacaactaccaggccttccccgcctaccccaacagccccttccaggtggccaccggctaccagttccccgtgtacaactaccaggccttccccgcctaccccaacagccccgtgcaggtgaccaccggctaccagctgcccgtgtacaactaccagatgcccccctag

SEQ ID NO: 204323 - DNA, 1173 bp, Artificial Sequence
  derived and/or modified sequence
atgagcgccgccaaccccgagacccccaacagcaccatcagcagagaggccagcacccagagcagcagcgccgccgccagccagggctgggtgctgcccgagggcaagatcgtgcccaacaccgtgttcgtgggcggcatcgacgccagaatggacgagaccgagatcggcagctgcttcggcagatacggcagcgtgaaggaggtgaagatcatcaccaacagaaccggcgtgagcaagggctacggcttcgtgagcttcgtgaacgacgtggacgtgcagaagatcgtgggcagccagatccacttccacggcaagaagctgaagctgggccccgccatcagaaagcagaagctgtgcgccagacacgtgcagcccagacccctggtggtgaacccccccccccccccccagttccagaacgtgtggagaaaccccaacaccgagacctacctgcagccccagatcacccccaaccccgtgacccagcacgtgcaggcctacagcgcctacccccacagccccggccaggtgatcaccggctgccagctgctggtgtacaactaccaggagtaccccacctaccccgacagcgccttccaggtgaccaccggctaccagctgcccgtgtacaactaccagcccttccccgcctaccccagaagccccttccaggtgaccgccggctaccagctgcccgtgtacaactaccaggccttccccgcctaccccaacagccccttccaggtggccaccggctaccagttccccgtgtacaactaccaggccttccccgcctaccccaacagccccgtgcaggtgaccaccggctaccagctgcccgtgtacaactaccaggccttccccgcctaccccaacagccccttccaggtggccaccggctaccagttccccgtgtacaactaccaggccttccccgcctaccccaacagccccgtgcaggtgaccaccggctaccagctgcccgtgtacaactaccaggccttccccgcctaccccaacagcgccgtgcaggtgaccaccggctaccagttccacgtgtacaactaccagatgcccccccagtgccccgtgggcgagcagagaagaaacctgtggaccgaggcctacaagtggtggtacctggtgtgcctgatccagagaagagactag

SEQ ID NO: 204324 - DNA, 1352 bp, Artificial Sequence
  derived and/or modified sequence
cacgcgccccgatacccggcacaggagccacctcccagagccccgcagtccatgcctcagtcggcctgcgctcctcagcctggcggttctacctccgagggttcgcccgcccttggttttccttacaccttagcctttggctcctttgaccactcgaagccccacagcgtgttccagcggacttcaccagcagacccagaagtggtgggtgaaacactgcctctgttcctccttgagcctgtcgggagctgctgcctgccaccaccatgtctgctgcaaatcctgagactccaaactcaaccatctccagagaggccagcacccagtcttcatcagctgcagctagccaaggctgggtgttaccagaaggcaaaatcgtgccaaacactgtttttgttggtggaattgatgctaggatggatgaaactgagattggaagctgctttggtagatacggttcagtgaaagaagtgaagataatcacgaatcgaactggtgtgtccaaaggctatggatttgtttcgtttgttaatgacgtggatgtccagaagatagtaggatcacagatacatttccatggtaaaaagctgaagctgggccctgcaatcaggaaacaaaagttatgtgctcgtcatgtgcagccacgtcctttggtagttaatcctcctcctccaccacagtttcagaacgtctggcggaatccaaacactgaaacctacctgcagccccaaatcacgccgaatcctgtaactcagcacgttcaggcttattctgcttatccacattcaccaggtcaggtcatcactggatgtcagttgcttgtatataattatcaggaatatcctacttatcccgattcagcatttcaggtcaccactggatatcagttgcctgtatataattatcagccatttcctgcttatccaagatcaccatttcaggtcactgctggatatcagttgcctgtatataattatcaggcatttcctgcttatccaaattcaccatttcaagtcgccactggatatcagttccctgtatacaattatcagccatttcctgcttatccaagttcaccatttcaggtcactgctggatatcagttgcctgtatataattatcaggcatttcctgcttatccaaattcaccatttcaagtcgccactggatatcagttccctgtatacaattatcaggcatttcctgcttatccaaattcaccatttcaagtcgccactggatatcagttccctgtatacaattatcaggcatttcctgcttatccaaattcaccagttcaggtcaccactggatatcagttgcctgtatacaattatcagatgccaccttag

SEQ ID NO: 204325 - DNA, 3271 bp, Artificial Sequence
  derived and/or modified sequence
tcagtcggcctgcgctcctcagcctggcggttctacctccgagggttcgcccgcccttggttttccttacaccttagcctttggctcctttgaccactcgaagccccacagcgtgttccagcggacttcaccagcagacccagaagtggtgggtgaaacactgcctctgttcctccttgagcctgtcgggagctgctgcctgccaccaccatgtctgctgcaaatcctgagactccaaactcaaccatctccagagaggccagcacccagtcttcatcagctgcagctagccaaggctgggtgttaccagaaggcaaaatcgtgccaaacactgtttttgttggtggaattgatgctaggatggatgaaactgagattggaagctgctttggtagatacggttcagtgaaagaagtgaagataatcacgaatcgaactggtgtgtccaaaggctatggatttgtttcgtttgttaatgacgtggatgtccagaagatagtaggatcacagatacatttccatggtaaaaagctgaagctgggccctgcaatcaggaaacaaaagttatgtgctcgtcatgtgcagccacgtcctttggtagttaatcctcctcctccaccacagtttcagaacgtctggcggaatccaaacactgaaacctacctgcagccccaaatcacgccgaatcctgtaactcagcacgttcaggcttattctgcttatccacattcaccaggtcaggtcatcactggatgtcagttgcttgtatataattatcaggaatatcctacttatcccgattcagcatttcaggtcaccactggatatcagttgcctgtatataattatcagccatttcctgcttatccaagatcaccatttcaggtcactgctggatatcagttgcctgtatataattatcaggcatttcctgcttatccaaattcaccatttcaagtcgccactggatatcagttccctgtatacaattatcagccatttcctgcttatccaagttcaccatttcaggtcactgctggatatcagttgcctgtatataattatcaggcatttcctgcttatccaaattcaccatttcaagtcgccactggatatcagttccctgtatacaattatcaggcatttcctgcttatccaaattcaccagttcaggtcaccactggatatcagttgcctgtatacaattatcaggcatttcctgcttatccaaattcagcagttcaggtcaccactggatatcagttccatgtatacaattaccagatgccaccgcagtgccctgttggggagcaaaggagaaatctgtggaccgaagcatacaaatggtggtatcttgtctgtttaatccagagaagagactgataaattccgttgttactcaagatgactgcttcaagggtaaaagagtgcatcgctttagaagaagtttggcagtatttaaatctgttggatcctctcagctatctagtttcatgggaagttgctggttttgaatattaagctaaaagttttccactattacagaaattctgaattttggtaaatcacactgaaactttctgtataacttgtattattagactctctagttttatcttaacactgaaactgttcttcattagatgtttatttagaacctggttctgtgtttaatatatagtttaaagtaacaaataatcgagactgaaagaatgttaagatttatctgcaaggatttttaaaaaattgaaacttgcattttaagtgtttaaaagcaaatactgactttcaaaaaagtttttaaaacctgatttgaaagctaacaattttgatagtctgaacacaagcatttcacttctccaagaagtacctgtgaacagtacaatatttcagtattgagctttgcatttatgatttatctagaaatttacctcaaaagcagaatttttaaaactgcatttttaatcagtggaactcaatgtatagttagctttattgaagtcttatccaaacccagtaaaacagattctaagcaaacagtccaatcagtgagtcataatgtttattcaaagtattttatcttttatctagaatccacatatgtatgtccaatttgattgggatagtagttaggataactaaaattctgggcctaattttttaaagaatccaagacaaactaaactttactgggtatataaccttctcaatgagttaccattcttttttataaaaaaaattgttccttgaaatgctaaacttaatggctgtatgtgaaatttgcaaaatactggtattaaagaacgctgcagcttttttatgtcactcaaaggttaatcggagtatctgaaaggaattgtttttataaaaacattgaagtattagttacttgctataaatagatttttatttttgttttttagcctgttatatttccttctgtaaaataaaatatgtccagaagaggcatgttgtttctagattaggtagtgtcctcattttatattgtgaccacacagctagagcaccagagcccttttgctatactcacagtcttgttttcccagcctcttttactagtctttcaggaggtttgctcttagaactggtgatgtaaagaatggaagtagctgtatgagcagttcaaaggccaagccgtggaatggtagcaatgggatataatacctttctaagggaaacatttgtatcagtatcatttgatctgccatggacatgtgtttaaagtggctttctggcccttctttcaatggcttcttccctaaaacgtggagactctaagttaatgtcgttactatgggccatattactaatgcccactggggtctatgatttctcaaaattttcattcggaatccgaaggatacagtctttaaactttagaattcccaagaaggctttattacacctcagaaattgaaagcaccatgactttgtccattaaaaaattatccatagtttttttagtgcttttaacattccgacatacatcattctgtgattaaatctccagatttctgtaaatgatacctacattctaaagagttaattctaattattccgatatgaccttaaggaaaagtaaaggaataaatttttgtctttgttgaagtatttaatagagtaaggtaaagaagatattaagtccctttcaaaatggaaaattaattctaaactgagaaaaatgttcctactacctattgctgatactgtctttgcataaatgaataaaaataaactttttttcttcaaa

SEQ ID NO: 204326 - DNA, 3271 bp, Artificial Sequence
  derived and/or modified sequence
tcagtcggcctgcgctcctcagcctggcggttctacctccgagggttcgcccgcccttggttttccttacaccttagcctttggctcctttgaccactcgaagccccacagcgtgttccagcggacttcaccagcagacccagaagtggtgggtgaaacactgcctctgttcctccttgagcctgtcgggagctgctgcctgccaccaccatgtctgctgcaaatcctgagactccaaactcaaccatctccagagaggccagcacccagtcttcatcagctgcagctagccaaggctgggtgttaccagaaggcaaaatcgtgccaaacactgtttttgttggtggaattgatgctaggatggatgaaactgagattggaagctgctttggtagatacggttcagtgaaagaagtgaagataatcacgaatcgaactggtgtgtccaaaggctatggatttgtttcgtttgttaatgacgtggatgtccagaagatagtaggatcacagatacatttccatggtaaaaagctgaagctgggccctgcaatcaggaaacaaaagttatgtgctcgtcatgtgcagccacgtcctttggtagttaatcctcctcctccaccacagtttcagaacgtctggcggaatccaaacactgaaacctacctgcagccccaaatcacgccgaatcctgtaactcagcacgttcaggcttactctgcttatccacattcaccaggtcaggtcatcactggatgtcagttgcttgtatataattatcaggaatatcctacttatcccgattcagcatttcaggtcaccactggatatcagttgcctgtatataattatcagccatttcctgcttatccaagatcaccatttcaggtcactgctggatatcagttgcctgtatataattatcaggcatttcctgcttatccaaattcaccatttcaagtcgccactggatatcagttccctgtatacaattatcaggcatttcctgcttatccaaattcaccagttcaggtcaccactggatatcagttgcctgtatacaattatcaggcatttcctgcttatccaaattcaccatttcaagtcgccactggatatcagttccctgtatacaattatcaggcatttcctgcttatccaaattcaccagttcaggtcaccactggatatcagttgcctgtatacaattatcaggcatttcctgcttatccaaattcagcagttcaggtcaccactggatatcagttccatgtatacaattaccagatgccaccgcagtgccctgttggggagcaaaggagaaatctgtggaccgaagcatacaaatggtggtatcttgtctgtttaatccagagaagagactgataaattccgttgttactcaagatgactgcttcaagggtaaaagagtgcatcgctttagaagaagtttggcagtatttaaatctgttggatcctctcagctatctagtttcatgggaagttgctggttttgaatattaagctaaaagttttccactattacagaaattctgaattttggtaaatcacactgaaactttctgtataacttgtattattagactctctagttttatcttaacactgaaactgttcttcattagatgtttatttagaacctggttctgtgtttaatatatagtttaaagtaacaaataatcgagactgaaagaatgttaagatttatctgcaaggatttttaaaaaattgaaacttgcattttaagtgtttaaaagcaaatactgactttcaaaaaagtttttaaaacctgatttgaaagctaacaattttgatagtctgaacacaagcatttcacttctccaagaagtacctgtgaacagtacaatatttcagtattgagctttgcatttatgatttatctagaaatttacctcaaaagcagaatttttaaaactgcatttttaatcagtggaactcaatgtatagttagctttattgaagtcttatccaaacccagtaaaacagattctaagcaaacagtccaatcagtgagtcataatgtttattcaaagtattttatcttttatctagaatccacatatgtatgtccaatttgattgggatagtagttaggataactaaaattctgggcctaattttttaaagaatccaagacaaactaaactttactgggtatataaccttctcaatgagttaccattcttttttataaaaaaaattgttccttgaaatgctaaacttaatggctgtatgtgaaatttgcaaaatactggtattaaagaacgctgcagcttttttatgtcactcaaaggttaatcggagtatctgaaaggaattgtttttataaaaacattgaagtattagttacttgctataaatagatttttatttttgttttttagcctgttatatttccttctgtaaaataaaatatgtccagaagaggcatgttgtttctagattaggtagtgtcctcattttatattgtgaccacacagctagagcaccagagcccttttgctatactcacagtcttgttttcccagcctcttttactagtctttcaggaggtttgctcttagaactggtgatgtaaagaatggaagtagctgtatgagcagttcaaaggccaagccgtggaatggtagcaatgggatataatacctttctaagggaaacatttgtatcagtatcatttgatctgccatggacatgtgtttaaagtggctttctggcccttctttcaatggcttcttccctaaaacgtggagactctaagttaatgtcgttactatgggccatattactaatgcccactggggtctatgatttctcaaaattttcattcggaatccgaaggatacagtctttaaactttagaattcccaagaaggctttattacacctcagaaattgaaagcaccatgactttgtccattaaaaaattatccatagtttttttagtgcttttaacattccgacatacatcattctgtgattaaatctccagatttctgtaaatgatacctacattctaaagagttaattctaattattccgatatgaccttaaggaaaagtaaaggaataaatttttgtctttgttgaagtatttaatagagtaaggtaaagaagatattaagtccctttcaaaatggaaaattaattctaaactgagaaaaatgttcctactacctattgctgatactgtctttgcataaatgaataaaaataaactttttttcttcaaa

SEQ ID NO: 204327 - protein, 688 aa, Artificial Sequence
  derived and/or modified sequence
MGSENSALKSYTLREPPFTLPSGLAVYPAVLQDGKFASVFVYKRENEDKVNKAAKHLKTLRHPCLLRFLSCTVEADGIHLVTERVQPLEVALETLSSAEVCAGIYDILLALIFLHDRGHLTHNNVCLSSVFVSEDGHWKLGGMETVCKVSQATPEFLRSIQSIRDPASIPPEEMSPEFTTLPECHGHARDAFSFGTLVESLLTILNEQVSADVLSSFQQTLHSTLLNPIPKCRPALCTLLSHDFFRNDFLEVVNFLKSLTLKSEEEKTEFFKFLLDRVSCLSEELIASRLVPLLLNQLVFAEPVAVKSFLPYLLGPKKDHAQGETPCLLSPALFQSRVIPVLLQLFEVHEEHVRMVLLSHIEAYVEHFTQEQLKKVILPQVLLGLRDTSDSIVAITLHSLAVLVSLLGPEVVVGGERTKIFKRTAPSFTKNTDLSLEGDPFSQPIKFPINGLSDVKNTSEDSENFPSSSKKSEEWPDWSEPEEPENQTVNIQIWPREPCDDVKSQCTTLDVEESSWDDCEPSSLDTKVNPGGGITATKPVTSGEQKPIPALLSLTEESMPWKSSLPQKISLVQRGDDADQIEPPKVSSQERPLKVPSELGLGEEFTIQVKKKPVKDPEMDWFADMIPEIKPSAAFLILPELRTEMVPKKDDVSPVMQFSSKFAAAEITEGEAEGWEEEGELNWEDNNW

SEQ ID NO: 204328 - protein, 588 aa, Artificial Sequence
  derived and/or modified sequence
MGSENSALKSYTLREPPFTLPSGLAVYPAVLQDGKFASVFVYKRENEDKVNKAAKHLKTLRHPCLLRFLSCTVEADGIHLVTERVQPLEVALETLSSAEVCAGIYDILLALIFLHDRGHLTHNNVCLSSVFVSEDGHWKLGGMETVCKVSQATPEFLRSIQSIRDPASIPPEEMSPEFTTLPECHGHARDAFSFGTLVESLLTILNEQVSADVLSSFQQTLHSTLLNPIPKCRPALCTLLSHDFFRNDFLEVVNFLKSLTLKSEEEKTEFFKFLLDRVSCLSEELIASRLVPLLLNQLVFAEPVAVKSFLPYLLGPKKDHAQGETPCLLSPALFQSRVIPVLLQLFEVHEEHVRMVLLSHIEAYVEHFTQEQLKKVILPQVLLGLRDTSDSIVAITLHSLAVLVSLLGPEVVVGGERTKIFKRTAPSFTKNTDLSLEGDPFSQPIKFPINGLSDVKNTSEDSENFPSSSKKSEEWPDWSEPEEPENQTVNIQIWPREPCDDVKSQCTTLDVEESSWDDCEPSSLDTKVNPGGGITATKPVTSGEQKPIPALLSLTEESMPWKSSLPQKISLVQRGDDADQIEPPKVSS

SEQ ID NO: 204329 - DNA, 2067 bp, Artificial Sequence
  derived and/or modified sequence
atgggcagcgagaacagcgccctgaagagctacaccctgagagagccccccttcaccctgcccagcggcctggccgtgtaccccgccgtgctgcaggacggcaagttcgccagcgtgttcgtgtacaagagagagaacgaggacaaggtgaacaaggccgccaagcacctgaagaccctgagacacccctgcctgctgagattcctgagctgcaccgtggaggccgacggcatccacctggtgaccgagagagtgcagcccctggaggtggccctggagaccctgagcagcgccgaggtgtgcgccggcatctacgacatcctgctggccctgatcttcctgcacgacagaggccacctgacccacaacaacgtgtgcctgagcagcgtgttcgtgagcgaggacggccactggaagctgggcggcatggagaccgtgtgcaaggtgagccaggccacccccgagttcctgagaagcatccagagcatcagagaccccgccagcatcccccccgaggagatgagccccgagttcaccaccctgcccgagtgccacggccacgccagagacgccttcagcttcggcaccctggtggagagcctgctgaccatcctgaacgagcaggtgagcgccgacgtgctgagcagcttccagcagaccctgcacagcaccctgctgaaccccatccccaagtgcagacccgccctgtgcaccctgctgagccacgacttcttcagaaacgacttcctggaggtggtgaacttcctgaagagcctgaccctgaagagcgaggaggagaagaccgagttcttcaagttcctgctggacagagtgagctgcctgagcgaggagctgatcgccagcagactggtgcccctgctgctgaaccagctggtgttcgccgagcccgtggccgtgaagagcttcctgccctacctgctgggccccaagaaggaccacgcccagggcgagaccccctgcctgctgagccccgccctgttccagagcagagtgatccccgtgctgctgcagctgttcgaggtgcacgaggagcacgtgagaatggtgctgctgagccacatcgaggcctacgtggagcacttcacccaggagcagctgaagaaggtgatcctgccccaggtgctgctgggcctgagagacaccagcgacagcatcgtggccatcaccctgcacagcctggccgtgctggtgagcctgctgggccccgaggtggtggtgggcggcgagagaaccaagatcttcaagagaaccgcccccagcttcaccaagaacaccgacctgagcctggagggcgaccccttcagccagcccatcaagttccccatcaacggcctgagcgacgtgaagaacaccagcgaggacagcgagaacttccccagcagcagcaagaagagcgaggagtggcccgactggagcgagcccgaggagcccgagaaccagaccgtgaacatccagatctggcccagagagccctgcgacgacgtgaagagccagtgcaccaccctggacgtggaggagagcagctgggacgactgcgagcccagcagcctggacaccaaggtgaaccccggcggcggcatcaccgccaccaagcccgtgaccagcggcgagcagaagcccatccccgccctgctgagcctgaccgaggagagcatgccctggaagagcagcctgccccagaagatcagcctggtgcagagaggcgacgacgccgaccagatcgagccccccaaggtgagcagccaggagagacccctgaaggtgcccagcgagctgggcctgggcgaggagttcaccatccaggtgaagaagaagcccgtgaaggaccccgagatggactggttcgccgacatgatccccgagatcaagcccagcgccgccttcctgatcctgcccgagctgagaaccgagatggtgcccaagaaggacgacgtgagccccgtgatgcagttcagcagcaagttcgccgccgccgagatcaccgagggcgaggccgagggctgggaggaggagggcgagctgaactgggaggacaacaactggtag

SEQ ID NO: 204330 - DNA, 1767 bp, Artificial Sequence
  derived and/or modified sequence
atgggcagcgagaacagcgccctgaagagctacaccctgagagagccccccttcaccctgcccagcggcctggccgtgtaccccgccgtgctgcaggacggcaagttcgccagcgtgttcgtgtacaagagagagaacgaggacaaggtgaacaaggccgccaagcacctgaagaccctgagacacccctgcctgctgagattcctgagctgcaccgtggaggccgacggcatccacctggtgaccgagagagtgcagcccctggaggtggccctggagaccctgagcagcgccgaggtgtgcgccggcatctacgacatcctgctggccctgatcttcctgcacgacagaggccacctgacccacaacaacgtgtgcctgagcagcgtgttcgtgagcgaggacggccactggaagctgggcggcatggagaccgtgtgcaaggtgagccaggccacccccgagttcctgagaagcatccagagcatcagagaccccgccagcatcccccccgaggagatgagccccgagttcaccaccctgcccgagtgccacggccacgccagagacgccttcagcttcggcaccctggtggagagcctgctgaccatcctgaacgagcaggtgagcgccgacgtgctgagcagcttccagcagaccctgcacagcaccctgctgaaccccatccccaagtgcagacccgccctgtgcaccctgctgagccacgacttcttcagaaacgacttcctggaggtggtgaacttcctgaagagcctgaccctgaagagcgaggaggagaagaccgagttcttcaagttcctgctggacagagtgagctgcctgagcgaggagctgatcgccagcagactggtgcccctgctgctgaaccagctggtgttcgccgagcccgtggccgtgaagagcttcctgccctacctgctgggccccaagaaggaccacgcccagggcgagaccccctgcctgctgagccccgccctgttccagagcagagtgatccccgtgctgctgcagctgttcgaggtgcacgaggagcacgtgagaatggtgctgctgagccacatcgaggcctacgtggagcacttcacccaggagcagctgaagaaggtgatcctgccccaggtgctgctgggcctgagagacaccagcgacagcatcgtggccatcaccctgcacagcctggccgtgctggtgagcctgctgggccccgaggtggtggtgggcggcgagagaaccaagatcttcaagagaaccgcccccagcttcaccaagaacaccgacctgagcctggagggcgaccccttcagccagcccatcaagttccccatcaacggcctgagcgacgtgaagaacaccagcgaggacagcgagaacttccccagcagcagcaagaagagcgaggagtggcccgactggagcgagcccgaggagcccgagaaccagaccgtgaacatccagatctggcccagagagccctgcgacgacgtgaagagccagtgcaccaccctggacgtggaggagagcagctgggacgactgcgagcccagcagcctggacaccaaggtgaaccccggcggcggcatcaccgccaccaagcccgtgaccagcggcgagcagaagcccatccccgccctgctgagcctgaccgaggagagcatgccctggaagagcagcctgccccagaagatcagcctggtgcagagaggcgacgacgccgaccagatcgagccccccaaggtgagcagctag

SEQ ID NO: 204331 - DNA, 2067 bp, Artificial Sequence
  derived and/or modified sequence
atgggatccgaaaactctgctctcaaatcatataccctgcgggaacccccttttacacttcctagcggcttagcagtgtacccagctgtccttcaggacggcaagtttgcttctgtgtttgtttacaaaagggaaaatgaagataaggtgaacaaagcagccaagcacctcaaaacgttgaggcatccctgtttactgaggttcctttcctgcacagtggaggctgatggaatccaccttgtgacagagagagtgcagcctcttgaggttgcactggagaccctctcatccgctgaggtatgtgcaggcatctacgatatacttctggctctgatctttctacacgacagagggcacttgacgcataacaatgtctgcctatcgtccgtctttgtatccgaggatggacattggaaattgggcggcatggaaacagtgtgcaaggtcagccaggctacacctgaatttctgagatctattcagtctatccgggacccggctagcatccctcccgaggaaatgtcacccgagtttaccactttgccagagtgtcatgggcacgctcgggatgctttttcatttggcaccctggtggagagccttctcacaattctcaacgagcaggttagtgccgatgtgctcagctcttttcaacaaactctccatagtaccttacttaacccaattccaaaatgtcggccagcactctgtaccctgctatcacatgacttcttccggaatgactttctcgaggtggtaaatttcctgaagtcacttaccttaaaaagcgaggaagagaagaccgaattctttaagtttcttctagaccgcgtaagttgcctttccgaggagctgatcgcttctagactggtgccactcctactgaaccagctagtgtttgccgaaccagtagccgtgaaaagttttctgccttacctgcttggtcctaaaaaagatcatgcccagggagagactccctgcctgctctccccagctctctttcagtcccgtgtgattcctgttcttctccagcttttcgaggttcatgaagagcatgtgcgcatggtcctcttgtcgcatatagaagcgtacgttgagcacttcacccaagagcagctcaaaaaggtgatcctgcctcaggtcttgttggggttgcgggacacatccgatagcattgttgcaataaccctgcacagcctcgcagtcctcgtcagcttacttgggccagaggtcgtggttgggggagagcgcaccaaaatctttaaacgcacagcgccttcgtttacaaagaacactgatttatccctggagggcgaccccttctcacagcccatcaagttccctattaatgggctctctgacgtgaaaaacacctccgaggattccgagaacttcccgtcaagcagcaagaagagtgaagagtggccagactggtccgagcccgaggaacctgagaatcaaaccgtaaacatccagatctggccacgcgagccctgtgacgatgtgaagagtcagtgcacaacactggacgtggaggaatcaagctgggacgattgtgagccaagctcactcgacacaaaggtgaatccgggcggaggcattaccgctacaaaacccgttaccagcggagaacaaaaaccgatccccgcgttattatcactcacagaggaatccatgccttggaaaagtagtctcccacagaagatctcgttggtccagaggggagatgacgctgaccagattgagccaccgaaggttagtagtcaggaacgtcccctcaaggtaccgagcgaactgggattgggagaagaatttacaatccaggtgaaaaaaaaacctgtgaaggatcctgagatggattggttcgccgatatgattcctgagatcaaaccatccgcagctttcctcatcctaccggagctcagaacagagatggttcccaaaaaggacgacgtctctcctgttatgcaattctccagcaaatttgcagccgccgaaatcaccgagggcgaggcagaggggtgggaggaggagggagaactcaattgggaagataacaactggtag

SEQ ID NO: 204332 - DNA, 1767 bp, Artificial Sequence
  derived and/or modified sequence
atgggctctgaaaacagtgctttgaagtcatacacactccgtgaaccccctttcactttgccttcgggcttggcggtttaccctgcagttctgcaggatgggaagttcgcatccgtgtttgtgtacaaaagggaaaatgaggataaggtgaacaaggcggcaaagcacttgaagacactgcgtcatccctgtctgttgcgtttcctgtcttgcacggtggaggcggatgggatccatctcgtaaccgagcgtgtgcaacctctcgaggtcgccctcgaaactcttagctccgccgaggtgtgcgccggaatatacgatattctgttagctctgatatttctgcacgacagaggccatctcacacacaataacgtttgcttgtcctctgtgttcgttagcgaagatggccattggaagcttgggggaatggagactgtttgtaaggttagccaagccacccctgaattcctgcgctccattcagtccatccgggaccccgcttctatcccgcctgaggagatgtcccccgagtttacgactctgcctgagtgtcatggtcacgcacgggatgcttttagctttggtacgctagtcgagagcctgcttacaattctcaacgagcaggtgtctgccgatgtactgtcctcatttcagcagacactccacagtacacttttgaatccgatcccaaaatgtcggcccgccctctgtacactgctatcacacgatttcttcagaaatgatttcttggaagtagtcaacttcctgaagtccttaaccctgaagagcgaggaggaaaagacagaattctttaagtttctcctcgatagggtgagttgcctctctgaggaactcatcgcgtctaggcttgtgcccttgctgctgaaccagctagtcttcgccgagcccgtagccgtgaaatcttttctgccgtacctgctgggcccaaaaaaggaccatgctcagggcgaaacaccctgtttactcagccctgcactatttcagtctcgcgtgatcccagtgctactacagctgttcgaagtccacgaggagcatgttcgaatggtgctcctgagtcatattgaggcttatgtggaacacttcacccaagaacaactgaagaaggtcattctgcctcaggtattgctggggctcagagacacgtccgacagtattgtagctataactctccactcactggccgtcctggtgtccctgctgggccccgaggttgtggtgggcggagaacgaaccaaaattttcaaaaggaccgcgccaagcttcacaaagaacaccgatttgtcattagagggagacccattttctcagccaattaaatttcccataaatggcctgagcgacgttaaaaacacaagtgaggacagtgagaacttcccctctagctccaagaaatccgaagagtggcccgattggagtgaacctgaggaacctgaaaaccagacagtgaacattcagatttggcccagagaaccgtgcgacgacgtcaagtctcagtgcaccaccctggatgtcgaggagtcctcctgggatgactgcgagccatctagcctcgacaccaaagtgaatccagggggaggcattacggccacaaagcccgtgaccagtggtgagcagaagcccatacccgcactgttgagcctgacagaagagagcatgccatggaaaagttccttaccacagaaaatctcactggtgcagcggggcgatgatgctgatcagatcgaaccccccaaagtgtcaagctag

SEQ ID NO: 204333 - DNA, 2067 bp, Artificial Sequence
  derived and/or modified sequence
atgggcagcgagaacagcgccctgaagagctacaccctgcgggagccccccttcaccctgcccagcggcctggccgtgtacccagctgtgctgcaggacggcaagtttgcctctgtgtttgtgtacaagagagaaaatgaagacaaggtgaacaaggccgccaagcacctgaagaccctgcggcacccctgcctgctgcgcttcctgagctgcaccgtggaggctgatggcatccacctggtgacagagcgggtgcagcccctggaggtggccctggagaccctgagcagcgctgaggtgtgtgccggcatctatgacatcctgctggccctgatcttcctgcatgaccggggccacctgacccacaacaacgtgtgcctgagctctgtgtttgtgtctgaagatggccactggaagctgggcggcatggagaccgtgtgcaaggtgtcccaggccaccccagagttcctgcggagcatccagagcatccgggaccctgccagcatccccccagaggagatgagccctgagttcaccaccctgcctgaatgtcatggccacgccagagatgccttctcctttggcaccctggtggagagcctgctgaccatcctgaatgagcaggtgtctgcagatgtgctgagcagcttccagcagaccctgcacagcaccctgctgaaccccatccccaagtgcaggcctgccctgtgcaccctgctgagccatgacttcttcagaaatgacttcctggaggtggtgaacttcctgaagagcctgaccctgaagtctgaggaggagaagacagagttcttcaagttcctgctggacagagtgtcctgcctgtctgaggagctgattgccagccggctggtgcccctgctgctgaaccagctggtgtttgctgagcctgtggccgtgaagagcttcctgccctacctgctgggccccaagaaggaccacgcccagggcgagaccccctgcctgctgagccctgccctcttccagagcagggtcatccctgtgctgctgcagctgtttgaggtgcatgaggagcacgtgaggatggtgctgctgagccacatcgaggcctacgtggagcacttcacccaggagcagctgaagaaggtgatcctgccccaggtgctgctgggcctgcgggacaccagtgacagcatcgtggccatcaccctgcacagcctggccgtgctggtgtccctgctgggccctgaggtggtggtgggcggggagaggaccaagatcttcaagaggacagcccccagcttcaccaagaacacagacctgagcctggagggggaccccttcagccagcccatcaagttccccatcaatggcctgagtgatgtgaagaacaccagcgaggacagcgagaacttccccagcagcagcaagaagtctgaggagtggccagactggagcgagcctgaggagcctgagaaccagacagtgaacatccagatctggccccgggagccctgtgatgatgtgaagagccagtgcaccaccctggatgtggaggagagctcctgggatgactgtgagcccagcagcctggacaccaaggtgaaccctgggggcggcatcacagccaccaagcctgtgaccagcggggagcagaagcccatcccagccctgctgagcctgacagaggagagcatgccctggaagagcagcctgccccagaagatcagcctggtgcagagaggagatgatgctgaccagatcgagccccccaaggtgagcagccaggagcggcccctgaaggtgcccagcgagctgggcctgggggaggagttcaccatccaggtgaagaagaagcctgtgaaggaccctgagatggactggtttgctgacatgatccctgagatcaagcccagcgctgccttcctgatcctgcctgagctgaggacagagatggtgcccaagaaggatgatgtgtcccctgtgatgcagttcagcagcaagtttgctgctgctgagatcacagaaggagaggccgagggctgggaggaggagggggagctgaactgggaggacaacaactggtag

SEQ ID NO: 204334 - DNA, 1767 bp, Artificial Sequence
  derived and/or modified sequence
atgggcagcgagaacagcgccctgaagagctacaccctgcgggagccccccttcaccctgcccagcggcctggccgtgtacccagctgtgctgcaggacggcaagtttgcctctgtgtttgtgtacaagagagaaaatgaagacaaggtgaacaaggccgccaagcacctgaagaccctgcggcacccctgcctgctgcgcttcctgagctgcaccgtggaggctgatggcatccacctggtgacagagcgggtgcagcccctggaggtggccctggagaccctgagcagcgctgaggtgtgtgccggcatctatgacatcctgctggccctgatcttcctgcatgaccggggccacctgacccacaacaacgtgtgcctgagctctgtgtttgtgtctgaagatggccactggaagctgggcggcatggagaccgtgtgcaaggtgtcccaggccaccccagagttcctgcggagcatccagagcatccgggaccctgccagcatccccccagaggagatgagccctgagttcaccaccctgcctgaatgtcatggccacgccagagatgccttctcctttggcaccctggtggagagcctgctgaccatcctgaatgagcaggtgtctgcagatgtgctgagcagcttccagcagaccctgcacagcaccctgctgaaccccatccccaagtgcaggcctgccctgtgcaccctgctgagccatgacttcttcagaaatgacttcctggaggtggtgaacttcctgaagagcctgaccctgaagtctgaggaggagaagacagagttcttcaagttcctgctggacagagtgtcctgcctgtctgaggagctgattgccagccggctggtgcccctgctgctgaaccagctggtgtttgctgagcctgtggccgtgaagagcttcctgccctacctgctgggccccaagaaggaccacgcccagggcgagaccccctgcctgctgagccctgccctcttccagagcagggtcatccctgtgctgctgcagctgtttgaggtgcatgaggagcacgtgaggatggtgctgctgagccacatcgaggcctacgtggagcacttcacccaggagcagctgaagaaggtgatcctgccccaggtgctgctgggcctgcgggacaccagtgacagcatcgtggccatcaccctgcacagcctggccgtgctggtgtccctgctgggccctgaggtggtggtgggcggggagaggaccaagatcttcaagaggacagcccccagcttcaccaagaacacagacctgagcctggagggggaccccttcagccagcccatcaagttccccatcaatggcctgagtgatgtgaagaacaccagcgaggacagcgagaacttccccagcagcagcaagaagtctgaggagtggccagactggagcgagcctgaggagcctgagaaccagacagtgaacatccagatctggccccgggagccctgtgatgatgtgaagagccagtgcaccaccctggatgtggaggagagctcctgggatgactgtgagcccagcagcctggacaccaaggtgaaccctgggggcggcatcacagccaccaagcctgtgaccagcggggagcagaagcccatcccagccctgctgagcctgacagaggagagcatgccctggaagagcagcctgccccagaagatcagcctggtgcagagaggagatgatgctgaccagatcgagccccccaaggtgagcagctag

SEQ ID NO: 204335 - DNA, 2067 bp, Artificial Sequence
  derived and/or modified sequence
atgggcagcgagaacagcgccctgaagagctacaccctgcgggagcccccatttacgctccccagcgggctagctgtgtaccctgcagtgctgcaggatggaaaatttgccagtgtctttgtttataagcgggagaacgaagacaaggtcaacaaagcagcaaaacatttaaaaaccctgagacacccatgcctgttacgctttttgagctgtacagtggaagcagacgggattcacctggttacggaaagggtccaacccctcgaggtggcacttgagacactttcttctgcagaagtttgcgccggaatttacgatatccttctagctctgatttttctgcatgaccgcgggcacctgacacataacaatgtgtgtttgtccagcgtgtttgtgagtgaagacgggcactggaagctgggagggatggaaactgtctgcaaggttagtcaggctacgcccgagtttttgagatctatccagagcatcagagacccagcgagtataccaccggaggaaatgagcccggagttcactacactacccgaatgtcatggacatgctagggacgcattctcctttggaaccctcgtcgaaagcttgttaactattctgaatgagcaggtatctgccgacgttctgtcctccttccagcaaactttgcactccactcttctgaatcctattcctaaatgtcgccctgccttgtgcactttattgagccacgattttttccggaatgacttcttagaagtggtgaacttcctcaagtctctgacactcaagtccgaagaggagaagacagaattctttaagtttcttctcgaccgtgtaagttgcttgagcgaggagctgatcgcttcaagattggtacctctgctgctgaaccagctggtgttcgcggagcccgttgcggtcaaatctttcctgccgtacttgctcggccccaaaaaagatcatgcccaaggagagactccttgtctgttgagccccgccctcttccagtcacgggtgattcccgttcttctgcagctgtttgaggttcacgaagagcacgtacgcatggtgttgctgagtcacatcgaagcctatgtggagcacttcactcaagaacagctcaaaaaagtcatcctgcctcaggtgcttcttgggctgcgcgatacaagtgactctattgtggcaattacactccacagcctagctgtgttagtgtccctgctgggccctgaagtggtcgtgggaggcgaaagaaccaagatctttaagaggactgccccctccttcacaaagaacaccgacctgagcctggaaggcgacccctttagccaacctatcaagtttcccatcaacggtctgtctgatgtcaagaatacaagtgaggacagcgaaaacttcccatcgtcatccaagaagtctgaggagtggccagattggagcgagcctgaggaacccgagaaccagacagttaacatccagatatggccgagggaaccctgcgatgatgtgaaatcacagtgtaccacactggacgtggaagagagtagttgggacgactgcgagccttcatcccttgatacaaaggtaaacccaggaggagggatcactgccactaagcccgtcacctctggggagcaaaaacccatcccggctctcctgagtctaacggaggagagtatgccttggaaatcaagtctccctcaaaagattagcctggtgcagcggggcgacgacgcagaccagatcgagccccccaaagtttctagtcaggaacgcccactcaaagtgcctagcgagctcggccttggagaggagtttacaatacaggttaagaagaagcctgtcaaggatccggagatggattggttcgccgacatgatccctgaaatcaaaccaagtgccgcgttcctcatcttgcccgaactcaggacggaaatggtgcccaagaaggatgacgtgagtcccgtgatgcagttctcctcaaaatttgccgccgcagaaatcaccgagggggaggcagagggctgggaggaagaaggggaattgaactgggaagacaacaattggtag

SEQ ID NO: 204336 - DNA, 1767 bp, Artificial Sequence
  derived and/or modified sequence
atgggcagcgagaacagcgccctgaagagctacaccctgcgggagccgccattcaccctgcctagcggtctcgctgtgtatcctgccgtcttacaagacggaaagtttgcctcagtatttgtttataaaagggagaatgaggacaaagttaacaaagcagcaaagcacctaaaaacactgcgccacccgtgcctcctgcggtttctctcctgcacggtcgaggccgatggcatacatctggtaaccgagcgcgtgcagcctcttgaagtggctttggagactttatcatctgcggaagtgtgcgctgggatctacgatatacttctggctctcatatttcttcacgatagaggccatttaacgcacaataacgtttgcctgtccagtgtgtttgtctcggaggacgggcattggaaattgggcggtatggagaccgtgtgcaaggtgagccaggccacccccgaattcctgcggagtattcagagcatccgagatccggccagtatccctcctgaggaaatgtcacctgaattcactacactgcctgagtgccacggccacgcaagagacgcgttctctttcggaacgctggtggagtccctgctgactatcctaaacgagcaagtctccgctgacgtgttgagctcttttcagcagaccttgcattcaactctgctaaatccgattccaaaatgtaggcctgccctctgcacactgctgtctcacgattttttccgtaacgatttcctagaagttgtgaattttctgaagagtctaactctgaagtcagaggaggaaaaaaccgagtttttcaagttcctgctagatagagtgagttgtctatctgaagagcttatcgcctcaagactggtgcctctcctattgaaccaactggtctttgccgagcccgtggctgttaagtcttttctgccgtacctcttggggcctaagaaagatcacgcccaaggtgagacaccctgtctgctgtctccagccctgtttcagtctcgggtaattcccgtgctcctgcagttgtttgaagtgcatgaagagcatgttcggatggttctgctgtcacacatcgaggcctatgtggaacacttcacacaagaacagttaaagaaggttatcctgccacaagttctgctgggcttgcgggatacctcggactcgattgttgccataaccctacacagtcttgcagtcctagtttccctcctgggtcccgaggtcgttgtgggtggcgaaagaacaaaaatctttaaacggaccgccccatccttcactaagaatacagatctgtcattggaaggcgacccattctctcaacctattaaattccccattaacggcctgagcgacgtaaagaacacttccgaggactcggaaaatttccctagttcctccaagaagagcgaagagtggccagactggtcagaaccagaagaaccagagaatcagaccgttaacatacagatctggccaagagagccatgcgatgacgtgaagtctcagtgcaccacgctcgatgtcgaggagtcctcttgggacgactgcgaacctagcagcttagacaccaaggtgaaccccggtggtggcattactgccacaaagccagtgacctccggcgaacaaaagcccatccccgcgctcttgtcacttaccgaagagtcaatgccctggaaaagctcccttccacagaagatctccctggtgcagcgcggagacgatgcagatcagatcgagccacctaaagtgtctagctag

SEQ ID NO: 204337 - DNA, 2067 bp, Artificial Sequence
  derived and/or modified sequence
atgggctctgagaatagcgccctgaaatcatatactctcagagagccccctttcaccctgccttcggggttagctgtctacccagcggtgctccaggacggtaaattcgcttctgtgttcgtttacaaaagggaaaacgaagacaaagtaaataaagcagctaagcaccttaagaccctcaggcacccttgtctgttgcgcttcttgtcctgtaccgtggaggccgacggcatccacctggtgactgagcgcgtgcagcctcttgaggtcgcgttagagaccctgagtagcgccgaggtgtgtgccggaatttacgacatactgttggccctcatatttctgcacgatagagggcacctgacccataacaatgtatgtctgagcagcgtcttcgtttctgaggacggccattggaaacttggcggtatggagactgtgtgtaaggtctcacaagccacacccgagtttctcaggtccattcagagcattcgcgacccagcatcaatcccccctgaggaaatgagcccagaattcacaaccctgcccgagtgtcatggacatgccagagatgccttttctttcgggactctagttgaaagcttgctaaccattctaaacgagcaagtgtccgcggatgtgctttcctcctttcagcagaccctgcacagtacactcctgaaccccatccccaaatgccggcctgccctctgcaccttactaagccacgacttttttcggaacgactttttagaagtggtgaactttctgaaaagcctgactcttaagagcgaggaagagaagacagaattctttaaattcttgctggatcgcgtttcctgtctgtctgaggagctgattgcgtcaaggctggttcccttgctgctgaatcaactagtatttgcggagccagtggcagtgaagtccttcttgccttatctgctggggccaaagaaagatcacgcgcaaggggaaactccgtgtctcctctcacccgcactgttccagagtcgcgttattcctgtgcttctgcaactcttcgaagtgcatgaggagcatgtacggatggtgctactatcacacatcgaagcctatgtagagcattttacccaggaacagctcaaaaaggtgatacttccacaggtgctgcttgggctcagagacacctccgattccattgtagctatcacccttcacagccttgcagtccttgtgtctctgctgggaccagaagtggtggtcggtggagagcgtactaagattttcaaaaggaccgctcctagcttcactaaaaacactgacttgtctctggagggcgatcctttctcacaacccatcaagtttcccattaatggtctcagtgacgttaaaaacacctctgaagacagcgagaactttccttcatcttcgaagaagagtgaggaatggccggactggtccgagcctgaggaaccagagaatcagaccgtgaatattcagatctggccacgggagccctgtgacgacgtgaaatcccaatgtacaaccctagacgtagaggaaagttcttgggacgactgcgagccctcctccctggacaccaaggtcaacccagggggtggtatcacagccaccaagccagtgacctcgggtgagcagaaaccaattcccgcattgctctcactgaccgaggaatcaatgccatggaagagttcccttccccagaaaatttccctggtacagaggggcgacgatgcagaccagattgagcccccaaaagtctcgtcccaggaaagacccctcaaagtgccatctgagctgggtctgggggaagagttcacaatacaggttaagaaaaagcccgtaaaagatcccgagatggactggttcgcggacatgatacccgagattaagccatccgccgcatttctgatattgccggagctgagaactgaaatggtccctaagaaagacgatgtctctccagttatgcagttctccagcaagtttgccgctgctgaaatcactgaaggagaggccgagggatgggaagaagaaggcgaattgaattgggaagacaacaactggtag

SEQ ID NO: 204338 - DNA, 1767 bp, Artificial Sequence
  derived and/or modified sequence
atgggttccgagaacagtgcccttaaaagttatacactgcgcgaacccccttttactttaccgagcgggctggcagtatatcctgccgtgcttcaggacggaaaatttgcttctgttttcgtgtataagagggagaatgaggacaaggtgaacaaagccgcaaagcacctaaagaccctgcgccatccttgtttgctgcggtttcttagttgcactgtcgaggccgacggcattcacttggtgacggagcgggtgcagcccctcgaggtagccctggagactctgagcagcgccgaggtctgtgcgggaatttatgacatcctgctggcactgatcttcctgcacgacaggggacacctcacccataataatgtttgtctgagctctgtcttcgtgtcagaggatggacactggaaactgggcggaatggaaacagtgtgcaaggtgagccaggctacacccgaattcctgcggagtattcagtccataagggatccagcgtccattccccctgaggagatgagccccgagtttactactcttccagagtgtcatggccacgcaagagatgcctttagttttggcactctggttgagagcctgctaactattctcaatgaacaggtgtctgccgatgtgctgagtagcttccagcagactctgcattcaaccctcctcaatccaattccaaaatgccggccagccctttgcactttactgagccacgacttcttcagaaacgactttttggaagtggtgaatttccttaaatctttaactctcaagtctgaagaagagaagactgagtttttcaagtttctactggatagggtttcgtgcctgtctgaggagctgatcgcctccagactcgtgcccctccttctgaatcagctggtttttgccgaaccggtggccgtcaagagttttttgccatatctcctgggacccaaaaaggatcacgcacaaggcgagaccccgtgtctgttgagtcctgccctcttccagagtagggtcattcccgtccttctccagcttttcgaggttcatgaagaacacgtgagaatggtactgctctcacatatcgaggcttacgtcgagcattttacccaggagcagctcaaaaaggtcatacttccccaggtgctgctgggcctccgcgacaccagtgatagcatagtcgccatcacgctacattcgctagccgtgctcgtgtccctgctgggacccgaggttgtcgtggggggagagaggactaagattttcaagaggacagcgccatcttttacaaaaaataccgatctgagtctcgaaggcgacccattcagccagcccattaaatttcctatcaacggcctgagcgatgtgaaaaacaccagcgaagactcagaaaacttcccatctagcagcaagaagtctgaggagtggcctgactggagcgaacctgaagagcccgagaatcaaacagtcaatattcagatctggccacgggaaccttgcgatgatgtcaagagccagtgcacaacccttgacgtcgaggaatcgtcatgggacgactgtgagccaagctctcttgacacaaaagtcaatcctggcggaggaattacggctaccaaacccgttacttcaggcgaacagaaaccgattcccgcattgctgagcctgaccgaagaaagcatgccatggaagtcctctctgcctcagaagatcagtctggtgcagcgaggcgacgacgccgatcagattgagcctccaaaagtgagcagttag

SEQ ID NO: 204339 - DNA, 2921 bp, Artificial Sequence
  derived and/or modified sequence
tttccggacccgtctctatggtgtaggagaaacccggcccccagaagattgtgggtgtagtggccacagccttacaggcaggcaggggtggttggtgtcaacaggggggccaacagggtaccagagccaagaccctcggcctcctcccccgccgccttcctgcagatctgcttggctttgaggaagagtggcagtactgcctcactgcataagggatgggatcagagaacagtgctttaaagagctatacactgagagaaccaccatttaccttaccctctggacttgctgtttatcccgctgtactgcaagatggcaaatttgcttcagtttttgtgtataagagagaaaatgaagacaaggttaataaagctgccaagcatttgaagacacttcgtcacccttgcttgctaagatttttatcttgtactgtggaagcggatggcattcatcttgtcactgagcgagtacagcccctggaagtggctttggaaacattgtcttctgcagaggtctgtgctgggatctatgacatattgctggctcttatcttccttcatgacagaggacacctaacacacaataatgtctgtttatcatctgtgtttgtgagtgaagatggacactggaagctaggaggaatggaaactgtttgtaaagtttctcaggccacaccagagtttctgaggagtattcagtcaataagagacccagcatctatccctcctgaagagatgtctccagaattcacaactctcccagagtgtcatggacatgcccgggatgccttttcatttggaacattggtggaaagtttgctcacaatcttaaatgaacaggtttcagcggatgttctctccagctttcaacagaccttgcactcaactttgctgaatcccattccaaaatgtcggccagcgctctgcaccttactatctcatgacttcttcagaaatgattttctggaagttgtgaatttcttgaaaagtttaacattgaagagtgaagaggagaaaacggaattctttaaatttctgctggacagagtcagctgcttgtcagaggaattgatagcttcaaggttggtgcctcttctgcttaatcagttggtgtttgcagagccagtggctgttaagagttttcttccttatctgcttggccccaaaaaagatcatgcgcagggagaaactccttgcttgctctcaccagccctgttccagtcacgggtgatccccgtgcttctccagttgtttgaagttcatgaagagcatgtgcggatggtgctgctgtctcacatcgaggcctacgtggagcacttcactcaggagcagctgaagaaagtcatcttgccacaggttttgctgggcctgcgtgatactagcgattccattgtggcaattactctgcatagcctagcagtgctggtctctctgcttggaccagaggtggttgtgggaggagaacgaaccaagatcttcaaacgcactgccccaagttttactaaaaatactgacctttctctagaaggcgatccattttctcagcctattaaatttcccataaatggactctcagatgtaaaaaatacttcggaggacagtgaaaacttcccatcaagttctaaaaagtctgaggagtggcctgactggagtgaacctgaggagcctgaaaatcaaactgtcaacatacagatttggcctagagaaccttgtgatgatgtcaagtcccagtgcactaccttggatgtggaagagtcatcttgggatgactgcgagcccagcagcttagatactaaagtaaacccaggaggtggaatcactgctacaaaacctgttacctcaggggagcagaagcctattcctgctttgctttcactcactgaagagtctatgccttggaaatcaagcttaccccaaaagattagccttgtacaaaggggggatgacgcagaccaaatcgagccgccaaaagtgtcatcacaagaaaggccccttaaggttccatcagaacttggtttaggagaggaattcaccattcaagtaaaaaagaagccagtaaaagatcctgagatggattggtttgctgatatgatcccagaaattaagccttctgctgcttttcttatattacctgaactgaggacagaaatggtcccaaaaaaggatgatgtctccccagtgatgcagttttcctcaaaatttgctgcagcagaaattactgagggagaggctgaaggctgggaagaagaaggggagctgaactgggaagataataactggtgacaatagatgtgagttaaactttaggaaaaaggattccctttttttaaaaaaaatcaatacctcaaaagcaggctttgggacaagaaaaccccaaagtggcctgcttttcccatcccaggagctcattatccagtctgtgccaactgaagtaggagactgactgtgagtgctggctaaaagccctgggtggtgaggctcacagtactggtttccaggaggaagagcctttgtgcatttgactgaggccagtttctatgaagagcaagtagctgaggagaggtcgaatttactgctttttccaggacaattctggaagtaaagaaaatgtaattcaagctggttagcttaattttgtgccattctttaacataagagtaagctctattatgaaatacaactttaaaaaattttagctataaattatataaatgattttaaattgctgaggtttccttaggcagcttatttatttgtttacagttagactatctgagtaaatggttctttgtggacctaggcagttcctgactgttccacatgtagtacattgtaccaaagttcttaataagaatattccccacaatcctgttctctaaatgtcaaataaagattattttcactagattcaactttacaaaa

SEQ ID NO: 204340 - DNA, 2077 bp, Artificial Sequence
  derived and/or modified sequence
gcacctctactgtttgctacaagtggccagcagccattttggatttgggcggaaatgaaattaaaactgtgctgttaaaagcctaaaaattcaagtcaagacaaacttaagcattcgaccaacacatctagaaagggggcatcttcgtggactaactagaccactggggcagtgagtgaaactcggtatcgtcgcggcgcccacacttaagatggcaccggcctgagactcagctgtgcggcctctctacctcggttcctgatctgcttggctttgaggaagagtggcagtactgcctcactgcataagggatgggatcagagaacagtgctttaaagagctatacactgagagaaccaccatttaccttaccctctggacttgctgtttatcccgctgtactgcaagatggcaaatttgcttcagtttttgtgtataagagagaaaatgaagacaaggttaataaagctgccaagcatttgaagacacttcgtcacccttgcttgctaagatttttatcttgtactgtggaagcggatggcattcatcttgtcactgagcgagtacagcccctggaagtggctttggaaacattgtcttctgcagaggtctgtgctgggatctatgacatattgctggctcttatcttccttcatgacagaggacacctaacacacaataatgtctgtttatcatctgtgtttgtgagtgaagatggacactggaagctaggaggaatggaaactgtttgtaaagtttctcaggccacaccagagtttctgaggagtattcagtcaataagagacccagcatctatccctcctgaagagatgtctccagaattcacaactctcccagagtgtcatggacatgcccgggatgccttttcatttggaacattggtggaaagtttgctcacaatcttaaatgaacaggtttcagcggatgttctctccagctttcaacagaccttgcactcaactttgctgaatcccattccaaaatgtcggccagcgctctgcaccttactatctcatgacttcttcagaaatgattttctggaagttgtgaatttcttgaaaagtttaacattgaagagtgaagaggagaaaacggaattctttaaatttctgctggacagagtcagctgcttgtcagaggaattgatagcttcaaggttggtgcctcttctgcttaatcagttggtgtttgcagagccagtggctgttaagagttttcttccttatctgcttggccccaaaaaagatcatgcgcagggagaaactccttgcttgctctcaccagccctgttccagtcacgggtgatccccgtgcttctccagttgtttgaagttcatgaagagcatgtgcggatggtgctgctgtctcacatcgaggcctacgtggagcacttcactcaggagcagctgaagaaagtcatcttgccacaggttttgctgggcctgcgtgatactagcgattccattgtggcaattactctgcatagcctagcagtgctggtctctctgcttggaccagaggtggttgtgggaggagaacgaaccaagatcttcaaacgcactgccccaagttttactaaaaatactgacctttctctagaaggcgatccattttctcagcctattaaatttcccataaatggactctcagatgtaaaaaatacttcggaggacagtgaaaacttcccatcaagttctaaaaagtctgaggagtggcctgactggagtgaacctgaggagcctgaaaatcaaactgtcaacatacagatttggcctagagaaccttgtgatgatgtcaagtcccagtgcactaccttggatgtggaagagtcatcttgggatgactgcgagcccagcagcttagatactaaagtaaacccaggaggtggaatcactgctacaaaacctgttacctcaggggagcagaagcctattcctgctttgctttcactcactgaagagtctatgccttggaaatcaagcttaccccaaaagattagccttgtacaaaggggggatgacgcagaccaaatcgagccgccaaaagtgtcatcaca

SEQ ID NO: 204341 - protein, 103 aa, Artificial Sequence
  derived and/or modified sequence
MASRWAVQLLLVAAWSMGCGEALKCYTCKEPMTSASCRTITRCKPEDTACMTTLVTVEAEYPFNQSPVVTRSCSSSCVATDPDSIGAAHLIFCCFRDLCNSEL

SEQ ID NO: 204342 - DNA, 312 bp, Artificial Sequence
  derived and/or modified sequence
atggccagtaggtgggccgtgcaattgctactggtagcggcatggtcaatggggtgtggcgaagcgctgaaatgttacacttgcaaagagccaatgacttccgccagttgtaggacgattacgcgctgcaagcccgaggacacagcctgcatgactacgctggttaccgtggaagccgaataccccttcaatcagagcccagtggttacacggagctgttccagctcatgtgtggctacggacccagacagtattggggcagcgcacctgatcttttgctgcttcagggatctgtgcaacagcgagctgtag

SEQ ID NO: 204343 - DNA, 312 bp, Artificial Sequence
  derived and/or modified sequence
atggccagccgctgggccgtgcagctgctgctggtggccgcctggagcatgggctgtggggaggccctgaagtgctacacctgcaaggagcccatgaccagcgccagctgcaggaccatcacccgctgcaagccagaggacacagcctgcatgaccaccctggtgacagtggaggccgagtaccccttcaaccagagccctgtggtgaccaggagctgcagcagcagctgtgtggccacagatcctgacagcattggagctgcccacctgatcttctgctgcttccgggacctgtgcaacagcgagctgtag

SEQ ID NO: 204344 - DNA, 312 bp, Artificial Sequence
  derived and/or modified sequence
atggccagccggtgggccgtgcagctgctgctggtggccgcctggtccatgggatgcggcgaagccctgaaatgttatacctgcaaagaaccaatgaccagtgcatcctgccgcacaatcacacgatgcaagcctgaagacacagcttgcatgacaactctcgtaacagtcgaagctgagtaccccttcaaccagtcaccagtggtcactagatcctgctcttcctcatgtgtagctaccgaccccgattccatcggggctgcccacctgatattttgttgctttcgggatctgtgtaattccgaactatag

SEQ ID NO: 204345 - DNA, 312 bp, Artificial Sequence
  derived and/or modified sequence
atggccagtagatgggctgtgcagctgttgctagttgcagcctggagtatgggttgcggagaggcacttaagtgttatacttgcaaggagcccatgacctctgcttcttgcagaaccattactagatgcaaacccgaggatacagcttgtatgacaactcttgttactgttgaggcagaatatcccttcaaccagagcccagtcgtaaccagaagttgctccagtagttgtgtggcaactgatcccgactctatcggtgccgctcacctgattttctgttgtttcagagatctgtgtaactctgagctttag

SEQ ID NO: 204346 - DNA, 537 bp, Artificial Sequence
  derived and/or modified sequence
ctctcatcacttctgagcacggagcaatggcctctcgctgggctgtgcagctgctgctcgtggcagcctggagcatgggctgtggtgaggccctcaagtgctacacctgcaaggagcccatgaccagtgcttcctgcaggaccattacccgctgcaagccagaggacacagcctgcatgaccacgctggtgacggtggaggcagagtaccccttcaaccagagccccgtggtgacccgctcctgctccagctcctgtgtggccaccgaccccgacagcatcggggccgcccacctgatcttctgctgcttccgagacctctgcaactcggaactctgaacccagggcggcagggcggaaggtgctcctcaggcacctcctctctgacggggcctggctccacctgtgatcacctccccctgcttcctgctgctgtggcacagctcactcatggggtctgaggggagagaagcacaccaggggcgccctctgccttccataccccacgcttataaaacataactaagccaagagtgga

SEQ ID NO: 204347 - DNA, 312 bp, Artificial Sequence
  derived and/or modified sequence
atggccagcagatgggccgtgcagctgctgctggtggccgcctggagcatgggctgcggcgaggccctgaagtgctacacctgcaaggagcccatgaccagcgccagctgcagaaccatcaccagatgcaagcccgaggacaccgcctgcatgaccaccctggtgaccgtggaggccgagtaccccttcaaccagagccccgtggtgaccagaagctgcagcagcagctgcgtggccaccgaccccgacagcatcggcgccgcccacctgatcttctgctgcttcagagacctgtgcaacagcgagctgtag

SEQ ID NO: 204348 - protein, 706 aa, Artificial Sequence
  derived and/or modified sequence
MGDERPHYYGKHGTPQKYDPTFKGPIYNRGCTDIICCVFLLLAIVGYVAVGIIAWTHGDPRKVIYPTDSRGEFCGQKGTKNENKPYLFYFNIVKCASPLVLLEFQCPTPQICVEKCPDRYLTYLNARSSRDFEYYKQFCVPGFKNNKGVAEVLQDGDCPAVLIPSKPLARRCFPAIHAYKGVLMVGNETTYEDGHGSRKNITDLVEGAKKANGVLEARQLAMRIFEDYTVSWYWIIIGLVIAMAMSLLFIILLRFLAGIMVWVMIIMVILVLGYGIFHCYMEYSRLRGEAGSDVSLVDLGFQTDFRVYLHLRQTWLAFMIILSILEVIIILLLIFLRKRILIAIALIKEASRAVGYVMCSLLYPLVTFFLLCLCIAYWASTAVFLSTSNEAVYKIFDDSPCPFTAKTCNPETFPSSNESRQCPNARCQFAFYGGESGYHRALLGLQIFNAFMFFWLANFVLALGQVTLAGAFASYYWALRKPDDLPAFPLFSAFGRALRYHTGSLAFGALILAIVQIIRVILEYLDQRLKAAENKFAKCLMTCLKCCFWCLEKFIKFLNRNAYIMIAIYGTNFCTSARNAFFLLMRNIIRVAVLDKVTDFLFLLGKLLIVGSVGILAFFFFTHRIRIVQDTAPPLNYYWVPILTVIVGSYLIAHGFFSVYGMCVDTLFLCFLEDLERNDGSAERPYFMSSTLKKLLNKTNKKAAES

SEQ ID NO: 204349 - DNA, 2121 bp, Artificial Sequence
  derived and/or modified sequence
atgggcgacgagagaccccactactacggcaagcacggcaccccccagaagtacgaccccaccttcaagggccccatctacaacagaggctgcaccgacatcatctgctgcgtgttcctgctgctggccatcgtgggctacgtggccgtgggcatcatcgcctggacccacggcgaccccagaaaggtgatctaccccaccgacagcagaggcgagttctgcggccagaagggcaccaagaacgagaacaagccctacctgttctacttcaacatcgtgaagtgcgccagccccctggtgctgctggagttccagtgccccaccccccagatctgcgtggagaagtgccccgacagatacctgacctacctgaacgccagaagcagcagagacttcgagtactacaagcagttctgcgtgcccggcttcaagaacaacaagggcgtggccgaggtgctgcaggacggcgactgccccgccgtgctgatccccagcaagcccctggccagaagatgcttccccgccatccacgcctacaagggcgtgctgatggtgggcaacgagaccacctacgaggacggccacggcagcagaaagaacatcaccgacctggtggagggcgccaagaaggccaacggcgtgctggaggccagacagctggccatgagaatcttcgaggactacaccgtgagctggtactggatcatcatcggcctggtgatcgccatggccatgagcctgctgttcatcatcctgctgagattcctggccggcatcatggtgtgggtgatgatcatcatggtgatcctggtgctgggctacggcatcttccactgctacatggagtacagcagactgagaggcgaggccggcagcgacgtgagcctggtggacctgggcttccagaccgacttcagagtgtacctgcacctgagacagacctggctggccttcatgatcatcctgagcatcctggaggtgatcatcatcctgctgctgatcttcctgagaaagagaatcctgatcgccatcgccctgatcaaggaggccagcagagccgtgggctacgtgatgtgcagcctgctgtaccccctggtgaccttcttcctgctgtgcctgtgcatcgcctactgggccagcaccgccgtgttcctgagcaccagcaacgaggccgtgtacaagatcttcgacgacagcccctgccccttcaccgccaagacctgcaaccccgagaccttccccagcagcaacgagagcagacagtgccccaacgccagatgccagttcgccttctacggcggcgagagcggctaccacagagccctgctgggcctgcagatcttcaacgccttcatgttcttctggctggccaacttcgtgctggccctgggccaggtgaccctggccggcgccttcgccagctactactgggccctgagaaagcccgacgacctgcccgccttccccctgttcagcgccttcggcagagccctgagataccacaccggcagcctggccttcggcgccctgatcctggccatcgtgcagatcatcagagtgatcctggagtacctggaccagagactgaaggccgccgagaacaagttcgccaagtgcctgatgacctgcctgaagtgctgcttctggtgcctggagaagttcatcaagttcctgaacagaaacgcctacatcatgatcgccatctacggcaccaacttctgcaccagcgccagaaacgccttcttcctgctgatgagaaacatcatcagagtggccgtgctggacaaggtgaccgacttcctgttcctgctgggcaagctgctgatcgtgggcagcgtgggcatcctggccttcttcttcttcacccacagaatcagaatcgtgcaggacaccgccccccccctgaactactactgggtgcccatcctgaccgtgatcgtgggcagctacctgatcgcccacggcttcttcagcgtgtacggcatgtgcgtggacaccctgttcctgtgcttcctggaggacctggagagaaacgacggcagcgccgagagaccctacttcatgagcagcaccctgaagaagctgctgaacaagaccaacaagaaggccgccgagagctag

SEQ ID NO: 204350 - DNA, 2121 bp, Artificial Sequence
  derived and/or modified sequence
atgggcgacgagaggccccattactatggtaagcacgggacaccccagaagtacgacccgaccttcaagggccctatctacaatcggggatgcaccgacataatctgttgcgtgttcttgttgctagccatagtgggctacgtggcagtaggcatcatagcttggacgcatggcgatccgagaaaggtgatttatccaactgactcaagaggcgagttttgcgggcagaagggcacaaaaaatgaaaataagccttatctgttttactttaacatagtgaagtgtgcttcacccctggtgctgctcgagtttcagtgccctaccccccaaatctgcgtagaaaaatgcccagacaggtacctcacctatcttaacgcccgtagttcccgcgattttgagtattacaagcaattctgtgtgccaggttttaagaataataagggcgtagcagaggtcctgcaagacggagattgtcctgccgtgcttatcccctccaagccgcttgcaagaaggtgttttcccgccatccacgcatacaagggtgtgctgatggtgggcaatgagacaacctacgaagatggccacgggtcccgcaagaatatcaccgacctggtcgagggagccaaaaaagcgaatggggtcctcgaggcgcgccagctggcaatgcgaattttcgaagattacacggtgagctggtattggattattatcggccttgtcattgcgatggccatgtcactgctctttataattctgcttcgattcctggcaggcattatggtctgggtgatgattatcatggtgatcttggtgctaggctatgggatctttcactgctatatggagtacagcagacttcggggagaagccggctcagacgtgtccctggtggacctgggctttcagacagacttcagagtgtatcttcatctgcggcagacatggctcgcatttatgatcattctctcaattctggaagtcatcatcatactccttttgatttttctgcgcaagagaatcctaatcgctattgcacttatcaaggaggcctctcgcgctgttggttatgtgatgtgcagcctgctttatccccttgtgacttttttcctcctgtgtctttgtatcgcttactgggcatccactgccgtctttctcagcacatctaacgaagctgtgtataaaatcttcgatgatagcccttgtccattcactgcaaaaacatgtaatcctgagacatttcctagtagtaacgaatcaaggcaatgccctaacgcacgctgtcagtttgccttctatgggggcgaaagcggttaccatagggccctgctcggtctgcagatcttcaacgctttcatgttcttttggctggccaacttcgtgctagccctagggcaagtgaccctggccggagctttcgcgagctattactgggccttgaggaagcctgacgatctgcctgccttcccgcttttctcagcgttcggacgtgcacttcgatatcataccgggtctctggcgtttggcgctctgatactggctatcgtccaaataattcgagtgatccttgaatatctggatcagcgcttgaaagcagcggagaacaaattcgccaagtgcctgatgacttgcctcaaatgttgtttctggtgcctggagaaatttattaaatttctgaaccgaaacgcatacataatgatcgccatttacggcaccaatttctgcacctcggccaggaacgctttttttctgcttatgaggaatataataagagtcgcagttttggacaaagtcactgacttccttttccttctcggtaaactgctcatcgttggctccgtcgggattctggcttttttcttttttacacaccgcatacgcatcgtacaggataccgcccccccactcaattattactgggttcctatcttgactgttatcgtgggcagctacctaatagcccacggatttttctctgtctacggtatgtgcgtcgacactcttttcctctgctttctggaagatttggaaagaaacgatggctcggcagagcgcccttactttatgtctagcactttgaagaagctcctgaacaagacaaacaaaaaggccgctgagagttag

SEQ ID NO: 204351 - DNA, 2121 bp, Artificial Sequence
  derived and/or modified sequence
atgggagatgagcggccccactactacggcaagcacggcaccccccagaagtatgaccccaccttcaagggccccatctacaacagaggctgcacagacatcatctgctgcgtgttcctgctgctggccatcgtgggctacgtggccgtgggcatcatcgcctggacccatggagaccccaggaaggtgatctaccccacagacagcagaggagagttctgtggccagaagggcaccaagaatgaaaacaagccctacctgttctacttcaacatcgtgaagtgtgccagccccctggtgctgctggagttccagtgccccaccccccagatctgtgtggagaagtgcccagaccgctacctgacctacctgaatgcccggagcagccgggactttgagtactacaagcagttctgtgtgcccggcttcaagaacaacaagggcgtggccgaggtgctgcaggatggagactgcccagctgtgctgatccccagcaagcccctggcccggcgctgcttccctgccatccacgcctacaagggcgtgctgatggtgggcaatgagaccacctatgaagatggccacggcagcaggaagaacatcacagacctggtggagggcgccaagaaggccaacggggtgctggaggcccggcagctggccatgaggatctttgaggactacacagtgtcctggtactggatcatcatcggcctggtgattgccatggccatgagcctgctcttcatcatcctgctgcgcttcctggccggcatcatggtgtgggtgatgatcatcatggtgatcctggtgctgggctacggcatcttccactgctacatggagtacagccggctgcggggggaggccggcagtgatgtgtccctggtggacctgggcttccagacagacttccgggtgtacctgcacctgcggcagacctggctggccttcatgatcatcctgagcatcctggaggtgatcatcatcctgctgctgatcttcctgaggaagaggatcctgattgccatcgccctgatcaaggaggccagcagagctgtgggctacgtgatgtgcagcctgctgtaccccctggtgaccttcttcctgctgtgcctgtgcatcgcctactgggccagcacagctgtgttcctgagcaccagcaatgaagctgtgtacaagatctttgatgacagcccctgccccttcaccgccaagacctgcaaccctgagaccttccccagcagcaatgaaagccggcagtgccccaatgcccgctgccagtttgccttctacggcggggagagcggctaccaccgggccctgctgggcctgcagatcttcaatgccttcatgttcttctggctggccaactttgtgctggccctgggccaggtgaccctggccggggcctttgccagctactactgggccctgaggaagccagatgacctgcctgccttccccctcttcagcgccttcggccgggccctgcgctaccacacaggcagcctggcctttggagccctgatcctggccatcgtgcagatcatccgggtcatcctggagtacctggaccagaggctgaaggctgctgagaacaagtttgccaagtgcctgatgacctgcctgaagtgctgcttctggtgcctggagaagttcatcaagttcctgaacagaaatgcctacatcatgattgccatctacggcaccaacttctgcaccagcgccagaaatgccttcttcctgctgatgaggaacatcatccgggtggccgtgctggacaaggtgacagacttcctgttcctgctgggcaagctgctgattgtgggctctgtgggcatcctggccttcttcttcttcacccaccgcatcagaattgtgcaggacacagccccacccctgaactactactgggtgcccatcctgaccgtcatcgtgggcagctacctgattgcccacggcttcttctctgtgtatggcatgtgtgtggacaccctcttcctgtgcttcctggaggacctggagagaaatgatggcagcgctgagcggccctacttcatgagcagcaccctgaagaagctgctgaacaagaccaacaagaaggctgctgagagctag

SEQ ID NO: 204352 - DNA, 2121 bp, Artificial Sequence
  derived and/or modified sequence
atgggcgacgagcggccccactactacggcaagcacggcaccccccaaaagtatgacccgacctttaagggccccatctataataggggctgtacggacattatctgttgtgtcttcctcctgctggccattgtgggctacgttgcggtgggtatcatcgcctggacccacggagacccacgaaaagtcatttatccaactgactccaggggtgaattctgtggacagaagggaactaaaaatgagaacaagccctatcttttttactttaacatagtgaagtgtgcgtcacccctggtgcttctggaatttcagtgccctacccctcagatctgcgttgagaaatgtcccgatcggtacctcacttacctgaatgctaggtcaagccgagatttcgaatactacaaacaattctgtgtgccaggtttcaagaataataagggggtggccgaagtgcttcaggatggagactgccccgccgttttgattccttcgaagccattggccaggagatgcttccctgccatccacgcatataagggagtgctgatggtggggaatgaaacgacttacgaggacggccatggctctcgcaagaatattacggacctggtggagggcgcaaagaaggccaacggtgtccttgaggcccgccagctcgctatgcgcatttttgaagactacaccgtgtcttggtactggattattatcggcctggtcattgccatggctatgtcgctcttattcatcattctcctgcggttccttgccggtatcatggtatgggtgatgatcattatggttattctggtgctgggatatggtatattccattgttatatggagtactcgaggttgcgaggggaggccggcagcgacgtctccttggtggacctcggctttcagaccgatttcagggtgtatctacatctgcgccagacttggttggcattcatgatcatcctgtctatccttgaagtcattatcattcttctcctgatttttctgagaaaacgtattctgatagcaatcgctctgattaaggaggcctcgcgagctgttgggtatgtcatgtgttcgcttttgtatcctctggtgacgttcttcctgctgtgcctgtgcatcgcgtattgggcctctacggctgtcttcctgagtacctccaatgaagccgtctataagattttcgacgacagtccgtgcccttttacagccaagacatgtaaccccgaaacgttcccttcgtcgaacgaatctcggcagtgccccaacgcccggtgtcagtttgcattctacgggggggagagtgggtatcatcgggctttactcggcctgcagattttcaacgcctttatgttcttctggctggccaattttgtacttgcactggggcaagttacattggccggtgcatttgcctcttattactgggctcttaggaagccagatgatctgccagcctttccattgtttagcgcatttggcagagccttgagatatcacactggatcactggcctttggcgccctgatactagccatcgtccaaattataagggtgatccttgaataccttgatcagagactgaaggcggccgaaaataagtttgcaaaatgtctaatgacctgccttaaatgttgtttttggtgcttagagaagttcatcaagtttctaaaccgaaacgcctacataatgatcgcaatatacggcactaacttttgcaccagcgctaggaacgctttctttctgctcatgcggaatattattcgcgtagccgtgcttgacaaagtgacagactttctcttcctgctgggcaaactgttgattgtagggtcggttggcattctcgcgttctttttttttactcaccgtattcgcatcgtgcaggacactgcaccaccactgaactactactgggttcccatactgacagttattgtaggctcatacctcatcgctcatgggttcttctcggtctacggcatgtgcgtagataccttgtttctgtgcttcttggaagaccttgaaaggaacgacggctctgcagagaggccatacttcatgagcagcacactgaagaagctcctgaacaagaccaacaaaaaggccgctgaatcttag

SEQ ID NO: 204353 - DNA, 2121 bp, Artificial Sequence
  derived and/or modified sequence
atgggcgatgagcgccctcattattatggaaagcatggaactccccagaagtatgacccaacctttaaggggcctatttacaataggggatgtacagacatcatctgttgtgtattcctactcctggccattgtgggttacgtggccgtggggatcatcgcctggacgcatggcgatcccaggaaggtaatatatcccactgattcccgtggagagttctgcggccaaaaaggcactaagaatgagaataagccttacctgttctattttaacatcgtgaaatgcgcatcacccttggttctgttggaatttcagtgccccacccctcaaatatgcgtggagaaatgtcccgataggtacctgacatacctaaatgctaggtcctcacgggacttcgaatactacaagcagttctgcgttcctggtttcaagaataataagggagttgccgaggttttacaggatggtgattgcccagccgtcttgattccctccaaacctctcgccaggaggtgcttcccggcaattcatgcatataaaggcgtgttgatggtggggaatgagacgacctacgaggatggacatggaagcagaaagaatattaccgacctggtggaaggtgctaagaaggccaatggggttctggaagcaaggcagctagccatgcggattttcgaggattacaccgtaagctggtactggatcatcatagggctggttatcgcgatggctatgagcttgctgtttattattctgctacgatttctggccggaattatggtatgggtgatgatcatcatggtcatcctggttctaggttatggtatttttcattgctatatggagtatagtcgcctgcgcggagaggctgggtcagacgttagtctcgtggacttgggcttccagacagacttcagggtgtacctgcatcttcgccaaacctggctcgcatttatgataatcctgtctatcctggaggttatcataattctacttctaatctttcttcgcaaaaggatacttatagctatagccctcatcaaagaggcaagtagagcagtgggctacgtgatgtgctcgctcctgtacccgctagttacatttttcctgctgtgtctctgcattgcatactgggcgagtacggcagtgttcctgtcaactagtaacgaggccgtgtacaagatctttgacgatagtccatgcccgttcactgcaaaaacttgcaatcctgaaacctttccctccagtaacgagagcagacagtgcccgaatgcccgatgtcagtttgcattttatgggggagaatcaggataccatagagctctcctcggtctccagatcttcaacgcgtttatgttcttttggttggccaactttgtgctggcactggggcaggtgacgctggccggagccttcgccagttactattgggccttgaggaaaccagacgatctgcccgcatttcccctgttctctgcctttggacgtgcgctccgctaccatactgggtccctggcttttggtgcactcatcttggctattgtgcaaatcattcgtgtgattctggagtatctcgaccaacgtctgaaagccgcagagaacaagttcgctaagtgcctcatgacttgtttgaaatgctgtttttggtgcctggagaagttcatcaagtttctgaacaggaatgcgtatattatgatcgcaatctacggaacaaacttttgtacatctgctaggaacgctttttttctgctgatgcgcaacatcatcagggttgctgtgctcgataaggttaccgattttctcttcctgcttggtaagctgcttatcgttggaagtgttggaatccttgcattctttttcttcactcataggatccgtattgtacaggatacggcacctcccttgaactattactgggtgcctattttaaccgtgatcgtcggctcgtacttaatagcccacggcttcttctctgtgtacggtatgtgtgtggatacactgttcctgtgttttctggaggatctggaacgcaatgatggctctgctgagcgcccttattttatgagtagcacgctgaagaagctcctgaacaagacaaataagaaggcagccgagtcgtag

SEQ ID NO: 204354 - DNA, 3434 bp, Artificial Sequence
  derived and/or modified sequence
ggtttgggccgccccgcctggcgctgtgctgggaggagccgccgccagtcgcgcggtcagtgcctccctccagactcgggagggtcgagggggcgcgggagagagcgcgggcggccgccggggctggtcgcctgcagggatgggggacgagcggccccactactacgggaaacacggaacgccacagaagtatgatcccactttcaaaggacccatttacaataggggctgcacggatatcatatgctgtgtgttcctgctcctggccattgtgggctacgtggctgtaggcatcatagcctggactcatggagaccctcgaaaggtgatctaccccactgacagccggggcgagttctgcgggcagaagggcacaaaaaacgagaacaaaccctatctgttttatttcaacattgtgaaatgtgccagccccctggttctgctggaattccaatgtcccactccccagatctgcgtggaaaaatgccccgaccgctacctcacgtacctgaatgctcgcagctcccgggactttgagtactataagcagttctgtgttcctggcttcaagaacaataaaggagtggctgaggtgcttcaagatggtgactgccctgctgtcctcatccccagcaaacccttggcccggagatgcttccccgctatccacgcctacaagggtgtcctgatggtgggcaatgagacgacctatgaggatgggcatggctcccggaaaaacatcacagacctggtggagggcgccaagaaagccaatggagtcctagaggcgcggcaactcgccatgcgcatatttgaagattacaccgtctcttggtactggattatcataggcctggtcattgccatggcgatgagcctcctgttcatcatcctgcttcgcttcctggctggtattatggtctgggtgatgatcatcatggtgattctggtgctgggctacggaatatttcactgctacatggagtactcccgactgcgtggtgaggccggctctgatgtctctttggtggacctcggctttcagacggatttccgggtgtacctgcacttacggcagacctggttggcctttatgatcattctgagtatccttgaagtcattatcatcttgctgctcatctttctccggaagagaattctcatcgcgattgcactcatcaaagaagccagcagggctgtgggatacgtcatgtgctccttgctctacccactggtcaccttcttcttgctgtgcctctgcatcgcctactgggccagcactgctgtcttcctgtccacttccaacgaagcggtctataagatctttgatgacagcccctgcccatttactgcgaaaacctgcaacccagagaccttcccctcctccaatgagtcccgccaatgccccaatgcccgttgccagttcgccttctacggtggtgagtcgggctaccaccgggccctgctgggcctgcagatcttcaatgccttcatgttcttctggttggccaacttcgtgctggcgctgggccaggtcacgctggccggggcctttgcctcctactactgggccctgcgcaagccggacgacctgccggccttcccgctcttctctgcctttggccgggcgctcaggtaccacacaggctccctggcctttggcgcgctcatcctggccattgtgcagatcatccgtgtgatactcgagtacctggatcagcggctgaaagctgcagagaacaagtttgccaagtgcctcatgacctgtctcaaatgctgcttctggtgcctggagaagttcatcaaattccttaataggaatgcctacatcatgattgccatctacggcaccaatttctgcacctcggccaggaatgccttcttcctgctcatgagaaacatcatcagagtggctgtcctggataaagttactgacttcctcttcctgttgggcaaacttctgatcgttggtagtgtggggatcctggctttcttcttcttcacccaccgtatcaggatcgtgcaggatacagcaccacccctcaattattactgggttcctatactgacggtgatcgttggctcctacttgattgcacacggtttcttcagcgtctatggcatgtgtgtggacacgctgttcctctgcttcttggaggacctggagaggaatgacggctcggccgagaggccttacttcatgtcttccaccctcaagaaactcttgaacaagaccaacaagaaggcagcggagtcctgaaggccccgtgctccccacctctcaaggagtctcatgccgcagggtgctcagtagctgggtctgttcccccagccccttgggctcacctgaagtcctatcactgccgctctgcccctccccatgagccagatcccaccagtttctggacgtggagagtctggggcatctccttcttatgccaaggggcgcttggagttttcatggctgcccctccagactgcgagaaacaagtaaaaacccattggggcctcttgatgtctgggatggcacgtggcccgacctccacaagctccctcatgcttcctgtcccccgcttacacgacaacgggccagaccacaggaaggacggtgtttgtgtctgagggagctgctggccacagtgaacacccacgtttattcctgcctgctccggccaggactgaaccccttctccacacctgaacagttggctcaagggccaccagaagcatttctttattattattattttttaacctggacatgcattaaagggtctattagctttctttccgtctgtctcaacagctgagatggggccgccaaggagtgccttccttttgctccctcctagctgggagtgacgggtgggagtgtgtgtgcccaggtgggggtgtctcctggctgggaaggagggaaagggagggagagttttgcgggggttggcagtggagagcaggctggagaggagatggctaatagctgtttaatggaaacctgctgggctggagggagttaggctgaatttcccgacttcctctgccagttattgacacagctctctttgtaagagaggaaagaaactaaacccacccaagggatgatgtcagggggagaggtggagggcagatgtcctgggcaaaccgggcccctctgcccacacacctcacttgatccttttgccaaacttgtcaaactcaggggaactggcttcccagttgcccctttgccatattccaagtccccctcagacttcatgtctctgctcatcagcactgtcccaggatcctggagagggagaactcctggccccaggggaaagaggggggggtctcccgtttcctgtgcctgcaccagccctgcccccattgcgtctgcacacccctgcgtgtaactgcattccaaccactaataaagtgcctattgtacaggtcca

SEQ ID NO: 204355 - protein, 757 aa, Artificial Sequence
  derived and/or modified sequence
MSNPGTRRNGSSIKIRLTVLCAKNLAKKDFFRLPDPFAKIVVDGSGQCHSTDTVKNTLDPKWNQHYDLYVGKTDSITISVWNHKKIHKKQGAGFLGCVRLLSNAISRLKDTGYQRLDLCKLNPSDTDAVRGQIVVSLQTRDRIGTGGSVVDCRGLLENEGTVYEDSGPGRPLSCFMEEPAPYTDSTGAAAGGGNCRFVESPSQDQRLQAQRLRNPDVRGSLQTPQNRPHGHQSPELPEGYEQRTTVQGQVYFLHTQTGVSTWHDPRIPSPSGTIPGGDAAFLYEFLLQGHTSEPRDLNSVNCDELGPLPPGWEVRSTVSGRIYFVDHNNRTTQFTDPRLHHIMNHQCQLKEPSQPLPLPSEGSLEDEELPAQRYERDLVQKLKVLRHELSLQQPQAGHCRIEVSREEIFEESYRQIMKMRPKDLKKRLMVKFRGEEGLDYGGVAREWLYLLCHEMLNPYYGLFQYSTDNIYMLQINPDSSINPDHLSYFHFVGRIMGLAVFHGHYINGGFTVPFYKQLLGKPIQLSDLESVDPELHKSLVWILENDITPVLDHTFCVEHNAFGRILQHELKPNGRNVPVTEENKKEYVRLYVNWRFMRGIEAQFLALQKGFNELIPQHLLKPFDQKELELIIGGLDKIDLNDWKSNTRLKHCVADSNIVRWFWQAVETFDEERRARLLQFVTGSTRVPLQGFKALQGSTGAAGPRLFTIHLIDANTDNLPKAHTCFNRIDIPPYESYEKLYEKLLTAVEETCGFAVE

SEQ ID NO: 204356 - DNA, 2274 bp, Artificial Sequence
  derived and/or modified sequence
atgtctaatccaggaacaaggaggaatggttcttccattaaaattaggctgaccgttctttgcgctaagaacctggcaaaaaaagatttctttcggctcccagatccgttcgccaagattgtggtcgacggatctggacagtgccattccacggatacagtcaagaacacattggaccctaaatggaaccagcactacgacctctacgtgggcaagacagacagcattaccatcagcgtttggaatcacaaaaagattcataaaaaacagggagcaggcttcctggggtgtgtgcgtctgttgtccaacgctatctctcgacttaaagatactggctaccagcgattggatttatgcaagctcaatccatctgacactgacgctgtccgagggcaaatcgttgtgagtctacagactagagatcgcattggcaccggaggtagtgtagtcgactgtcgagggctcttggaaaatgaaggcaccgtgtacgaggacagtgggcccggaagacccctgtcttgctttatggaagaaccggcgccatataccgatagcaccggcgccgcagccggcggagggaattgccggtttgttgagagccccagccaggaccagcgcttacaggctcaacgacttaggaatccagatgtaagggggagtttgcagacaccgcaaaacagaccacacgggcatcagtcccctgagttacccgaaggctacgagcagcggactacggtgcagggccaggtgtactttcttcacacgcaaacgggtgtatctacatggcacgatccgcgcatcccttctcctagcgggacaatccctggtggcgatgccgcttttctttacgagttccttctgcaggggcacacttcagaaccaagagacctgaatagtgtgaattgtgacgagttaggccctttgccacccgggtgggaggtccgcagtaccgtgtctggcaggatctatttcgttgatcataacaatcgaaccactcaattcaccgacccaagactgcaccatattatgaatcaccaatgccagcttaaagagccctcccagcctctgcctcttccatccgaaggaagccttgaggatgaggagttacccgcacagagatacgagagagatctcgtgcagaagctgaaggtgctgagacacgaattgtccttacagcagcctcaggcaggacactgccggatcgaggtttcaagggaggaaatattcgaagagtcatatagacagattatgaagatgaggccaaaggacctgaagaagagactgatggtgaaattccggggagaggaaggtctggactatggaggagttgcaagggagtggctgtatctgctttgtcacgaaatgctcaatccctattacggactgttccagtatagcactgacaatatttatatgctgcaaattaatcccgacagcagcataaatcccgatcacctgtcttacttccactttgtcggtcgaatcatgggattagccgtttttcatggtcattatattaacggaggatttactgtgccattttacaagcagctgcttggtaagcctatacaactatcggacctcgaaagcgttgacccggagttgcacaagtcgctagtgtggatcctggaaaacgacattacccctgtattggatcatacattttgtgtcgagcataacgcgtttggacgcatactccaacatgaactgaagccaaacggaagaaatgtgccagtcacggaggaaaataaaaaggagtacgtgcgcctctacgtgaactggagattcatgaggggcattgaagcccagtttctggctctccaaaaaggtttcaatgagctcattccccagcatctgttaaagccttttgatcagaaggaactggagctgatcatcggcggcctggacaaaatcgacctgaacgattggaagtctaacacgaggttgaagcactgtgtggctgatagcaacatcgtgagatggttttggcaggccgtggagacctttgatgaggagagacgcgcccgcctcctgcaattcgtcaccggaagcacgagggttcccctgcagggttttaaggctttacagggctccactggggcagcaggcccacggttattcacaatacacctgattgacgccaatacggacaacttgcccaaggcccatacttgtttcaatagaatcgatattcctccatatgagtcctatgaaaaactgtatgagaagctgttgacagctgtggaagaaacttgcggattcgcagtggaatag

SEQ ID NO: 204357 - DNA, 2274 bp, Artificial Sequence
  derived and/or modified sequence
atgagcaaccctggcaccaggagaaatggcagcagcatcaagatccggctgactgtgctgtgtgccaagaacctggccaagaaggacttcttccggctgcctgacccctttgccaagatcgtggtggatggcagcggccagtgccacagcacagacacagtgaagaacaccctggaccccaagtggaaccagcactatgacctgtatgtgggcaagacagacagcatcaccatctctgtgtggaaccacaagaagatccacaagaagcagggcgccggcttcctgggctgtgtgcggctgctgagcaatgccatcagccggctgaaggacaccggctaccagaggctggacctgtgcaagctgaaccccagcgacacagatgctgtgcggggccagatcgtggtgtccctgcagacccgggacagaattggaactggaggctctgtggtggactgccggggcctgctggagaatgaaggaacagtgtatgaggacagcggccctggccggcccctgagctgcttcatggaggagcccgccccctacacagacagcactggagctgctgctgggggcggcaactgccgctttgtggagagccccagccaggaccagaggctgcaggcccagaggctgagaaatccagatgtgcggggcagcctgcagaccccccagaaccggccccacggccaccagagccctgagctgcctgagggctatgagcagaggaccaccgtgcagggccaggtgtacttcctgcacacccagacaggagtgtccacctggcatgacccccgcatccccagccccagcggcaccatccctggaggagatgctgccttcctgtatgagttcctgctgcagggccacaccagcgagccccgggacctgaacagcgtgaactgtgatgagctgggccccctgcccccaggctgggaggtgcgcagcacagtgtctggccgcatctactttgtggaccacaacaacagaaccacccagttcacagacccccggctgcaccacatcatgaaccaccagtgccagctgaaggagcccagccagcccctgcccctgcccagcgagggcagcctggaggatgaggagctgcctgcccagagatatgaaagagacctggtgcagaagctgaaggtgctgcggcatgagctgagcctgcagcagccccaggccggccactgcagaattgaggtgtcccgggaggagatctttgaggagagctaccggcagatcatgaagatgaggcccaaggacctgaagaagaggctgatggtgaagttccggggggaggagggcctggactatggaggagtggcccgggagtggctgtacctgctgtgccacgagatgctgaacccctactacggcctcttccagtacagcacagacaacatctacatgctgcagatcaacccagacagcagcatcaacccagaccacctgagctacttccactttgtgggccgcatcatgggcctggccgtgttccacggccactacatcaatggaggcttcaccgtgcccttctacaagcagctgctgggcaagcccatccagctgagtgacctggagagcgtggaccctgagctgcacaagagcctggtgtggatcctggagaatgacatcacccctgtgctggaccacaccttctgtgtggagcacaatgccttcggccgcatcctgcagcacgagctgaagcccaatggaagaaatgtgcctgtgacagaggagaacaagaaggagtatgtgcggctgtatgtgaactggaggttcatgaggggcatcgaggcccagttcctggccctgcagaagggcttcaatgagctgatcccccagcacctgctgaagccctttgaccagaaggagctggagctgatcatcggcggcctggacaagattgacctgaatgactggaagagcaacacccggctgaagcactgtgtggccgacagcaacatcgtgcgctggttctggcaggccgtggagacctttgatgaggagcggcgggcccggctgctgcagtttgtgacaggcagcaccagggtgcccctgcagggcttcaaggccctgcagggcagcactggagctgctggccccaggctcttcaccatccacctgattgatgccaacacagacaacctgcccaaggcccacacctgcttcaacagaattgacatccccccctatgagagctatgagaagctgtatgagaagctgctgacagctgtggaggagacctgtggctttgctgtggagtag

SEQ ID NO: 204358 - DNA, 2274 bp, Artificial Sequence
  derived and/or modified sequence
atgagcaaccccggcacccggcggaacggcagcagcatcaagatcaggctcacggtgttgtgcgcaaaaaacttagctaaaaaagactttttccgcttgcccgacccattcgctaagattgttgttgacggatctggtcagtgtcattccaccgataccgtgaaaaatacattggatccgaagtggaatcagcactatgacctgtacgtggggaagacggattcgatcaccattagtgtgtggaaccataaaaaaatccacaaaaagcagggggccggattcttggggtgtgtaaggctgctatcaaacgccattagcaggctgaaagatactggctaccagcggctggatctctgtaagctcaatcccagcgacacagacgcagtccgcggccagatcgttgtcagcctgcagactagagacaggatcggcacaggcgggtcggtggtagattgccgcgggctgctggaaaacgaagggactgtgtatgaggattctggcccgggcagaccactcagctgcttcatggaggagcccgcaccttatacggattcaacaggcgctgccgctggcggcggcaattgcagattcgttgagagcccgtctcaggaccagcgcctgcaggcccagcgcttgagaaatcctgatgtgaggggctccctgcaaacccctcagaatcgccctcacggccaccagtctcctgagcttcctgagggatacgaacagcgaaccaccgtccaagggcaggtatatttccttcacacacagacaggggtctcaacgtggcacgacccccggatcccaagcccctccggaacaatcccagggggagatgccgcattcttatacgagtttcttctgcagggccacacctccgaaccccgagatttgaactctgtcaactgcgatgagctggggcctctgccgcctggctgggaagttcggtccacagtgagcggcaggatctactttgtcgaccacaataacagaacgacacagttcacggaccccagactgcatcacattatgaaccaccagtgccaactcaaggagccgtctcagccactgcctctcccttctgaagggagtctggaagacgaggaactcccagctcaacggtatgaacgcgaccttgtccagaagttgaaagtgctgcggcacgagctctccttgcagcagccgcaagccggccattgcaggatcgaggttagtcgggaagagatatttgaggaatcatacagacagataatgaaaatgcggccgaaagacctgaaaaagcggctgatggtcaaattccgaggggaagagggccttgactacgggggtgtggccagagagtggctctacctgctgtgtcacgagatgctcaatccctattacgggctgtttcaatactcaaccgataatatctacatgcttcagatcaaccctgattcaagtatcaaccccgatcatctttcatattttcattttgtgggccgtattatgggactggctgtctttcacggtcactatatcaatggaggcttcacagtgccgttctataagcaactgctaggtaaaccaatacagctcagcgatctggagtcagtagacccagaactccacaagagcttagtctggatactcgagaatgacattacccccgtcttggatcacaccttctgtgtcgagcataatgcttttggccgaatcctgcaacatgagctgaagcccaacggccgcaacgttccagtgaccgaggaaaataagaaagaatatgtgagactgtatgtgaactggcggttcatgcgcgggatcgaagcccagtttctggctctgcagaaagggttcaacgagttaattccacagcaccttctgaaaccgttcgaccagaaggaactcgaactcatcatagggggactggacaaaattgatctcaacgactggaagtcaaacactagacttaaacattgtgtggccgattccaatattgttcgctggttctggcaggccgtggagacgtttgatgaggaaagacgcgcgcgactccttcaattcgtgactggctccactagggtccctttgcaaggctttaaggcacttcaggggagcaccggcgctgctgggccccgtctatttaccatccacctcattgacgcaaataccgacaacctgcccaaggctcatacttgtttcaacagaatcgatatccccccctacgaaagctatgaaaaactgtacgaaaagctgctaacagccgtggaggagacttgtggatttgcagtcgaatag

SEQ ID NO: 204359 - DNA, 2274 bp, Artificial Sequence
  derived and/or modified sequence
atgagcaaccccggtacaagaaggaacggaagctcaatcaaaattcggctcaccgtgctgtgtgcaaaaaacctggcaaaaaaggatttttttcggctgcccgatcctttcgccaagatagtcgtcgacggctccggccaatgccactccaccgataccgtgaagaacactctggatccgaagtggaatcagcactacgatttgtacgtaggaaagaccgactctatcacgattagtgtgtggaatcacaaaaagatccacaaaaaacaaggtgcaggctttcttgggtgtgtgcggcttttgtctaatgcaatttcaaggttaaaagatacaggatatcaaagactcgacctctgcaagctcaacccatccgacactgatgcagtccgcggacagatcgtggttagtcttcagacccgtgataggattggtactgggggaagcgtcgtggattgtcgcggtctgttggagaatgagggcacagtctacgaggactccggcccaggcaggcccttatcatgtttcatggaagaaccggcaccctataccgacagcacgggagcagccgcagggggtgggaactgccggttcgtcgagtcaccgagtcaggaccagagactccaggcccagcgactgaggaacccggacgtgagggggtccttgcagacacctcaaaataggccccatggtcaccagagccccgagttgcccgaagggtatgagcaacggaccactgtacagggacaggtatacttcctgcacacacaaactggggtgagtacatggcatgacccaagaatcccctcaccctcagggacaatccccggaggtgatgcggctttcctgtacgagttcctgctgcaggggcatacatctgagcctcgggatctgaatagtgtgaattgcgacgaactcggtccacttccacctgggtgggaggttcgctccaccgtctcggggagaatatacttcgtagaccacaacaaccgtaccacacagtttacagatccccgtttgcatcatattatgaaccaccagtgccagctgaaggaaccatctcagcccctgccactgccttcggaggggtctctggaagatgaggagctgcccgctcagagatacgagcgtgatttggtgcagaagctcaaagtcctgaggcacgaattaagcttgcaacaaccccaggccggtcactgtaggatcgaggtctcccgcgaggagatttttgaggaaagttatcggcaaataatgaaaatgagacctaaggacctcaaaaagcggctgatggtgaagtttcgcggagaggagggacttgattatggtggagttgccagggagtggttatatctactgtgccatgaaatgctaaatccctactacggcctttttcagtacagtaccgataatatatacatgctgcaaattaatcctgattcttccattaacccggaccacctgtcatatttccatttcgttggcaggataatgggactggccgttttccacggccactacatcaacggcggatttactgtccccttttataagcagcttctcggtaagccaatccagctatcagatttggagagcgttgaccctgagctccacaaaagtcttgtgtggattctcgaaaacgacatcacacccgtgctcgaccacacattttgtgtggaacataatgctttcggaaggattctgcagcatgaactgaaaccaaatggaagaaacgtgccggtcacggaggagaacaaaaaagagtacgtccggctgtatgtgaactggcgatttatgagaggaattgaagcccaatttctggccctgcaaaagggctttaacgaactcatcccgcagcacctgctgaaacccttcgaccagaaagagttggagctaatcattggaggactggataaaatcgatcttaacgactggaagtctaacacgcgccttaagcactgtgtcgctgacagtaatattgtgcgctggttctggcaagcggttgagactttcgatgaggaaagacgagcccgactcctccagttcgtcactggcagcacccgcgtcccattgcagggctttaaggcgctacagggatccacaggagcagcaggacccagactgttcacgattcacctcatagacgcgaacaccgacaatctgccaaaagcacatacatgcttcaaccggattgatatccccccttatgagtcatacgagaaactttatgagaagttgctgacagccgttgaggagacgtgcgggtttgccgttgagtag

SEQ ID NO: 204360 - DNA, 5737 bp, Artificial Sequence
  derived and/or modified sequence
ggcagcggcggaagcggcgagggcggcgggcgtccggctctgaggtggtggaggcggcggaggcggcggcggaggcggcggcggctcgggactgggctcggctggaagcagcgagggtcagagcgccgcagcaagcgccgatctcccggctcgaccatccgcctgccgcccggacgcctgggccgcggagtttgtgtcccggctcggaccccggcgcccagcccggagccgtaaccttgaggcggcggcggcggggccgggccgggccgggctggggggcggtggcgctggatccgcggctgcccgatcgttggcgggagatgtcgaaccccgggacacgcaggaacggctccagcatcaagatccgtctgacagtgttatgtgccaagaaccttgcaaagaaagacttcttcaggctccctgacccttttgcaaagattgtcgtggatgggtctgggcagtgccactcaaccgacactgtgaaaaacacattggacccaaagtggaaccagcactatgatctatatgttgggaaaacggattcgataaccattagcgtgtggaaccataagaaaattcacaagaaacagggagctggcttcctgggctgtgtgcggctgctctccaatgccatcagcagattaaaagataccggataccagcgtttggatctatgcaaactaaacccctcagatactgatgcagttcgtggccagatagtggtcagtttacagacacgagacagaataggaaccggcggctcggtggtggactgcagaggactgttagaaaatgaaggaacggtgtatgaagactccgggcctgggaggccgctcagctgcttcatggaggaaccagccccttacacagatagcaccggtgctgctgctggaggagggaattgcaggttcgtggagtccccaagtcaagatcaaagacttcaggcacagcggcttcgaaaccctgatgtgcgaggttcactacagacgccccagaaccgaccacacggccaccagtccccggaactgcccgaaggctacgaacaaagaacaacagtccagggccaagtttactttttgcatacacagactggagttagcacgtggcacgaccccaggataccaagtccctcggggaccattcctgggggagatgcagcttttctatacgaattccttctacaaggccatacatctgagcccagagaccttaacagtgtgaactgtgatgaacttggaccactgccgccaggctgggaagtcagaagtacagtttctgggaggatatattttgtagatcataataaccgaacaacccagtttacagacccaaggttacaccacatcatgaatcaccagtgccaactcaaggagcccagccagccgctgccactgcccagtgagggctctctggaggacgaggagcttcctgcccagagatacgaaagagatctagtccagaagctgaaagtcctcagacacgaactgtcgcttcagcagccccaagctggtcattgccgcatcgaagtgtccagagaagaaatctttgaggagtcttaccgccagataatgaagatgcgaccgaaagacttgaaaaaacggctgatggtgaaattccgtggggaagaaggtttggattacggtggtgtggccagggagtggctttacttgctgtgccatgaaatgctgaatccttattacgggctcttccagtattctacggacaatatttacatgttgcaaataaatccggattcttcaatcaaccccgaccacttgtcttatttccactttgtggggcggatcatggggctggctgtgttccatggacactacatcaacgggggcttcacagtgcccttctacaagcagctgctggggaagcccatccagctctcagatctggaatctgtggacccagagctgcataagagcttggtgtggatcctagagaacgacatcacgcctgtactggaccacaccttctgcgtggaacacaacgccttcgggcggatcctgcagcatgaactgaaacccaatggcagaaatgtgccagtcacagaggagaataagaaagaatacgtccggttgtatgtaaactggaggtttatgagaggaatcgaagcccagttcttagctctgcagaaggggttcaatgagctcatccctcaacatctgctgaagccttttgaccagaaggaactggagctgatcataggcggcctggataaaatagacttgaacgactggaagtcgaacacgcggctgaagcactgtgtggccgacagcaacatcgtgcggtggttctggcaagcggtggagacgttcgatgaagaaaggagggccaggctcctgcagtttgtgactgggtccacgcgagtcccgctccaaggcttcaaggctttgcaaggttctacaggcgcggcagggccccggctgttcaccatccacctgatagacgcgaacacagacaaccttccgaaggcccatacctgctttaaccggatcgacattccaccatatgagtcctatgagaagctctacgagaagctgctgacagccgtggaggagacctgcgggtttgctgtggagtgaaaagcaaccaaaggcaacagagtctagctcatggccaccagaccaaaagcatccagcttctgtgcacctcctgcaaagctggcagaggccctggaattccagatcacctgaggggaaagggttgtctctctcctttctgttgggggagggggatgggggacttttgttggtggctcccacccatatatccctcctttaccatagtactcccacccacttccatcacccatccaataaaatgcagccaggtttagcctttggctttggtcacacaggatattctgctgtgttgcaacccatgtggtgataaggctcacagccctgagctctttacgggagcatcaactcacagttaggggactgggcgtggctgattgagggtttggaactggtggctatgccagctattccatctcaaaacagccttgaggccccttttcaatttgagcagctgctagatatcttatcagagctcagattccagatttcacatcccagcagccggttctgggtagcagatcaatttccaactggaaaataactatataatgtatgcttattggaattctgccacagcaggaagcttgagtcaaaatgtgtttcccctttgaaaggagaaggaattggagcagcttttcctggaggcccaggatatttcttttctgggtatcttggctgaaaattttgttttacatagagaaaaacgatcttttaagggtcccttttgctgcattatctgtccagtttgacttttttttcagtgaaaacaccatgtcatggagtgtaggaaagagcagaccaaaatcagccctagagccaaccagtcagtcccaaagctgtgacctctgtgccactgttgtccatagaagagcatcgactgtgtcacttaaaatattagtaaaccatgatgcagcaactgctaagagctaaactaacaaaattgtgtcatcatagctgctggcttggtgtgaactcgcttaaaagcaatggtgaaaggataacctcgatgatgtaaatccacccaaagatactgttctacaaaaagtagggtgtggacgcaaacctgtgacagcagagggggacgacttcacactcactgcctcatgtggcccctttcccagtggcagctggtgacactaacgattgctactcggttcacttgcccagatgtcttcatatgatgagcaaggccagaagcaaggctagattcgaagtttctgacaccatttccagtttgcacaaaagtcagtattttatcttaaagtggcttgatttccaatagctgaacttgggcagaaaacagcaggccaatgttcctatgtggtttctttgttgttgtttttgtttggggtgggggcaagtacagggtaattcatgagcaagacatttcactgctgtcgaagtctctgggatcccgctgtgggtctgagatggcctgggaaggaccttgtggacaatggttttatctgttctttttgtcactgttaatttctgggctgctgaggttctagaatagaagggctgccaaatgaggtttgctgcaggaggaaagtttaatcccccattccaaaagtccaggccaaatggtgggcttagcctctttgaaaagttctgccttgcccccacaggtgggcacatcctgtgtctcattcaccatgatgcttcctgagggtgttctagaagcccgttccccagtggctgtatccagcctttccttgcatcatcttcctcttgaaggtgaggaagtgaaaactacagacctcccccggacagcccactctctatcacgagcctaacccgcgggaggcggaagagacatccattcgagaactgaagcggcctccgggatgaggtcagaggccccacctgattttcctggtggtggtatccaaaatcttcagtaactaggaaggaaaccagggtctcatggtttaaaagactttgaagcaggaatgttgcatttgacgcctttaaaactacctttttgctgttgggaggagtcgggggcgagccttagcagctgcaccgccatccccatgctggttggtgctgccctgcctctcgtgccgggtgttgcttcagcccagagccagagggctgggtcccgggtcctccacaggtgaccccggtggacacacgcgttcccatcctggcctccgtctctgcttttccacttctacctgcgtgtgggtttgccgccttgtcatcggttgtgtgagtgtcgcagacctttccagagctccggttcactctttccaaacaggcctccctgtcggtggcactgcactcctagaaccttcagtttctacgatggtttgtttggtccttttgaaccaccccaaagaactcaacatggcaaagcaaatggtaaaagcttcccgactgttctactttgggtccgcgcgaagcccactcacgtgtgatctgtgttgcccctctcggtggtcccaggcgatccagccatgccccctgcccctctgcccagatgcttcaggggcccggcttttcaggcttgccctcaccagcggccgtcagccgacactcagggatgtagctaacaccactccgccagtgctttcagtaggaagagctgaggctgcctgggaggcccggggcgaccggaaaagggctctctcaagttctgaaaagagaatctgccaccagatcgaatttcgacccctgagcttgttcggacgtatggtccaaattcagattaaggtggtcacccaacccgagatgtcaggaaaggccttctgcagagaaaatgtccccccacccgccatctgcagccaggtgtgtgccacacggcagccttcccgaaacatagtatggattttaaaaatgtgtttatttttgtttctcaaccactttataacgtattttttaatttattttgtaatgtcttgttttgaagtattgctgctatccttgttatccttcccactgtttttatcactgatttattttgtgaaagttgtacactaatgttctatgtcaaaatcaaaagtatttaatgaaatactagttctatttaatgtggttatggaaccagctggaaacacaaaacaaacagtgattgtacagcaggctgggcccaggaggtcaggttcattttgttacatatgcaataaactcacgacttt

SEQ ID NO: 204361 - DNA, 2274 bp, Artificial Sequence
  derived and/or modified sequence
atgagcaaccccggcaccagaagaaacggcagcagcatcaagatcagactgaccgtgctgtgcgccaagaacctggccaagaaggacttcttcagactgcccgaccccttcgccaagatcgtggtggacggcagcggccagtgccacagcaccgacaccgtgaagaacaccctggaccccaagtggaaccagcactacgacctgtacgtgggcaagaccgacagcatcaccatcagcgtgtggaaccacaagaagatccacaagaagcagggcgccggcttcctgggctgcgtgagactgctgagcaacgccatcagcagactgaaggacaccggctaccagagactggacctgtgcaagctgaaccccagcgacaccgacgccgtgagaggccagatcgtggtgagcctgcagaccagagacagaatcggcaccggcggcagcgtggtggactgcagaggcctgctggagaacgagggcaccgtgtacgaggacagcggccccggcagacccctgagctgcttcatggaggagcccgccccctacaccgacagcaccggcgccgccgccggcggcggcaactgcagattcgtggagagccccagccaggaccagagactgcaggcccagagactgagaaaccccgacgtgagaggcagcctgcagaccccccagaacagaccccacggccaccagagccccgagctgcccgagggctacgagcagagaaccaccgtgcagggccaggtgtacttcctgcacacccagaccggcgtgagcacctggcacgaccccagaatccccagccccagcggcaccatccccggcggcgacgccgccttcctgtacgagttcctgctgcagggccacaccagcgagcccagagacctgaacagcgtgaactgcgacgagctgggccccctgccccccggctgggaggtgagaagcaccgtgagcggcagaatctacttcgtggaccacaacaacagaaccacccagttcaccgaccccagactgcaccacatcatgaaccaccagtgccagctgaaggagcccagccagcccctgcccctgcccagcgagggcagcctggaggacgaggagctgcccgcccagagatacgagagagacctggtgcagaagctgaaggtgctgagacacgagctgagcctgcagcagccccaggccggccactgcagaatcgaggtgagcagagaggagatcttcgaggagagctacagacagatcatgaagatgagacccaaggacctgaagaagagactgatggtgaagttcagaggcgaggagggcctggactacggcggcgtggccagagagtggctgtacctgctgtgccacgagatgctgaacccctactacggcctgttccagtacagcaccgacaacatctacatgctgcagatcaaccccgacagcagcatcaaccccgaccacctgagctacttccacttcgtgggcagaatcatgggcctggccgtgttccacggccactacatcaacggcggcttcaccgtgcccttctacaagcagctgctgggcaagcccatccagctgagcgacctggagagcgtggaccccgagctgcacaagagcctggtgtggatcctggagaacgacatcacccccgtgctggaccacaccttctgcgtggagcacaacgccttcggcagaatcctgcagcacgagctgaagcccaacggcagaaacgtgcccgtgaccgaggagaacaagaaggagtacgtgagactgtacgtgaactggagattcatgagaggcatcgaggcccagttcctggccctgcagaagggcttcaacgagctgatcccccagcacctgctgaagcccttcgaccagaaggagctggagctgatcatcggcggcctggacaagatcgacctgaacgactggaagagcaacaccagactgaagcactgcgtggccgacagcaacatcgtgagatggttctggcaggccgtggagaccttcgacgaggagagaagagccagactgctgcagttcgtgaccggcagcaccagagtgcccctgcagggcttcaaggccctgcagggcagcaccggcgccgccggccccagactgttcaccatccacctgatcgacgccaacaccgacaacctgcccaaggcccacacctgcttcaacagaatcgacatccccccctacgagagctacgagaagctgtacgagaagctgctgaccgccgtggaggagacctgcggcttcgccgtggagtag

SEQ ID NO: 204362 - protein, 439 aa, Artificial Sequence
  derived and/or modified sequence
MTNMSWSFLTRLLEEIHNHSTFVGKVWLTVLVVFRIVLTAVGGEAIYSDEQAKFTCNTRQPGCDNVCYDAFAPLSHVRFWVFQIVVISTPSVMYLGYAVHRLARASEQERRRALRRRPGPRRAPRAHLPPPHAGWPEPADLGEEEPMLGLGEEEEEEETGAAEGAGEEAEEAGAEEACTKAVGADGKAAGTPGPTGQHDGRRRIQREGLMRVYVAQLVARAAFEVAFLVGQYLLYGFEVRPFFPCSRQPCPHVVDCFVSRPTEKTVFLLVMYVVSCLCLLLNLCEMAHLGLGSAQDAVRGRRGPPASAPAPAPRPPPCAFPAAAAGLACPPDYSLVVRAAERARAHDQNLANLALQALRDGAAAGDRDRDSSPCVGLPAASRGPPRAGAPASRTGSATSAGTVGEQGRPGTHERPGAKPRAGSEKGSASSRDGKTTVWI

SEQ ID NO: 204363 - DNA, 1320 bp, Artificial Sequence
  derived and/or modified sequence
atgaccaacatgagctggagcttccttaccagactgttagaagagatacacaaccactctacctttgtcggtaaggtgtggctaacagtgctggttgtgttccggattgtactgactgccgtcggcggcgaggctatctactccgacgagcaggccaagttcacttgtaacacacgccagcctgggtgcgataacgtatgctacgacgcctttgccccactttcacacgtacgtttttgggttttccaaatcgtggtgatttctacaccatctgtaatgtacctgggctacgccgttcacagactagctagagcgagcgagcaggaaaggcgaagagccttgcggagacgccctggtccccggagagctccgcgggcccatctgcctccccctcacgccgggtggccggagccagccgaccttggagaggaggagccgatgcttgggctcggcgaagaagaggaagaggaggagaccggtgcagccgaaggagcaggcgaggaagccgaggaggccggagcagaagaagcttgtacaaaggctgtgggggcagatggcaaagctgcggggacgcccgggccgactggccagcatgatgggagacgtaggattcagagagagggactcatgcgtgtttacgtagctcaactggtcgcaagagcagcatttgaagtcgcattcctggtaggccagtatttgctctatggattcgaagttcgcccttttttcccatgttcacggcagccctgtccacatgttgtagactgcttcgtatcgcgcccaacagagaaaacagtatttttactggtgatgtacgtggtgtcttgcttgtgtctccttctgaacctgtgtgagatggctcatctgggactcggatctgcgcaagacgcagtacgcgggcgaaggggcccccccgcttcggcccccgctcctgcacccaggccaccaccttgcgcatttcccgccgccgccgctggactggcctgcccacctgactactccctcgtggtcagggccgcggagcgggcccgggcgcatgatcagaatctggcaaaccttgcgctccaggctttaagagatggagcagctgcaggggacagagaccgtgactccagtccctgcgtggggctccccgcggcgagtcgcgggccccctcgcgctggggctcctgcttccagaaccggaagcgccacctcagctggaactgttggcgagcagggtcgccctgggactcacgagagaccgggagctaaaccgcgggccggaagcgagaaggggtcagcctcaagtcgagatgggaagacaaccgtgtggatatag

SEQ ID NO: 204364 - DNA, 2243 bp, Artificial Sequence
  derived and/or modified sequence
ggggaacaatggggcccttgagggcccctcctccagcccccattgtgcttggtggtgagaggtggccctggctcggccacacaccctcggggaggaccagcatccaagcaggtggaagggctctgagggagactggaattttctggcctggagaaggacccgcccgcccgcccctatgaccaacatgagctggagcttcctgacgcggctgctggaggagatccacaaccactccaccttcgtgggcaaggtgtggctcacggtgctggtggtcttccgcatcgtgctgacggctgtgggcggcgaggccatctactcggacgagcaggccaagttcacttgcaacacgcggcagccaggctgcgacaacgtctgctatgacgccttcgcgcccctgtcgcacgtgcgcttctgggtcttccagattgtggtcatctccacgccctcggtcatgtacctgggctacgccgtgcaccgcctggcccgtgcgtctgagcaggagcggcgccgcgccctccgccgccgcccggggccacgccgcgcgccccgagcgcacctgccgcccccgcacgccggctggcctgagcccgccgacctgggcgaggaggagcccatgctgggcctgggcgaggaggaggaggaggaggagacgggggcagccgagggcgccggcgaggaagcggaggaggcaggcgcggaggaggcgtgcactaaggcggtcggcgctgacggcaaggcggcagggaccccgggcccgaccgggcaacacgatgggcggaggcgcatccagcgggagggcctgatgcgcgtgtacgtggcccagctggtggccagggcagctttcgaggtggccttcctggtgggccagtacctgctgtacggcttcgaggtgcgaccgttctttccctgcagccgccagccctgcccgcacgtggtggactgcttcgtgtcgcgccctactgaaaagacggtcttcctgctggttatgtacgtggtcagctgcctgtgcctgctgctcaacctctgtgagatggcccacctgggcttgggcagcgcgcaggacgcggtgcgcggccgccgcggccccccggcctccgcccccgcccccgcgccgcggcccccgccctgcgccttccctgcggcggccgctggcttggcctgcccgcccgactacagcctggtggtgcgggcggccgagcgcgctcgggcgcatgaccagaacctggcaaacctggccctgcaggcgctgcgcgacggggcagcggctggggaccgcgaccgggacagttcgccgtgcgtcggcctccctgcggcctcccgggggccccccagagcaggcgcccccgcgtcccggacgggcagtgctacctctgcgggcactgtcggggagcagggccggcccggcacccacgagcggccaggagccaagcccagggctggctccgagaagggcagtgccagcagcagggacgggaagaccaccgtgtggatctgagggcgctggcttgcgagctgggccagggaggaggagggttggggggctccggtggaaacctgcgaccccttctcctcagccttctccttagccggtggcctcaggcagactctgcccagaggggcagccaggctgctcagggaaggggctgaaagcggcagaggagtgccctggcttggtcaccactggggccaaggtggggtggagagaggcctaggagccagaaagggccctctgctgtggtctgaaccccagggggagtggggcattgactccacccctgtcctgagctggaataggtcctctgggatgccagctctcccctttgtgcttccctgcagcaacccatggagggcccagggtgcctggtatgggcatcagttggtgggggtgcgggggtgcgtgtccccattccctgcaacagcaaatggggctccttcttcagccctccccttcccagccccaaactgagacagactgggagctgggagcctggggtggacaggaccataccctctttgagcttctgcgatgccggccttccgttcctctgggaggcttgaagttctgcaaagatgttgatatgccttgcagcttggacccaatgggtggtggtcagggcctgggggcttggccatgctgggggaatggggctctgggttcctgcctgtggcctgtctgtcctcctccctaattcagacccagcctcaagaggaaagggagtaaaataaaactaacttgtttataa

SEQ ID NO: 204365 - DNA, 1320 bp, Artificial Sequence
  derived and/or modified sequence
atgaccaacatgtcctggagcttcctgacccggctgctggaggagatccacaaccacagcacctttgtgggcaaggtgtggctgactgtgctggtggtgttccgcatcgtgctgacagctgtgggcggggaggccatctacagtgatgagcaggccaagttcacctgcaacacccggcagcccggctgtgacaacgtgtgctatgatgcctttgcccccctgagccacgtgcgcttctgggtgttccagatcgtggtgatcagcaccccatctgtgatgtacctgggctatgctgtgcaccggctggcccgggccagcgagcaggagaggagaagagccctgcggcggcggcccggcccccggcgggccccccgggcccacctgcccccacctcatgctggctggccagagcctgctgacctgggggaggaggagcccatgctgggcctgggggaggaggaggaggaggaggagactggagctgctgagggcgctggggaggaggccgaggaggccggggctgaggaggcctgcaccaaggctgtgggcgcagatggcaaggctgctggcaccccaggccccaccggccagcatgatggaagaagacgcatccagcgggagggcctgatgagggtgtatgtggcccagctggtggcccgggccgcctttgaggtggccttcctggtgggccagtacctgctgtatggctttgaggtgcggcccttcttcccctgcagccggcagccctgcccccacgtggtggactgctttgtgtcccggcccacagagaagacagtgttcctgctggtgatgtatgtggtgtcctgcctgtgcctgctgctgaacctgtgtgagatggcccacctgggcctgggcagcgcccaggatgctgtgcggggcagaagaggccccccagccagcgccccagccccagccccccggcccccaccctgtgccttccctgctgctgctgctggcctggcctgccccccagactacagcctggtggtgcgggctgctgagcgggcccgggcccatgaccagaacctggccaacctggccctgcaggccctgagagatggagctgctgctggggaccgggaccgggacagcagcccctgtgtgggcctgcctgctgccagccggggcccccccagggctggggccccagccagcaggacaggcagcgccaccagcgctggcaccgtgggggagcagggccggcccggcacccatgagaggcctggggccaagcccagggctggcagcgagaagggcagcgccagcagcagagatggcaagaccaccgtgtggatctag

SEQ ID NO: 204366 - DNA, 1320 bp, Artificial Sequence
  derived and/or modified sequence
atgaccaacatgagctggagcttcctgacccggctgctggaggagattcataatcactctaccttcgttggaaaagtgtggctcactgtgctcgtcgtcttcagaatcgtgctgaccgcagtcggaggggaggcaatttattcagacgaacaggcaaagtttacctgcaacacccgccagccgggctgcgacaatgtttgttatgacgcttttgcccccctgtcccatgtgagattctgggtctttcagatagttgtgatctcaacacctagcgtgatgtacttgggctatgccgtacaccggctcgccagagctagcgaacaggaacgtcggcgggccttgagacgaaggcctggcccaaggcgagcgccacgtgctcaccttccccctccccacgccggatggcccgaacccgccgacctgggagaagaagagccgatgctgggcctgggcgaggaggaggaagaggaagaaacaggagctgccgaaggggccggcgaggaggccgaagaggctggtgccgaagaggcttgtaccaaagccgttggggccgatggaaaagccgctggaacacccggcccaactgggcagcatgacgggcgccgacgcatacaaagagagggattgatgagggtttacgtggctcagctggtggcccgagccgcttttgaggtcgcctttttggtcggccagtatctgttgtacggctttgaagtgcggcctttctttccgtgttcgcgccagccctgcccgcacgtcgtggattgtttcgtctcacggccaaccgagaaaacagtcttcttattagtaatgtacgtcgtgtcgtgtctttgcctgcttctgaacttgtgcgaaatggcccacctgggtcttgggtctgcccaggatgctgtgcgcgggcggcgcggacctcccgccagtgcacctgcacccgctcctcgaccgccaccttgtgcctttcctgccgccgcagcaggcctggcttgccccccagactacagcttagtggtccgggccgcagaacgggccagggctcacgatcagaacctggccaaccttgccctgcaggcactgagagacggcgctgccgccggcgatcgggatcgggattcaagcccatgtgtgggcctgccggccgcatctagggggccccctcgggctggggctcctgccagccgaactgggtcagccacgagcgctgggacagttggggagcagggccgacccgggacgcacgaaagacccggcgccaaacctcgcgccggctcagagaagggcagtgcctcctcccgggacggcaagacaacagtttggatatag

SEQ ID NO: 204367 - DNA, 1320 bp, Artificial Sequence
  derived and/or modified sequence
atgaccaacatgagctggtcttttctcacgcgtctgctcgaggagattcacaatcatagtacctttgttggaaaagtctggctgaccgttctagtcgtgtttagaattgtgctgaccgctgtcgggggagaggcgatatattccgatgagcaggcgaaatttacctgcaatacgaggcaacccggttgcgataacgtgtgttatgacgccttcgcacccttgagtcatgttcgtttctgggttttccagatcgtggttatcagcacaccctccgttatgtatctgggctacgcagtgcacagattggctcgggcttccgaacaggagcgcaggcgcgcattgaggagacgcccagggcctcgtcgggctccaagggcacacctaccaccgcctcacgccggatggcccgaacccgcagacctgggggaggaggaaccgatgctggggctgggagaagaggaggaagaggaggaaacaggcgcagccgagggcgcaggcgaggaggccgaagaggcaggggctgaagaggcgtgcactaaggcagttggagcagatggcaaggcggcaggaactccaggccctactggacagcacgacggtagacgcagaattcaaagggaggggttaatgcgggtctacgttgcccaactggttgctcgcgcagccttcgaggtagcgttccttgtgggccagtaccttctttacggttttgaggtgaggccattcttcccctgttctagacaaccctgcccgcacgtggtcgattgttttgtgagtcggccaactgaaaagacagtgttcctgctggtcatgtatgtagtttcctgtctctgtcttctgctgaacttatgcgagatggcccacttaggcctgggctccgcacaggatgccgtgcgcggtagaagagggcctccagcctcagctccggcacctgccccacgccctcccccatgcgcattcccagcagccgctgcaggcctagcatgccccccagattacagtctggtcgtgcgagccgcagagcgggctagggcacacgaccagaacctcgctaacctggccctgcaggcccttcgcgatggtgccgctgcaggagacagggaccgagattcgtctccatgcgtgggcctcccagccgcaagtcgaggcccacctagagccggtgctcccgcatcccgtacgggatcagctacaagtgctggtactgtgggcgagcaggggcgtcctggcacacatgagaggccaggtgcaaaacctcgggctggctcagaaaaaggtagtgctagcagtcgagacggaaagaccactgtgtggatttag

SEQ ID NO: 204368 - DNA, 1320 bp, Artificial Sequence
  derived and/or modified sequence
atgaccaacatgagctggagcttcctgaccagactgctggaggagatccacaaccacagcaccttcgtgggcaaggtgtggctgaccgtgctggtggtgttcagaatcgtgctgaccgccgtgggcggcgaggccatctacagcgacgagcaggccaagttcacctgcaacaccagacagcccggctgcgacaacgtgtgctacgacgccttcgcccccctgagccacgtgagattctgggtgttccagatcgtggtgatcagcacccccagcgtgatgtacctgggctacgccgtgcacagactggccagagccagcgagcaggagagaagaagagccctgagaagaagacccggccccagaagagcccccagagcccacctgccccccccccacgccggctggcccgagcccgccgacctgggcgaggaggagcccatgctgggcctgggcgaggaggaggaggaggaggagaccggcgccgccgagggcgccggcgaggaggccgaggaggccggcgccgaggaggcctgcaccaaggccgtgggcgccgacggcaaggccgccggcacccccggccccaccggccagcacgacggcagaagaagaatccagagagagggcctgatgagagtgtacgtggcccagctggtggccagagccgccttcgaggtggccttcctggtgggccagtacctgctgtacggcttcgaggtgagacccttcttcccctgcagcagacagccctgcccccacgtggtggactgcttcgtgagcagacccaccgagaagaccgtgttcctgctggtgatgtacgtggtgagctgcctgtgcctgctgctgaacctgtgcgagatggcccacctgggcctgggcagcgcccaggacgccgtgagaggcagaagaggcccccccgccagcgcccccgcccccgcccccagaccccccccctgcgccttccccgccgccgccgccggcctggcctgcccccccgactacagcctggtggtgagagccgccgagagagccagagcccacgaccagaacctggccaacctggccctgcaggccctgagagacggcgccgccgccggcgacagagacagagacagcagcccctgcgtgggcctgcccgccgccagcagaggcccccccagagccggcgcccccgccagcagaaccggcagcgccaccagcgccggcaccgtgggcgagcagggcagacccggcacccacgagagacccggcgccaagcccagagccggcagcgagaagggcagcgccagcagcagagacggcaagaccaccgtgtggatctag

SEQ ID NO: 204369 - protein, 1053 aa, Artificial Sequence
  derived and/or modified sequence
MSRRKQAKPQHINSEEDQGEQQPQQQTPEFADAAPAAPAAGELGAPVNHPGNDEVASEDEATVKRLRREETHVCEKCCAEFFSISEFLEHKKNCTKNPPVLIMNDSEGPVPSEDFSGAVLSHQPTSPGSKDCHRENGGSSEDMKEKPDAESVVYLKTETALPPTPQDISYLAKGKVANTNVTLQALRGTKVAVNQRSADALPAPVPGANSIPWVLEQILCLQQQQLQQIQLTEQIRIQVNMWASHALHSSGAGADTLKTLGSHMSQQVSAAVALLSQKAGSQGLSLDALKQAKLPHANIPSATSSLSPGLAPFTLKPDGTRVLPNVMSRLPSALLPQAPGSVLFQSPFSTVALDTSKKGKGKPPNISAVDVKPKDEAALYKHKCKYCSKVFGTDSSLQIHLRSHTGERPFVCSVCGHRFTTKGNLKVHFHRHPQVKANPQLFAEFQDKVAAGNGIPYALSVPDPIDEPSLSLDSKPVLVTTSVGLPQNLSSGTNPKDLTGGSLPGDLQPGPSPESEGGPTLPGVGPNYNSPRAGGFQGSGTPEPGSETLKLQQLVENIDKATTDPNECLICHRVLSCQSSLKMHYRTHTGERPFQCKICGRAFSTKGNLKTHLGVHRTNTSIKTQHSCPICQKKFTNAVMLQQHIRMHMGGQIPNTPLPENPCDFTGSEPMTVGENGSTGAICHDDVIESIDVEEVSSQEAPSSSSKVPTPLPSIHSASPTLGFAMMASLDAPGKVGPAPFNLQRQGSRENGSVESDGLTNDSSSLMGDQEYQSRSPDILETTSFQALSPANSQAESIKSKSPDAGSKAESSENSRTEMEGRSSLPSTFIRAPPTYVKVEVPGTFVGPSTLSPGMTPLLAAQPRRQAKQHGCTRCGKNFSSASALQIHERTHTGEKPFVCNICGRAFTTKGNLKVHYMTHGANNNSARRGRKLAIENTMALLGTDGKRVSEIFPKEILAPSVNVDPVVWNQYTSMLNGGLAVKTNEISVIQSGGVPTLPVSLGATSVVNNATVSKMDGSQSGISADVEKPSATDGVPKHQFPHFLEENKIAVS

SEQ ID NO: 204370 - DNA, 3487 bp, Artificial Sequence
  derived and/or modified sequence
atgcgcgttccggccgaaggggggtaaatttcccaactccaggaatttgtggcggagagggcaaataactgcggctctcccggcgccccgatgctcgcaccatgtcgaggcgcaagcaggcgaaaccccagcacatcaactcggaggaggaccagggcgagcagcagccgcagcagcagaccccggagtttgcagatgcggccccagcggcgcccgcggcgggggagctgggtgctccagtgaaccacccagggaatgacgaggtggcgagtgaggatgaagccacagtaaagcggcttcgtcgggaggagacgcacgtctgtgagaaatgctgtgcggagttcttcagcatctctgagttcctggaacataagaaaaattgcactaaaaatccacctgtcctcatcatgaatgacagcgaggggcctgtgccttcagaagacttctccggagctgtactgagccaccagcccaccagtcccggcagtaaggactgtcacagggagaatggcggcagctcagaggacatgaaggagaagccggatgcggagtctgtggtgtacctaaagacagagacagccctgccacccaccccccaggacataagctatttagccaaaggcaaagtggccaacactaatgtgaccttgcaggcactacggggcaccaaggtggcggtgaatcagcggagcgcggatgcactccctgcccccgtgcctggtgccaacagcatcccgtgggtcctcgagcagatcttgtgtctgcagcagcagcagctacagcagatccagctcaccgagcagatccgcatccaggtgaacatgtgggcctcccacgccctccactcaagcggggcaggggccgacactctgaagaccttgggcagccacatgtctcagcaggtttctgcagctgtggctttgctcagccagaaagctggaagccaaggtctgtctctggatgccttgaaacaagccaagctacctcacgccaacatcccttctgccaccagctccctgtccccagggctggcacccttcactctgaagccggatgggacccgggtgctcccgaacgtcatgtcccgcctcccgagcgctttgcttcctcaggccccgggctcggtgctcttccagagccctttctccactgtggcgctagacacatccaagaaagggaaggggaagccaccgaacatctccgcggtggatgtcaaacccaaagacgaggcggccctctacaagcacaagtgtaagtactgtagcaaggtttttgggactgatagctccttgcagatccacctccgctcccacactggagagagacccttcgtgtgctctgtctgtggtcatcgcttcaccaccaagggcaacctcaaggtgcactttcaccgacatccccaggtgaaggcaaacccccagctgtttgccgagttccaggacaaagtggcggccggcaatggcatcccctatgcactctctgtacctgaccccatagatgaaccgagtctttctttagacagcaaacctgtccttgtaaccacctctgtagggctacctcagaatctttcttcggggactaatcccaaggacctcacgggtggctccttgcccggtgacctgcagcctgggccttctccagaaagtgagggtggacccacactccctggggtgggaccaaactataattccccaagggctggtggcttccaagggagtgggacccctgagccagggtcagagaccctgaaattgcagcagttggtggagaacattgacaaggccaccactgatcccaacgaatgtctcatttgccaccgagtcttaagctgtcagagctccctcaagatgcattatcgcacccacaccggggagagaccgttccagtgtaagatctgtggccgagccttttctaccaaaggtaacctgaagacacaccttggggttcaccgaaccaacacatccattaagacgcagcattcgtgccccatctgccagaagaagttcactaatgccgtgatgctgcagcaacatattcggatgcacatgggcggtcagattcccaacacgcccctgccagagaatccctgtgactttacgggttctgagccaatgaccgtgggtgagaacggcagcaccggcgctatctgccatgatgatgtcatcgaaagcatcgatgtagaggaagtcagctcccaggaggctcccagcagctcctccaaggtccccacgcctcttcccagcatccactcggcatcacccacgctagggtttgccatgatggcttccttagatgccccagggaaagtgggtcctgccccttttaacctgcagcgccagggcagcagagaaaacggttccgtggagagcgatggcttgaccaacgactcatcctcgctgatgggagaccaggagtatcagagccgaagcccagatatcctggaaaccacatccttccaggcactctccccggccaatagtcaagccgaaagcatcaagtcaaagtctcccgatgctgggagcaaagcagagagctccgagaacagccgcactgagatggaaggtcggagcagtctcccttccacgtttatccgagccccgccgacctatgtcaaggttgaagttcctggcacatttgtgggaccctcgacattgtccccagggatgacccctttgttagcagcccagccacgccgacaggccaagcaacatggctgcacacggtgtgggaagaacttctcgtctgctagcgctcttcagatccacgagcggactcacactggagagaagccttttgtgtgcaacatttgtgggcgagcttttaccaccaaaggcaacttaaaggttcactacatgacacacggggcgaacaataactcagcccgccgtggaaggaagttggccatcgagaacaccatggctctgttaggtacggacggaaaaagagtctcagaaatctttcccaaggaaatcctggccccttcagtgaatgtggaccctgttgtgtggaaccagtacaccagcatgctcaatggcggtctggccgtgaagaccaatgagatctctgtgatccagagtgggggggttcctaccctcccggtttccttgggggccacctccgttgtgaataacgccactgtctccaagatggatggctcccagtcgggtatcagtgcagatgtggaaaaaccaagtgctactgacggcgttcccaaacaccagtttcctcacttcctggaagaaaacaagattgcggtcagctaagggagaacttgcgtggaaggagcaatgcagacacagtgaaatctctagaatctgctttgttttgtaagaactcatctcctcctgttttctttttcttactgatatgcaaatgatgtttactacgttggttgtgaccacaacctcaggcaagtgctacaatcacgattgttgctatgctgctttgcaaaaagttgaaaaaataaaaaaaaaatgcataccaaaaa

SEQ ID NO: 204371 - DNA, 3162 bp, Artificial Sequence
  derived and/or modified sequence
atgagtcgccggaagcaggctaagcctcagcatatcaatagtgaggaggaccagggcgagcaacagccacaacagcaaactcccgagtttgcagacgctgcccccgccgctcctgccgcaggtgagctgggagcaccagtaaatcatcccggaaacgatgaagtggcgtctgaagacgaggctactgtgaagagactgcgccgggaggagacccatgtctgtgaaaagtgttgcgccgaatttttctcaattagcgagttcctagagcataagaagaactgtaccaagaaccccccagtcctcattatgaatgatagtgaaggccccgtaccctccgaagacttctctggtgcggttctaagccatcagccaacatctccagggtctaaggattgtcaccgcgagaacggtggatcctctgaggacatgaaagagaaacccgatgccgagtccgttgtctatctgaaaacagagacagcactcccaccaacacctcaggacatctcttacctagcgaagggaaaggtggccaatactaacgtcaccctccaggctctcagaggcactaaagttgccgtaaatcagaggtccgctgatgccctgccggctcctgtccctggcgctaattcgatcccctgggtactcgaacagatcctgtgcttacaacagcagcagttgcagcaaatccagctcacagaacagatcagaatacaggttaacatgtgggcgtcgcacgcacttcactcctccggcgccggagcagatacactcaagacattaggcagccacatgtcccaacaagtctccgcagccgtggctttgcttagccaaaaagcgggatcccaggggctcagtctggatgctctgaagcaggctaaacttcctcatgccaacatcccttccgctacctcatcgttgtcaccgggtctcgccccctttacactgaagcctgatgggaccagggtgctgcccaacgtcatgagtcgacttccctcagctctcctacctcaggccccgggatcagttctgtttcaaagcccctttagcacagtggctctggacactagcaagaagggaaagggcaagccacccaacatctcagcagtggacgttaagccaaaagacgaggccgccctttataaacacaaatgcaagtactgctcaaaggtatttggtaccgacagcagccttcaaattcacctaagaagccacaccggagagagaccatttgtctgttcagtgtgcgggcatcgattcactactaaagggaatctgaaggtgcacttccacaggcatccacaggtgaaagcaaatcctcaactgtttgccgagtttcaggacaaggtggccgctggaaacgggattccttatgctctctcagttccagatccaattgatgagcccagcctgtcacttgactccaagcctgtgctagtgactactagcgtcggccttccacagaacttgtccagcggaacaaatccaaaggatcttaccggtggatcactgccaggagatcttcagcctggtccctcacccgagtcggagggagggccaaccttaccaggagtcggcccaaattacaactcccctagagctggcggcttccagggctcaggcacccccgaacctggcagcgaaaccctgaagctgcagcaactggtagaaaacattgacaaggctacaaccgatcccaacgagtgcttaatatgtcacagggttctgtcgtgtcagagctcacttaaaatgcactacaggacgcacactggagagcggccattccaatgtaagatttgtggccgagcgttctcaacaaaggggaacctcaagacacacctgggcgtacacagaacaaatacttccatcaagactcagcactcgtgtcccatctgtcaaaaaaaatttactaacgccgtaatgctgcaacagcatatccgcatgcacatgggaggccagattccgaacacaccactcccagagaacccatgcgactttacaggctctgagccaatgaccgttggggaaaacggcagcacgggcgccatctgccatgatgacgtcatcgagagtattgacgtggaggaggtctcaagccaagaggctccaagcagctcatctaaagtccccacaccactgcctagcattcactctgcatcaccaaccctgggcttcgcaatgatggcatccctggacgcccccggaaaagtgggtccagctcccttcaacctgcagaggcagggaagcagggagaatggttcagtggagagcgatggcctcacgaacgactcctctagtctgatgggcgaccaggagtaccagagtagatcccccgacattctggagactaccagctttcaggccctgagccccgccaacagtcaggctgagtcaattaaaagcaaatccccagacgcgggatccaaggccgagtcaagtgaaaactctaggactgagatggagggtcgttccagccttccatccacctttatcagggctccgcctacgtatgtgaaagtcgaagtacccggaacattcgttggcccttctactctcagtccgggcatgacccccctgttagccgcccagcctcgcaggcaagctaagcaacatggatgtaccaggtgcggcaagaatttctcaagcgcctctgccctgcagatccacgagcgcacccacacaggcgaaaaaccctttgtgtgcaatatttgtggcagggcttttaccaccaaaggcaatctcaaggtccactatatgacccacggagcaaacaataactccgccaggcggggccggaaactggccatcgagaacacaatggcccttcttggaacagacgggaagagggtgtccgagatcttccctaaggagatcctcgcaccttcagtgaacgtggaccctgtcgtgtggaaccagtatacctccatgctgaatggggggctcgcagttaaaaccaacgagatctcggttatccagtcgggcggagtacccacattgccagtgtccctcggagctacgtctgtggttaacaatgccacagtctcaaaaatggacggaagccagagtggaatttctgcagacgtggagaaaccatccgcgacggacggcgtaccaaaacaccagtttcctcactttctcgaagagaacaagatcgccgtatcctag

SEQ ID NO: 204372 - DNA, 3162 bp, Artificial Sequence
  derived and/or modified sequence
atgagcaggaggaagcaggccaagccccagcacatcaacagcgaggaggaccagggcgagcagcagccccagcagcagaccccagagtttgctgatgctgccccagctgccccagctgctggggagctgggcgcccctgtgaaccaccctggaaatgatgaggtggcctctgaagatgaggccaccgtgaagaggctgcggcgggaggagacccacgtgtgtgagaagtgctgtgccgagttcttcagcatcagcgagttcctggagcacaagaagaactgcaccaagaacccccctgtgctgatcatgaatgacagcgagggccctgtgcccagcgaggacttcagcggggctgtgctgagccaccagcccaccagccctggcagcaaggactgccacagagaaaatggaggcagcagcgaggacatgaaggagaagccagatgctgagagcgtggtgtacctgaagacagaaacagccctgccccccaccccccaggacatctcctacctggccaagggcaaggtggccaacaccaacgtgaccctgcaggccctgcggggcaccaaggtggccgtgaaccagaggtctgcagatgccctgcctgcccctgtgcctggggccaacagcatcccctgggtgctggagcagatcctgtgcctgcagcagcagcagctgcagcagatccagctgacagagcagatccgcatccaggtgaacatgtgggccagccacgccctgcacagcagcggggccggggctgacaccctgaagaccctgggcagccacatgagccagcaggtgtctgctgctgtggccctgctgagccagaaggccggcagccagggcctgagcctggatgccctgaagcaggccaagctgccccacgccaacatccccagcgccaccagcagcctgagccctggcctggcccccttcaccctgaagccagatggcaccagggtgctgcccaacgtgatgagccggctgcccagcgccctgctgccccaggcccctggctctgtgctcttccagagccccttcagcacagtggccctggacaccagcaagaagggcaagggcaagccacccaacatctctgctgtggatgtgaagcccaaggatgaagctgccctgtacaagcacaagtgcaagtactgcagcaaggtgtttggaacagacagcagcctgcagatccacctgcggagccacactggagagcggccctttgtgtgcagcgtgtgtggccaccgcttcaccaccaagggcaacctgaaggtgcacttccaccgccacccccaggtgaaggccaacccccagctgtttgctgagttccaggacaaggtggccgctggaaatggcatcccctatgccctgtctgtgcctgaccccattgatgagcccagcctgagcctggacagcaagcctgtgctggtgaccacctctgtgggcctgccccagaacctgagcagcggcaccaaccccaaggacctgactggaggcagcctgcccggggacctgcagcccggccccagccctgagagcgagggcggccccaccctgcccggggtgggccccaactacaacagccccagggctgggggcttccagggcagcggcaccccagagcccggcagcgagaccctgaagctgcagcagctggtggagaacatcgacaaggccaccacagaccccaatgaatgtctcatctgccaccgggtgctgagctgccagagcagcctgaagatgcactaccgcacccacactggagagcggcccttccagtgcaagatctgtggccgggccttcagcaccaagggcaacctgaagacccacctgggcgtgcacaggaccaacaccagcatcaagacccagcacagctgccccatctgccagaagaagttcaccaatgctgtgatgctgcagcagcacatccgcatgcacatgggcggccagatccccaacacccccctgcctgagaacccctgtgacttcaccggcagcgagcccatgacagtgggagaaaatggcagcactggagccatctgccatgatgatgtgattgagagcattgatgtggaggaggtgagcagccaggaggcccccagcagcagcagcaaggtgcccacccccctgcccagcatccacagcgccagccccaccctgggctttgccatgatggccagcctggatgcccctgggaaggtgggccctgcccccttcaacctgcagaggcagggcagccgggagaatggatctgtggagagtgatggcctgaccaatgacagcagcagcctgatgggagaccaggagtaccagagccgcagcccagacatcctggagaccaccagcttccaggccctgagccctgccaacagccaggccgagagcatcaagagcaagagcccagatgctggcagcaaggccgagagcagcgagaacagcaggacagagatggagggccgcagcagcctgcccagcaccttcatccgggccccacccacctacgtgaaggtggaggtgcccggcacctttgtgggccccagcaccctgagccctggcatgacccccctgctggccgcccagccccggcggcaggccaagcagcacggctgcacccgctgtgggaagaacttcagcagcgccagcgccctgcagatccacgagaggacccacactggagagaagccctttgtgtgcaacatctgtggccgggccttcaccaccaagggcaacctgaaggtgcactacatgacccacggggccaacaacaacagcgcccggcggggcaggaagctggccatcgagaacaccatggccctgctgggcacagatggcaagagggtgtctgagatcttccccaaggagatcctggcccccagcgtgaatgtggaccctgtggtgtggaaccagtacacctccatgctgaatggaggcctggccgtgaagaccaatgagatcagcgtcatccagagcggcggcgtgcccaccctgcctgtgtccctgggcgccacctctgtggtgaacaatgccaccgtgtccaagatggatggcagccagagcggcatctctgcagatgtggagaagcccagcgccacagatggagtgcccaagcaccagttcccccacttcctggaggagaacaagattgctgtgtcctag

SEQ ID NO: 204373 - DNA, 3162 bp, Artificial Sequence
  derived and/or modified sequence
atgagccggcggaagcaggccaagccccagcacatcaacagcgaggaggaccagggagaacaacagccccaacagcagactcccgaatttgctgatgccgcccctgctgcccctgctgccggtgagctgggtgctcctgtaaaccaccccggtaacgacgaagttgcttctgaggacgaagccacggtcaagcggcttcgcagagaggagacccatgtctgtgagaagtgttgcgccgaattttttagtatatctgaatttctggaacataaaaagaactgcacgaaaaatcctccggtgctgatcatgaacgactccgaaggaccagtgccaagcgaggatttttctggagcggttctatcccatcaacctacctctcctggctccaaagactgccatcgagaaaatggtggcagtagtgaagacatgaaggaaaagccagacgccgagagtgtggtgtacttaaagactgagaccgccttaccgcccactcctcaggacatctcttatctagcaaaggggaaagtggccaatactaacgttaccctgcaggcactcagaggtactaaggtggcagtcaaccagaggtcggcggacgcactgcccgccccggttcctggggccaactctattccctgggtactagagcagatactgtgcctccaacagcaacagctccagcagatccaacttaccgaacagatcagaatccaagtaaacatgtgggcgtcccatgcgctccattcttcaggggcgggggccgatacactgaagacattagggtcccacatgagccagcaagtgtcagccgccgtggccctgctgagtcagaaagctggctcccagggccttagccttgacgctctcaaacaagcaaagttacctcacgcaaatatcccgagtgcaacctcaagcctgtctcccggcctggcaccatttacgctgaaacctgatgggactagggtgctgcccaacgtcatgtcacgcctccccagcgctctgctgccccaggcccctgggtctgttctgttccagtctccgttcagcacagtggccttagataccagtaaaaagggcaaaggaaaaccgcccaatataagcgctgtcgatgtgaaaccaaaagatgaagccgccctgtataagcacaaatgcaagtactgtagtaaggtcttcggcacagacagttctctgcaaattcatctgagaagccatacaggcgagcgtcctttcgtgtgtagtgtttgcggtcacaggttcacaaccaaagggaatttgaaagtacactttcataggcacccccaggtgaaagccaatccgcagctctttgccgagttccaagacaaggtcgccgctggaaatggaattccgtacgcactgtccgttcctgaccctatcgatgagccatctttgagccttgacagcaaaccggtgttagtcaccacctccgtcggactgccccaaaatctgtcctccggcacaaatcctaaggatttgacagggggctccttgcccggggacctgcagcccggccctagcccagaaagcgagggtgggcctactttgcctggagtgggtcctaactataactcaccgagggccggcgggtttcaaggctctggtacgcctgagcccggttcagagacgcttaagctccagcagctggtggagaacatcgacaaagccactacagatcctaacgaatgcctgatctgtcaccgggtgctgtcttgtcagtcttccctgaagatgcactaccggacgcatactggcgagcgccctttccagtgcaaaatatgcggaagagccttctccaccaaaggtaatctgaaaactcatcttggcgttcacagaacaaacaccagtatcaagacccagcattcctgccccatctgtcagaagaagttcactaacgccgtcatgctgcagcagcacattagaatgcatatgggtggacagatccctaacacccctctccccgagaatccctgtgacttcacaggatcagagcctatgacagtcggagaaaatggttccacaggagccatctgccatgatgacgtgattgagtctatcgatgtcgaggaggtatcatctcaggaggcacctagctcaagttccaaggtacccacacccctaccaagtattcactctgcctcaccgacacttggcttcgccatgatggcctccctggatgctccaggcaaggtcggtccggccccattcaacctccagaggcagggctctagggagaacggcagtgtagaatccgacgggttgactaacgacagtagctcattgatgggagaccaagaataccaatcaaggtccccggacattctggagaccacatcttttcaggctctgtcacctgccaacagccaggctgagtcaatcaagtctaaaagccctgacgcagggtcaaaggccgagagtagtgagaactccaggacagagatggagggccggtcctctttgccctctaccttcattagagctccgccgacatatgttaaagtcgaggttccagggacatttgtcggacccagtactctgagccccggcatgactccacttctggcagcacagccacgcaggcaagccaaacaacacgggtgtactaggtgcggaaagaatttctcaagcgcctccgcgctgcagatccatgagagaactcatacgggagaaaaaccttttgtgtgcaatatctgcggtagagcttttacgactaaggggaacctgaaggttcactacatgacccacggggcaaacaacaactcagcacgccgagggcggaaactggcgattgaaaataccatggccctgttggggacagatggtaaaagggtgagcgaaatctttccaaaagagattctcgcacccagtgtgaacgtggacccagtggtgtggaaccagtacacttccatgctgaacggcgggctggcagtgaagacaaatgaaatatctgtgattcagtccggtggtgttcccacccttcccgtgtcccttggggctacgtctgttgtgaataacgccaccgtctctaaaatggatgggagccagtccggaataagcgccgacgttgagaagcccagcgccacggatggagtgcctaagcatcagtttccgcattttctcgaagaaaacaagatagccgtgtcgtag

SEQ ID NO: 204374 - DNA, 3162 bp, Artificial Sequence
  derived and/or modified sequence
atgtcccgaaggaagcaagccaaaccccagcacatcaattcagaggaggaccaaggagagcagcaaccacagcagcaaacacctgaatttgccgacgcagctccagccgcacctgcggcaggcgaactgggggcaccagttaaccaccccggtaacgacgaggtagcttcggaagacgaagctaccgtcaagagactgagaagggaagagactcacgtttgcgagaaatgctgtgccgagttcttcagtatctccgagttcctcgagcataaaaaaaattgtacaaagaatccacctgtgctgattatgaatgattccgaaggacctgtgccatccgaagactttagtggcgctgtcctgtcccaccagcccacttctccgggaagtaaagactgtcacagagaaaatggaggctcaagtgaagacatgaaagaaaagcccgacgccgagagcgtggtgtatttaaagactgagaccgctctgcctccgaccccccaggatatatcctatcttgcgaaaggcaaagtcgctaataccaatgttacactccaggccctgcggggtaccaaggtggctgtgaatcagcgatccgcagacgccttacccgcacctgtgcctggcgctaactccatcccttgggtgcttgaacagattctctgtctccagcagcagcaattacagcagatccagctaacggagcagatcagaatccaggtgaatatgtgggctagtcacgccctgcacagcagcggggcaggagctgacaccctgaagacgcttgggagccacatgtctcagcaggtgtcggccgctgtcgctcttctgtcccagaaagctggttctcaggggctttccctggacgctctgaaacaggccaaactgcctcatgccaacattcctagcgctacaagcagtctgtccccaggtctggcacctttcaccctgaagccagacgggacccgagtgctccccaacgtcatgtcgcgtctgccatcagcactgctgcctcaggccccaggttctgtgctcttccagagcccgttcagcaccgtggcactcgatacctccaaaaaggggaagggtaagccacctaacattagcgcagtcgacgtgaagccaaaagacgaagctgctttatacaagcacaagtgtaaatactgtagcaaggtgtttgggacggactcatccttgcagattcacctccgtagccacacgggcgaaaggccatttgtttgctccgtgtgcggtcacaggtttaccactaaaggcaacttgaaggtacactttcacagacacccacaagtaaaggctaatccacagctgttcgcagaatttcaggacaaggtagctgccggtaatggtatcccctatgccctgagcgttccggaccccatcgacgaacccagcctctcactcgattcaaaacccgtgcttgtgacaacttccgtaggtctgccacagaacctaagcagcggtacaaatccgaaggatctgactggaggctccctaccgggagatctgcaacccggaccatcccccgaaagcgaagggggaccgacactgccgggagtgggtcccaattataactcgcccagggctggaggtttccagggctccgggacgcccgagccaggtagtgagaccttgaaactacagcagctggtcgagaatattgataaggcaaccacagatccaaatgagtgcctgatctgtcatagagtcctaagctgtcagtctagcttaaagatgcattaccggactcacaccggtgagagaccatttcagtgcaagatctgtgggagggcatttagcacaaaaggaaacctcaaaacacatctgggtgtccacagaactaacacttctatcaaaacgcagcactcgtgtcccatatgccagaaaaagtttaccaacgccgtgatgttacagcaacacattagaatgcacatgggaggtcagatccctaacacccctctgcctgaaaatccttgcgattttaccgggagcgagcctatgaccgtgggagagaacggctctacaggcgcaatttgccatgatgatgtgatcgaaagcattgatgtggaagaggtgtcttcgcaggaagccccatcttccagctccaaagtgcccacacctttaccgagcattcacagcgcttctccaacactcggctttgcgatgatggcatccctcgatgccccaggaaaggtcggacccgcaccatttaatttgcagcggcagggctctcgggagaacggctctgtggagagtgacggcctcaccaacgattcaagtagtttgatgggggaccaggaataccaatcacgtagtcccgatatactggagaccacctcttttcaagcactgagccccgcaaattctcaagctgagtccatcaagagcaaatcccctgacgcgggtagcaaggcagagtctagtgagaatagtcgcactgaaatggaagggagatcctctcttccgagcaccttcatccgcgcacctcccacctacgtcaaagtcgaagtgcctggcaccttcgtggggccaagtacattgtcgccaggaatgacgccccttctggctgctcaaccaaggcggcaggctaaacaacacggatgcaccagatgtgggaagaacttctcctcagcaagcgcgctccagatccacgaaagaactcacaccggagagaagcccttcgtgtgcaatatatgtgggcgtgcctttaccaccaagggcaacctaaaggtgcattacatgacgcatggcgctaacaacaattcggcacgccgagggaggaagctggcgatagaaaacacaatggcactgctgggtactgatggcaagagggtgagcgagatcttcccaaaagaaattctcgctccgagtgtcaacgtcgaccctgttgtttggaaccagtatacaagcatgctgaatggaggcctcgctgtgaagacaaacgagatttccgttatccaatctggcggagttcctacgctccccgtgagcttgggagcaacatctgttgttaacaacgcaaccgtcagcaagatggacgggtctcagtcagggatatccgctgacgtagaaaaaccatctgcgactgacggggtcccaaagcaccagtttccacactttctggaagaaaataagatcgcggttagctag

SEQ ID NO: 204375 - DNA, 3162 bp, Artificial Sequence
  derived and/or modified sequence
atgagcagaagaaagcaggccaagccccagcacatcaacagcgaggaggaccagggcgagcagcagccccagcagcagacccccgagttcgccgacgccgcccccgccgcccccgccgccggcgagctgggcgcccccgtgaaccaccccggcaacgacgaggtggccagcgaggacgaggccaccgtgaagagactgagaagagaggagacccacgtgtgcgagaagtgctgcgccgagttcttcagcatcagcgagttcctggagcacaagaagaactgcaccaagaacccccccgtgctgatcatgaacgacagcgagggccccgtgcccagcgaggacttcagcggcgccgtgctgagccaccagcccaccagccccggcagcaaggactgccacagagagaacggcggcagcagcgaggacatgaaggagaagcccgacgccgagagcgtggtgtacctgaagaccgagaccgccctgccccccaccccccaggacatcagctacctggccaagggcaaggtggccaacaccaacgtgaccctgcaggccctgagaggcaccaaggtggccgtgaaccagagaagcgccgacgccctgcccgcccccgtgcccggcgccaacagcatcccctgggtgctggagcagatcctgtgcctgcagcagcagcagctgcagcagatccagctgaccgagcagatcagaatccaggtgaacatgtgggccagccacgccctgcacagcagcggcgccggcgccgacaccctgaagaccctgggcagccacatgagccagcaggtgagcgccgccgtggccctgctgagccagaaggccggcagccagggcctgagcctggacgccctgaagcaggccaagctgccccacgccaacatccccagcgccaccagcagcctgagccccggcctggcccccttcaccctgaagcccgacggcaccagagtgctgcccaacgtgatgagcagactgcccagcgccctgctgccccaggcccccggcagcgtgctgttccagagccccttcagcaccgtggccctggacaccagcaagaagggcaagggcaagccccccaacatcagcgccgtggacgtgaagcccaaggacgaggccgccctgtacaagcacaagtgcaagtactgcagcaaggtgttcggcaccgacagcagcctgcagatccacctgagaagccacaccggcgagagacccttcgtgtgcagcgtgtgcggccacagattcaccaccaagggcaacctgaaggtgcacttccacagacacccccaggtgaaggccaacccccagctgttcgccgagttccaggacaaggtggccgccggcaacggcatcccctacgccctgagcgtgcccgaccccatcgacgagcccagcctgagcctggacagcaagcccgtgctggtgaccaccagcgtgggcctgccccagaacctgagcagcggcaccaaccccaaggacctgaccggcggcagcctgcccggcgacctgcagcccggccccagccccgagagcgagggcggccccaccctgcccggcgtgggccccaactacaacagccccagagccggcggcttccagggcagcggcacccccgagcccggcagcgagaccctgaagctgcagcagctggtggagaacatcgacaaggccaccaccgaccccaacgagtgcctgatctgccacagagtgctgagctgccagagcagcctgaagatgcactacagaacccacaccggcgagagacccttccagtgcaagatctgcggcagagccttcagcaccaagggcaacctgaagacccacctgggcgtgcacagaaccaacaccagcatcaagacccagcacagctgccccatctgccagaagaagttcaccaacgccgtgatgctgcagcagcacatcagaatgcacatgggcggccagatccccaacacccccctgcccgagaacccctgcgacttcaccggcagcgagcccatgaccgtgggcgagaacggcagcaccggcgccatctgccacgacgacgtgatcgagagcatcgacgtggaggaggtgagcagccaggaggcccccagcagcagcagcaaggtgcccacccccctgcccagcatccacagcgccagccccaccctgggcttcgccatgatggccagcctggacgcccccggcaaggtgggccccgcccccttcaacctgcagagacagggcagcagagagaacggcagcgtggagagcgacggcctgaccaacgacagcagcagcctgatgggcgaccaggagtaccagagcagaagccccgacatcctggagaccaccagcttccaggccctgagccccgccaacagccaggccgagagcatcaagagcaagagccccgacgccggcagcaaggccgagagcagcgagaacagcagaaccgagatggagggcagaagcagcctgcccagcaccttcatcagagccccccccacctacgtgaaggtggaggtgcccggcaccttcgtgggccccagcaccctgagccccggcatgacccccctgctggccgcccagcccagaagacaggccaagcagcacggctgcaccagatgcggcaagaacttcagcagcgccagcgccctgcagatccacgagagaacccacaccggcgagaagcccttcgtgtgcaacatctgcggcagagccttcaccaccaagggcaacctgaaggtgcactacatgacccacggcgccaacaacaacagcgccagaagaggcagaaagctggccatcgagaacaccatggccctgctgggcaccgacggcaagagagtgagcgagatcttccccaaggagatcctggcccccagcgtgaacgtggaccccgtggtgtggaaccagtacaccagcatgctgaacggcggcctggccgtgaagaccaacgagatcagcgtgatccagagcggcggcgtgcccaccctgcccgtgagcctgggcgccaccagcgtggtgaacaacgccaccgtgagcaagatggacggcagccagagcggcatcagcgccgacgtggagaagcccagcgccaccgacggcgtgcccaagcaccagttcccccacttcctggaggagaacaagatcgccgtgagctag

SEQ ID NO: 204376 - DNA, 3452 bp, Artificial Sequence
  derived and/or modified sequence
aactccaggaatttgtggcggagagggcaaataactgcggctctcccggcgccccgatgctcgcaccatgtcgaggcgcaagcaggcgaaaccccagcacatcaactcggaggaggaccagggcgagcagcagccgcagcagcagaccccggagtttgcagatgcggccccagcggcgcccgcggcgggggagctgggtgctccagtgaaccacccagggaatgacgaggtggcgagtgaggatgaagccacagtaaagcggcttcgtcgggaggagacgcacgtctgtgagaaatgctgtgcggagttcttcagcatctctgagttcctggaacataagaaaaattgcactaaaaatccacctgtcctcatcatgaatgacagcgaggggcctgtgccttcagaagacttctccggagctgtactgagccaccagcccaccagtcccggcagtaaggactgtcacagggagaatggcggcagctcagaggacatgaaggagaagccggatgcggagtctgtggtgtacctaaagacagagacagccctgccacccaccccccaggacataagctatttagccaaaggcaaagtggccaacactaatgtgaccttgcaggcactacggggcaccaaggtggcggtgaatcagcggagcgcggatgcactccctgcccccgtgcctggtgccaacagcatcccgtgggtcctcgagcagatcttgtgtctgcagcagcagcagctacagcagatccagctcaccgagcagatccgcatccaggtgaacatgtgggcctcccacgccctccactcaagcggggcaggggccgacactctgaagaccttgggcagccacatgtctcagcaggtttctgcagctgtggctttgctcagccagaaagctggaagccaaggtctgtctctggatgccttgaaacaagccaagctacctcacgccaacatcccttctgccaccagctccctgtccccagggctggcacccttcactctgaagccggatgggacccgggtgctcccgaacgtcatgtcccgcctcccgagcgctttgcttcctcaggccccgggctcggtgctcttccagagccctttctccactgtggcgctagacacatccaagaaagggaaggggaagccaccgaacatctccgcggtggatgtcaaacccaaagacgaggcggccctctacaagcacaagtgtaagtactgtagcaaggtttttgggactgatagctccttgcagatccacctccgctcccacactggagagagacccttcgtgtgctctgtctgtggtcatcgcttcaccaccaagggcaacctcaaggtgcactttcaccgacatccccaggtgaaggcaaacccccagctgtttgccgagttccaggacaaagtggcggccggcaatggcatcccctatgcactctctgtacctgaccccatagatgaaccgagtctttctttagacagcaaacctgtccttgtaaccacctctgtagggctacctcagaatctttcttcggggactaatcccaaggacctcacgggtggctccttgcccggtgacctgcagcctgggccttctccagaaagtgagggtggacccacactccctggggtgggaccaaactataattccccaagggctggtggcttccaagggagtgggacccctgagccagggtcagagaccctgaaattgcagcagttggtggagaacattgacaaggccaccactgatcccaacgaatgtctcatttgccaccgagtcttaagctgtcagagctccctcaagatgcattatcgcacccacaccggggagagaccgttccagtgtaagatctgtggccgagccttttctaccaaaggtaacctgaagacacaccttggggttcaccgaaccaacacatccattaagacgcagcattcgtgccccatctgccagaagaagttcactaatgccgtgatgctgcagcaacatattcggatgcacatgggcggtcagattcccaacacgcccctgccagagaatccctgtgactttacgggttctgagccaatgaccgtgggtgagaacggcagcaccggcgctatctgccatgatgatgtcatcgaaagcatcgatgtagaggaagtcagctcccaggaggctcccagcagctcctccaaggtccccacgcctcttcccagcatccactcggcatcacccacgctagggtttgccatgatggcttccttagatgccccagggaaagtgggtcctgccccttttaacctgcagcgccagggcagcagagaaaacggttccgtggagagcgatggcttgaccaacgactcatcctcgctgatgggagaccaggagtatcagagccgaagcccagatatcctggaaaccacatccttccaggcactctccccggccaatagtcaagccgaaagcatcaagtcaaagtctcccgatgctgggagcaaagcagagagctccgagaacagccgcactgagatggaaggtcggagcagtctcccttccacgtttatccgagccccgccgacctatgtcaaggttgaagttcctggcacatttgtgggaccctcgacattgtccccagggatgacccctttgttagcagcccagccacgccgacaggccaagcaacatggctgcacacggtgtgggaagaacttctcgtctgctagcgctcttcagatccacgagcggactcacactggagagaagccttttgtgtgcaacatttgtgggcgagcttttaccaccaaaggcaacttaaaggttcactacatgacacacggggcgaacaataactcagcccgccgtggaaggaagttggccatcgagaacaccatggctctgttaggtacggacggaaaaagagtctcagaaatctttcccaaggaaatcctggccccttcagtgaatgtggaccctgttgtgtggaaccagtacaccagcatgctcaatggcggtctggccgtgaagaccaatgagatctctgtgatccagagtgggggggttcctaccctcccggtttccttgggggccacctccgttgtgaataacgccactgtctccaagatggatggctcccagtcgggtatcagtgcagatgtggaaaaaccaagtgctactgacggcgttcccaaacaccagtttcctcacttcctggaagaaaacaagattgcggtcagctaagggagaacttgcgtggaaggagcaatgcagacacagtgaaatctctagaatctgctttgttttgtaagaactcatctcctcctgttttctttttcttactgatatgcaaatgatgtttactacgttggttgtgaccacaacctcaggcaagtgctacaatcacgattgttgctatgctgctttgcaaaaagttgaaaaaataaaaaaaaaatgcataccaaaa

SEQ ID NO: 204377 - protein, 476 aa, Artificial Sequence [sequence omitted]

SEQ ID NO: 204378 - DNA, 1431 bp, Artificial Sequence
  derived and/or modified sequence
atgggcagaaaggaggaggacgactgcagcagctggaagaagcagaccaccaacatcagaaagaccttcatcttcatggaggtgctgggcagcggcgccttcagcgaggtgttcctggtgaagcagagactgaccggcaagctgttcgccctgaagtgcatcaagaagagccccgccttcagagacagcagcctggagaacgagatcgccgtgctgaagaagatcaagcacgagaacatcgtgaccctggaggacatctacgagagcaccacccactactacctggtgatgcagctggtgagcggcggcgagctgttcgacagaatcctggagagaggcgtgtacaccgagaaggacgccagcctggtgatccagcaggtgctgagcgccgtgaagtacctgcacgagaacggcatcgtgcacagagacctgaagcccgagaacctgctgtacctgacccccgaggagaacagcaagatcatgatcaccgacttcggcctgagcaagatggagcagaacggcatcatgagcaccgcctgcggcacccccggctacgtggcccccgaggtgctggcccagaagccctacagcaaggccgtggactgctggagcatcggcgtgatcacctacatcctgctgtgcggctacccccccttctacgaggagaccgagagcaagctgttcgagaagatcaaggagggctactacgagttcgagagccccttctgggacgacatcagcgagagcgccaaggacttcatctgccacctgctggagaaggaccccaacgagagatacacctgcgagaaggccctgagccacccctggatcgacggcaacaccgccctgcacagagacatctaccccagcgtgagcctgcagatccagaagaacttcgccaagagcaagtggagacaggccttcaacgccgccgccgtggtgcaccacatgagaaagctgcacatgaacctgcacagccccggcgtgagacccgaggtggagaacagaccccccgagacccaggccagcgagaccagcagacccagcagccccgagatcaccatcaccgaggcccccgtgctggaccacagcgtggccctgcccgccctgacccagctgccctgccagcacggcagaagacccaccgcccccggcggcagaagcctgaactgcctggtgaacggcagcctgcacatcagcagcagcctggtgcccatgcaccagggcagcctggccgccggcccctgcggctgctgcagcagctgcctgaacatcggcagcaagggcaagagcagctactgcagcgagcccaccctgctgaagaaggccaacaagaagcagaacttcaagagcgaggtgatggtgcccgtgaaggccagcggcagcagccactgcagagccggccagaccggcgtgtgcctgatcatgtag

SEQ ID NO: 204379 - DNA, 1431 bp, Artificial Sequence
  derived and/or modified sequence
atggggaggaaggaagaggatgactgctccagctggaagaaacagacaaccaacattcgcaagacctttatcttcatggaggttctgggaagcggcgcattttctgaggttttcttagttaagcagagacttaccggcaaactgttcgcactgaaatgtattaagaaatccccagctttcagggactcttctctcgagaacgaaatcgcagtgctaaaaaagatcaaacatgagaacattgtgactctggaagacatatacgagagtacgacccactactatctggttatgcagttagtttccggcggagagttgtttgaccgcatcttagagcggggtgtctacacagaaaaagatgccagccttgtgatccaacaggtgctgagcgcggtgaaatatctgcacgagaacggtatcgtgcaccgagatctgaagccagaaaacctgctctacctgactcctgaggagaacagtaaaattatgatcaccgatttcggcctgtcaaaaatggagcagaatggtattatgagtactgcttgcgggacccccggctatgtcgctcctgaagttctggctcagaagccctatagcaaagcagttgactgttggagcatcggagtgattacatacatcctgctctgtggatatcccccattttacgaggaaaccgagtccaaactgtttgagaaaattaaagaaggatattatgaatttgagtctcccttttgggacgacatctcagagtccgcgaaagacttcatatgtcatttgctggagaaagacccaaacgagcgatatacatgtgagaaagctttgtcccacccgtggattgatggaaacacagcgctgcatcgagatatctaccctagcgtcagccttcagatccaaaaaaacttcgccaaaagcaaatggcgccaggcttttaatgctgcagctgtggttcaccatatgcgcaaactccacatgaacctgcattcgccaggagtcagacctgaggttgaaaacaggccccccgagacccaggctagcgaaaccagcaggccgtccagccctgagataactatcaccgaggcccctgtgctagaccactcagtggccctccctgcactcacccagctaccctgccagcacggccggcggccgactgctcctggcgggcgatcacttaactgtctagtgaacggcagtctgcatatctcctcttctctggtgcccatgcatcagggctccctcgcagccgggccgtgcggatgttgtagctcctgtctgaacatcggtagtaagggcaaaagttcgtactgtagcgaacccactctgctgaagaaggcaaacaaaaagcagaacttcaaatccgaggttatggtcccagtgaaggcgagcggctcgtcacactgtcgcgcagggcagactggcgtgtgtctcataatgtag

SEQ ID NO: 204380 - DNA, 1431 bp, Artificial Sequence
  derived and/or modified sequence
atggggaggaaggaggaagatgattgctcaagctggaagaaacaaacaacgaatatcagaaagaccttcatcttcatggaagtcctggggtccggagctttctctgaagtgttcctggtgaagcaaagattgacaggtaaactctttgctctgaaatgcattaagaaaagccccgccttcagagattcaagtttggagaacgagattgctgtgctgaaaaaaattaagcacgagaacattgtgaccctcgaggacatctatgaaagcacgactcactattatctggtgatgcagcttgtttcaggcggcgaacttttcgatcggatcctggagaggggcgtctatactgaaaaggatgcctcattggtcatccaacaagtgctgtctgccgttaagtacctgcacgagaatggcattgtacaccgcgacctgaaacctgagaatcttctgtacctcacccccgaagaaaactcgaaaatcatgatcacagacttcggtctgagtaagatggaacagaacggaattatgagcactgcctgtggcacacccggttatgtagcccctgaggtgctggctcagaagccatactccaaggctgtggattgctggtcaattggagtcattacctacatccttttgtgtgggtaccccccattctacgaggagaccgagagcaagctgtttgaaaagattaaagagggatattatgagtttgaatcacctttttgggatgatatctcagaaagcgccaaagacttcatctgtcatcttttagagaaggatcccaatgagagatatacctgcgaaaaggccctgagtcacccttggatagatgggaacacagcattgcaccgcgacatctacccgagcgtgtccctgcaaattcaaaaaaacttcgccaaaagtaaatggcgccaggccttcaatgccgctgcggtagtccaccatatgcgcaagctccacatgaatcttcactctcctggggtaagaccagaggtggaaaacaggccccctgaaacacaggcaagtgagacatcccggccctctagtcccgagattactatcacggaggcccctgtccttgaccatagcgtagctctccccgcattgacacagcttccttgccaacacggccggagacccaccgcacccggaggtcgcagtctgaactgtctggttaacggatctttgcatatcagtagctctctggtccctatgcatcagggttcacttgctgctggaccttgtggatgttgtagcagctgcttgaatattgggagcaagggaaagtccagctactgttctgagccaactctgctgaagaaggctaacaaaaagcaaaattttaagtccgaggttatggtgcccgtcaaggcctcgggctcctcccactgccgagcagggcagaccggcgtctgcctcatcatgtag

SEQ ID NO: 204381 - DNA, 1431 bp, Artificial Sequence
  derived and/or modified sequence
atgggcaggaaggaggaggatgactgcagctcctggaagaagcagaccaccaacatcaggaagaccttcatcttcatggaggtgctgggcagcggggccttcagcgaggtgttcctggtgaagcagaggctgaccgggaagctgtttgccctgaagtgcatcaagaagagccctgccttccgggacagcagcctggagaatgaaattgctgtgctgaagaagatcaagcatgagaacatcgtgaccctggaggacatctatgagagcaccacccactactacctggtgatgcagctggtgtctggaggagagctgtttgaccgcatcctggagcggggcgtgtacacagagaaggatgccagcctggtgatccagcaggtgctgtctgctgtgaagtacctgcatgaaaatggaattgtgcaccgggacctgaagccagagaacctgctgtacctgaccccagaggagaacagcaagatcatgatcacagactttggcctgagcaagatggagcagaatggcatcatgagcacagcctgtggcaccccaggctacgtggcccctgaggtgctggcccagaagccctacagcaaggctgtggactgctggagcattggagtcatcacctacatcctgctgtgtggctacccacccttctatgaggagacagagagcaagctgtttgagaagatcaaggagggctactatgaatttgagagccccttctgggatgacatcagcgagagcgccaaggacttcatctgccacctgctggagaaggaccccaatgaaagatacacctgtgagaaggccctgagccacccctggattgatggcaacacagccctgcaccgggacatctaccccagcgtgtccctgcagatccagaagaactttgccaagagcaagtggaggcaggccttcaatgctgctgctgtggtgcaccacatgaggaagctgcacatgaacctgcacagccctggggtgcggcctgaggtggagaacagacctcctgagacccaggccagcgagaccagccggcccagcagccctgagatcaccatcacagaggcccctgtgctggaccacagcgtggccctgcctgccctgacccagctgccctgccagcacggcagaagacccacagcccctgggggccgcagcctgaactgcctggtgaatggcagcctgcacatcagcagcagcctggtgcccatgcaccagggcagcctggccgccggcccctgtggctgctgcagcagctgcctgaacatcggcagcaagggcaagagcagctactgcagcgagcccaccctgctgaagaaggccaacaagaagcagaacttcaagtctgaggtgatggtgcctgtgaaggccagcggcagcagccactgcagagctggccagacaggagtgtgcctgatcatgtag

SEQ ID NO: 204382 - DNA, 1431 bp, Artificial Sequence
  derived and/or modified sequence
atgggccggaaggaggaggacgactgcagcagctggaagaagcagacaacaaacattcggaaaactttcatctttatggaggtgcttggctcgggggccttttccgaggtgttcctagttaaacagcgcctcactggcaagctgttcgcactcaagtgtatcaaaaaatctcccgcatttcgggactcctctttggaaaacgaaattgcggtgctgaagaaaattaagcatgaaaatatcgttaccctggaggacatctacgaatctaccacccactattatctggtcatgcagctcgtgtcaggcggggagctgtttgatcgtattctggaacgtggtgtgtacacagaaaaggatgcgagcctggtgatacagcaagttctctctgctgtcaaatacttgcacgaaaacggcatcgtgcaccgtgacttgaagccggagaaccttctgtatttaacacctgaggagaatagcaagatcatgattaccgatttcggactcagcaagatggagcagaacggcatcatgagcacagcgtgtgggacacctggatacgtggctcccgaggtccttgcccagaaaccctactctaaggctgtggactgttggtccatcggagtcataacctacattctgctgtgcggctaccccccattctatgaagagaccgagagcaagctgttcgaaaaaatcaaggaggggtactacgagttcgagtcacccttctgggacgatatttctgaatcagccaaggactttatctgccatctcctggagaaggaccctaacgaaaggtacacctgcgagaaggccctctcccacccatggattgatggaaacactgctctgcatagagatatctatccatctgtcagcttgcaaatacagaaaaacttcgctaaatcgaaatggagacaggcctttaatgcagccgctgtcgtccaccacatgcggaagctccacatgaacttgcactcacctggggtgagacccgaagtcgagaaccggccaccagagactcaagccagtgaaacatctcggccctcatcccccgaaattactatcacagaggccccagtgctcgatcatagcgtagcattaccggccctgacccagctgccgtgccagcatgggcggaggcccactgcaccaggcggtagatccctgaattgtctcgtgaacggctccctgcacatttcaagttcccttgtccctatgcaccagggatcactcgccgctggcccctgtgggtgttgttcaagctgcttaaatattgggagcaaaggtaagagctcatattgttctgagcctactctccttaagaaggcaaacaagaagcagaacttcaagtctgaagtgatggtgcccgtgaaagcttcagggagctcccactgtcgggccggacagaccggcgtgtgcctcatcatgtag

SEQ ID NO: 204383 - DNA, 1431 bp, Artificial Sequence
  derived and/or modified sequence
atgggccggaaggaggaggacgactgcagcagctggaagaagcagaccaccaatattcgcaaaacatttatttttatggaagtgctcggctccggcgcattctcagaggtgttccttgtcaaacagaggctcaccggaaaactgttcgccctcaagtgtatcaaaaaatctccagcgttcagagattcatcactcgagaatgaaatcgctgtcctcaagaaaatcaaacatgaaaacattgtcaccttggaagacatctatgaatccacaacccattactacctcgtgatgcagcttgtgtccggtggcgagctatttgatcgcatcctcgagcgcggtgtgtataccgagaaagatgcatcattggtaattcagcaggtattaagcgccgttaaatatcttcatgagaatggaattgtacaccgggatctcaagcctgaaaatctcctgtacctgacccccgaggaaaactcaaagattatgatcaccgacttcggactgagcaaaatggaacagaatggaatcatgtcgactgcctgcgggacgccggggtacgtggccccggaagtgctggcacagaaaccttatagcaaggctgttgattgctggagtatcggggtgatcacctacatcctgctatgtggctaccctcccttctatgaagaaacggaaagtaaattgttcgagaaaattaaagagggttattatgagttcgagagtccattttgggacgatatcagcgagtccgccaaggatttcatttgtcacctgttagagaaagaccctaatgaaagatatacatgtgagaaagcactctcgcacccctggattgacggaaacactgccctgcaccgggatatctatccttccgtgagtctacagatccagaagaatttcgccaagagcaagtggagacaggcctttaacgctgctgcagtggtccaccatatgcgaaaacttcacatgaacctgcacagcccaggcgtacgaccagaggtggagaatagacccccagagacccaggcaagcgagacgagcagaccgtccagtccagaaatcacaatcaccgaggccccggtgctcgatcacagcgtggcacttcctgcgctgactcagcttccatgccagcacgggcgccggccaaccgcaccaggagggagaagcttgaattgcttagtgaacggtagcctgcacatcagctcttctttagtgcccatgcaccaaggctcgctcgccgccggtccttgcggctgctgctctagctgcctgaacattggttcaaaaggcaagtctagttactgctccgagccgacactgttaaagaaagcaaataagaagcagaacttcaaatctgaagtcatggttccggtgaaggcctccgggagttctcactgccgagccggtcagacaggtgtctgccttatcatgtag

SEQ ID NO: 204384 - DNA, 1431 bp, Artificial Sequence
  derived and/or modified sequence
atgggcagaaaagaggaagacgactgctctagttggaaaaagcagaccaccaatattcgaaagactttcatattcatggaggtgctgggcagcggagctttctccgaagtgttcctggtgaaacagaggctgaccggtaaactgtttgctctaaagtgtatcaaaaaatcccctgctttcagagatagtagtctagagaatgagattgccgtcctgaaaaagatcaagcatgagaatattgtcacccttgaagacatatatgagagtacaacacattattatctggtgatgcaattagtttcgggtggggagctgttcgacagaatcctggaaagaggggtatatactgagaaggacgcttcactcgtgatccagcaggttcttagcgccgttaagtatctgcatgagaacggaatagtgcatagggatctgaaacccgagaatcttctttacctgaccccagaagagaattccaagatcatgatcaccgacttcgggctttccaaaatggagcagaacgggattatgagtaccgcatgtggaaccccagggtacgtggcacccgaggtgttagcccaaaaaccatacagcaaggccgtagattgctggtctatcggagtcatcacatacattctcctgtgtgggtaccctcctttctacgaggaaaccgagagcaaattattcgagaaaattaaagagggatactacgagttcgaaagccctttttgggacgatatttctgagagtgccaaagatttcatctgccacttactggagaaagacccaaatgagaggtatacttgcgaaaaagccctgtcacatccttggattgacggcaacaccgctctgcacagggacatctatcccagtgtatcccttcaaatccaaaagaatttcgctaagagcaagtggaggcaggctttcaatgccgctgccgtggtgcatcatatgcggaagctgcatatgaatctccacagtccaggggttcgcccagaggtggaaaaccgcccaccagagactcaggcttccgaaacttcgagacccagttccccagaaataaccattactgaggctcctgtactcgaccattcagtggccctgcctgccctgacacaactgccctgccagcacgggcgaagacctaccgcacccggtggacgcagtctgaattgcctcgtcaacgggtcattgcacatctcttcctccctcgtccccatgcatcaagggagcttagcggcaggcccttgtggctgctgttcgtcttgcctgaacatagggagtaaagggaagtcctcatactgctcagagccaactcttcttaagaaagcgaacaaaaagcagaacttcaagtctgaggtcatggttcccgtgaaagccagtgggtccagccactgcagggctggacagactggagtttgtctgatcatgtag

SEQ ID NO: 204385 - DNA, 1431 bp, Artificial Sequence
  derived and/or modified sequence
atggggaggaaagaggaggacgactgcagctcttggaagaagcaaaccactaatattagaaagacattcattttcatggaagtccttggaagcggagcattctccgaggtgtttctcgtgaagcagcgactgacaggcaagctgtttgccctgaagtgtatcaagaaaagtccagcattcagagactctagccttgagaatgagatcgccgttctgaaaaagatcaagcacgaaaatatcgtaaccctagaagacatttacgaatcaaccacacactattatctggtcatgcagcttgtctcagggggagaactgttcgaccgtattctggagcgcggtgtatacacggaaaaagatgcctcactggtgattcagcaggtgttatcagcagttaaatatctacacgagaatggaattgtacatcgggacctgaagccagagaacctgctctatctgacacccgaggagaattcgaagatcatgatcacagactttggcctgtcgaagatggaacagaatggcatcatgagcacagcctgcggcactccaggatacgttgctcctgaagtgctggcccagaaaccctacagtaaagccgtcgattgctggtccataggagtgattacatacatccttctgtgcggttatccacccttctacgaggaaaccgaatcgaaactctttgagaagatcaaggaaggctactatgaatttgagtctcccttctgggatgatatatctgagtctgcaaaagattttatctgccatctgcttgagaaggatccaaacgagaggtatacatgcgaaaaagccctctctcacccgtggatcgatggaaacaccgctcttcaccgtgatatctatccctccgtgagcttgcaaatccagaaaaatttcgctaagagcaaatggaggcaagcatttaatgctgctgccgtagtgcaccacatgcgaaaacttcatatgaatctacatagccccggagtacgccctgaggtggaaaatagacctcccgaaacccaggccagcgagacaagtaggccctcatcgcccgaaattactattactgaggccccagtgctggaccacagtgtcgccctccccgctctgacccagctgccgtgtcagcatgggagaagaccaaccgctcctgggggacggagcctgaattgtctggttaatggatccctgcacattagctccagtctggtgcctatgcatcagggctccttggccgctggcccatgtggttgctgttccagctgcttgaatatcggttcaaaaggaaaatcaagctactgcagcgagccgacactgcttaagaaagccaataagaagcaaaacttcaaatccgaggttatggtgccggttaaagcttcagggtcttctcactgcagagctggtcagactggagtgtgtctgattatgtag

SEQ ID NO: 204386 - DNA, 1431 bp, Artificial Sequence
  derived and/or modified sequence
atgggccggaaggaagaagacgactgctcttcctggaaaaagcagaccacaaacatcagaaagacctttattttcatggaggtgctgggctctggcgcctttagtgaagtctttttggtaaagcagagacttaccggcaaactattcgcgttaaaatgcatcaaaaaatcccctgctttcagagatagcagtctcgagaatgaaatcgcagtacttaaaaagatcaaacatgaaaacatcgtgaccctagaagacatttatgagtcaacaacacattactacctggtgatgcagcttgtgagtggcggggagctctttgaccggatcttggaaagaggggtttacacggaaaaggatgcttcactggttatacagcaggtcctctccgccgtgaagtacctccacgagaatggcatcgttcacagagatctgaagccagagaatctgctttacctgacccctgaggaaaattccaaaataatgatcactgacttcggactgtcaaagatggagcagaacggcataatgtcaactgcctgcggaacccctggctacgtagctcccgaggtactcgcacagaagccctacagcaaggcagtggactgttggtcaatcggtgtcatcacatatattctgctctgcgggtatccacccttctatgaggagactgagtcaaaactgttcgagaaaatcaaagagggttattatgaattcgagagtccgttctgggatgacatatccgagtcagcaaaagacttcatctgtcaccttctggaaaaagaccctaacgaacgttatacatgtgaaaaggctctttcccatccatggattgacgggaacactgcactacaccgtgatatctacccaagcgtttccttgcagatccagaaaaattttgccaagagtaaatggaggcaagcgtttaacgccgctgcagtcgtgcatcacatgcggaaattacacatgaacctgcactcaccaggcgtgcggcccgaagttgaaaacaggccaccagagacccaagcatccgagacgagtcgaccctcaagcccggagattaccataaccgaggcacctgtacttgatcattctgtcgcattacccgctctgactcaattgccctgtcagcatggacgccgtcccactgcccctggcggtcgctcgctgaactgcctagtaaacggatctcttcacatcagctcgagcttagtgcctatgcatcaaggttccttggccgccgggccttgtggctgctgcagctcctgtctgaatatagggagcaagggcaaatcttcatactgtagcgagcctacactcttgaagaaggcgaacaaaaaacagaattttaaatccgaagtgatggtcccggtgaaagcttctggatccagccattgccgggccggtcagactggcgtgtgccttatcatgtag

SEQ ID NO: 204387 - DNA, 1431 bp, Artificial Sequence
  derived and/or modified sequence
atgggccgaaaggaagaggatgattgcagttcatggaagaaacagaccaccaacattagaaaaaccttcatctttatggaggttctgggatctggagcattttcagaggtatttttagtcaaacagagacttacggggaagttatttgctctgaaatgcattaaaaaaagtccagccttccgagattcatcccttgagaatgagatcgcagttctgaagaaaattaaacatgaaaatattgtaaccctagaagatatttatgagagcaccacacactattatctggtgatgcagttggtctctgggggggaactctttgatcgcatactcgagcgaggagtttatacggaaaaggacgcctcactggtgattcaacaagtcttgtcagcagtcaaatacctccacgagaacggtatcgtccaccgcgacctgaaaccagagaatctgctttacctgaccccagaagagaatagcaaaataatgatcacggactttggactcagcaaaatggaacagaacggcattatgtcgactgcatgcggtacgcccgggtacgtggcgcctgaagttttggcacagaaaccctactcgaaagctgttgattgttggtccatcggcgtcatcacgtacatactcttatgcggctaccccccattttacgaagagacagaaagtaagttattcgagaagatcaaggagggctattacgagtttgagagcccattctgggacgacatctctgagagcgcaaaggattttatttgtcacttactagaaaaggatcctaacgaacgctacacgtgcgaaaaggccttgtcacacccttggattgacgggaatactgctctccaccgggacatttaccccagtgtgtccttacagattcagaaaaattttgctaaaagtaaatggaggcaggcttttaacgctgctgccgtcgtgcaccatatgcgcaaactacatatgaaccttcactcaccaggcgtccggcctgaggtggagaaccgaccacccgagacccaagcaagcgaaacatctcggccgtccagccctgagattaccattaccgaagctcctgtcttagaccactccgttgcactgccagcactcacacaactcccatgccaacacggccgacgaccaaccgcacccgggggacgctctttaaattgcctagtcaatggatctctgcacatttcttccagccttgttccaatgcatcaaggctcactcgctgctggcccatgcggctgttgttcctcctgtctcaatattggatcaaaaggcaaatcttcctattgttctgaaccaaccttattgaagaaggcaaacaagaagcagaattttaagagcgaagtcatggttccagttaaagcaagtggtagctcacactgtcgagcgggtcaaacaggagtgtgcctaatcatgtag

SEQ ID NO: 204388 - DNA, 2612 bp, Artificial Sequence
  derived and/or modified sequence
acagacctgtaggagctggagtgggagctcaagcaggattcttcccgagtccctgggtaagacaaccctgcttcttttcttggctttagagggtctccttgcttaatgggaagcgtgcagcacctagtgagtggatttgaagagccactttgtaagcaacttgggcatttatttcagccccagttccagtcttccctgactcttttggcatcaaggcatcctcagaagcttcaactctggaggcaatgggtcgaaaggaagaagatgactgcagttcctggaagaaacagaccaccaacatccggaaaaccttcatttttatggaagtgctgggatcaggagctttctcagaagttttcctggtgaagcaaagactgactgggaagctctttgctctgaagtgcatcaagaagtcacctgccttccgggacagcagcctggagaatgagattgctgtgttgaaaaagatcaagcatgaaaacattgtgaccctggaggacatctatgagagcaccacccactactacctggtcatgcagcttgtttctggtggggagctctttgaccggatcctggagcggggtgtctacacagagaaggatgccagtctggtgatccagcaggtcttgtcggcagtgaaatacctacatgagaatggcatcgtccacagagacttaaagcccgaaaacctgctttaccttacccctgaagagaactctaagatcatgatcactgactttggtctgtccaagatggaacagaatggcatcatgtccactgcctgtgggaccccaggctacgtggctccagaagtgctggcccagaaaccctacagcaaggctgtggattgctggtccatcggcgtcatcacctacatattgctctgtggataccccccattctatgaagaaacggagtctaagcttttcgagaagatcaaggagggctactatgagtttgagtctccattctgggatgacatttctgagtcagccaaggactttatttgccacttgcttgagaaggatccgaacgagcggtacacctgtgagaaggccttgagtcatccctggattgacggaaacacagccctccaccgggacatctacccatcagtcagcctccagatccagaagaactttgctaagagcaagtggaggcaagccttcaacgcagcagctgtggtgcaccacatgaggaagctacacatgaacctgcacagcccgggcgtccgcccagaggtggagaacaggccgcctgaaactcaagcctcagaaacctctagacccagctcccctgagatcaccatcaccgaggcacctgtcctggaccacagtgtagcactccctgccctgacccaattaccctgccagcatggccgccggcccactgcccctggtggcaggtccctcaactgcctggtcaatggctccctccacatcagcagcagcctggtgcccatgcatcaggggtccctggccgccgggccctgtggctgctgctccagctgcctgaacattgggagcaaaggaaagtcctcctactgctctgagcccacactcctcaaaaaggccaacaaaaaacagaacttcaagtcggaggtcatggtaccagttaaagccagtggcagctcccactgccgggcagggcagactggagtctgtctcattatgtgattcctggagcctgtgcctatgtcactgcaattttcaggagacatattcaactcctctgctcttccaaacctggtgtctatccggcagagggaggaaggcagagcaagtggagcagggcttagcaggagcagtttctggccagaagcaccagcctgctgccagcggggcagcccctcataggaggcccaggagggagccccaaggcgtagaagccttgttgaagctgtgagcaggagaagcggtgcccaccagcttccaggtctccctgacctgcctgctctatgccccacaccctacgtgccgtggctctgtgcagtgtacgtagatagctctcgcctgggtctgtgctgtttgtcgtgaaaagcttaatgggctggccaggctgtgtcaccttctccaagcaaagccatatggagcatctacccagactcccactctgcacacactcactcccacctctcaagcctccaacctcttggccagattgggctcattaatgtcgttgcctgcccatctgcatgaatgacaggcagctccccatggtggtctgcctgtgagctcttcaagttctaatccttaactccaggattagctcccaagtgcgctgagacccagccagcacacttctggcccttctccctgcctcaatctaaaagcagtgccacaccctccaaagtggaatagaaagaagttcatgagtaagggctgcaaggaattcttatcctggccacatgtcctccgtgcacacacccaatggagttaaccttggaagttgactattttaatgtctgccaggagttctaatcctgcctctgttcccttttctctccttgaaagtccagcacaccattcttgtccttccccagtttcctcgccctccacccctccagcttcatgctcagtgttgtgcttaataaaatggacatatttttctct

SEQ ID NO: 204389 - DNA, 2440 bp, Artificial Sequence
  derived and/or modified sequence
gagctggagtgggagctcaagcaggattcttcccgagtccctggcatcctcagaagcttcaactctggaggcaatgggtcgaaaggaagaagatgactgcagttcctggaagaaacagaccaccaacatccggaaaaccttcatttttatggaagtgctgggatcaggagctttctcagaagttttcctggtgaagcaaagactgactgggaagctctttgctctgaagtgcatcaagaagtcacctgccttccgggacagcagcctggagaatgagattgctgtgttgaaaaagatcaagcatgaaaacattgtgaccctggaggacatctatgagagcaccacccactactacctggtcatgcagcttgtttctggtggggagctctttgaccggatcctggagcggggtgtctacacagagaaggatgccagtctggtgatccagcaggtcttgtcggcagtgaaatacctacatgagaatggcatcgtccacagagacttaaagcccgaaaacctgctttaccttacccctgaagagaactctaagatcatgatcactgactttggtctgtccaagatggaacagaatggcatcatgtccactgcctgtgggaccccaggctacgtggctccagaagtgctggcccagaaaccctacagcaaggctgtggattgctggtccatcggcgtcatcacctacatattgctctgtggataccccccattctatgaagaaacggagtctaagcttttcgagaagatcaaggagggctactatgagtttgagtctccattctgggatgacatttctgagtcagccaaggactttatttgccacttgcttgagaaggatccgaacgagcggtacacctgtgagaaggccttgagtcatccctggattgacggaaacacagccctccaccgggacatctacccatcagtcagcctccagatccagaagaactttgctaagagcaagtggaggcaagccttcaacgcagcagctgtggtgcaccacatgaggaagctacacatgaacctgcacagcccgggcgtccgcccagaggtggagaacaggccgcctgaaactcaagcctcagaaacctctagacccagctcccctgagatcaccatcaccgaggcacctgtcctggaccacagtgtagcactccctgccctgacccaattaccctgccagcatggccgccggcccactgcccctggtggcaggtccctcaactgcctggtcaatggctccctccacatcagcagcagcctggtgcccatgcatcaggggtccctggccgccgggccctgtggctgctgctccagctgcctgaacattgggagcaaaggaaagtcctcctactgctctgagcccacactcctcaaaaaggccaacaaaaaacagaacttcaagtcggaggtcatggtaccagttaaagccagtggcagctcccactgccgggcagggcagactggagtctgtctcattatgtgattcctggagcctgtgcctatgtcactgcaattttcaggagacatattcaactcctctgctcttccaaacctggtgtctatccggcagagggaggaaggcagagcaagtggagcagggcttagcaggagcagtttctggccagaagcaccagcctgctgccagcggggcagcccctcataggaggcccaggagggagccccaaggcgtagaagccttgttgaagctgtgagcaggagaagcggtgcccaccagcttccaggtctccctgacctgcctgctctatgccccacaccctacgtgccgtggctctgtgcagtgtacgtagatagctctcgcctgggtctgtgctgtttgtcgtgaaaagcttaatgggctggccaggctgtgtcaccttctccaagcaaagccatatggagcatctacccagactcccactctgcacacactcactcccacctctcaagcctccaacctcttggccagattgggctcattaatgtcgttgcctgcccatctgcatgaatgacaggcagctccccatggtggtctgcctgtgagctcttcaagttctaatccttaactccaggattagctcccaagtgcgctgagacccagccagcacacttctggcccttctccctgcctcaatctaaaagcagtgccacaccctccaaagtggaatagaaagaagttcatgagtaagggctgcaaggaattcttatcctggccacatgtcctccgtgcacacacccaatggagttaaccttggaagttgactattttaatgtctgccaggagttctaatcctgcctctgttcccttttctctccttgaaagtccagcacaccattcttgtccttccccagtttcctcgccctccacccctccagcttcatgctcagtgttgtgcttaataaaatggacatatttttctct

SEQ ID NO: 204390 - RNA, 1431 nt, Artificial Sequence
  derived and/or modified sequence
augggccggaaggaagaagacgacugcucuuccuggaaaaagcagaccacaaacaucagaaagaccuuuauuuucauggaggugcugggcucuggcgccuuuagugaagucuuuuugguaaagcagagacuuaccggcaaacuauucgcguuaaaaugcaucaaaaaauccccugcuuucagagauagcagucucgagaaugaaaucgcaguacuuaaaaagaucaaacaugaaaacaucgugacccuagaagacauuuaugagucaacaacacauuacuaccuggugaugcagcuugugaguggcggggagcucuuugaccggaucuuggaaagagggguuuacacggaaaaggaugcuucacugguuauacagcagguccucuccgccgugaaguaccuccacgagaauggcaucguucacagagaucugaagccagagaaucugcuuuaccugaccccugaggaaaauuccaaaauaaugaucacugacuucggacugucaaagauggagcagaacggcauaaugucaacugccugcggaaccccuggcuacguagcucccgagguacucgcacagaagcccuacagcaaggcaguggacuguuggucaaucggugucaucacauauauucugcucugcggguauccacccuucuaugaggagacugagucaaaacuguucgagaaaaucaaagaggguuauuaugaauucgagaguccguucugggaugacauauccgagucagcaaaagacuucaucugucaccuucuggaaaaagacccuaacgaacguuauacaugugaaaaggcucuuucccauccauggauugacgggaacacugcacuacaccgugauaucuacccaagcguuuccuugcagauccagaaaaauuuugccaagaguaaauggaggcaagcguuuaacgccgcugcagucgugcaucacaugcggaaauuacacaugaaccugcacucaccaggcgugcggcccgaaguugaaaacaggccaccagagacccaagcauccgagacgagucgacccucaagcccggagauuaccauaaccgaggcaccuguacuugaucauucugucgcauuacccgcucugacucaauugcccugucagcauggacgccgucccacugccccuggcggucgcucgcugaacugccuaguaaacggaucucuucacaucagcucgagcuuagugccuaugcaucaagguuccuuggccgccgggccuuguggcugcugcagcuccugucugaauauagggagcaagggcaaaucuucauacuguagcgagccuacacucuugaagaaggcgaacaaaaaacagaauuuuaaauccgaagugauggucccggugaaagcuucuggauccagccauugccgggccggucagacuggcgugugccuuaucauguag

SEQ ID NO: 204391 - RNA, 1431 nt, Artificial Sequence
  derived and/or modified sequence
augggccgaaaggaagaggaugauugcaguucauggaagaaacagaccaccaacauuagaaaaaccuucaucuuuauggagguucugggaucuggagcauuuucagagguauuuuuagucaaacagagacuuacggggaaguuauuugcucugaaaugcauuaaaaaaaguccagccuuccgagauucaucccuugagaaugagaucgcaguucugaagaaaauuaaacaugaaaauauuguaacccuagaagauauuuaugagagcaccacacacuauuaucuggugaugcaguuggucucugggggggaacucuuugaucgcauacucgagcgaggaguuuauacggaaaaggacgccucacuggugauucaacaagucuugucagcagucaaauaccuccacgagaacgguaucguccaccgcgaccugaaaccagagaaucugcuuuaccugaccccagaagagaauagcaaaauaaugaucacggacuuuggacucagcaaaauggaacagaacggcauuaugucgacugcaugcgguacgcccggguacguggcgccugaaguuuuggcacagaaacccuacucgaaagcuguugauuguugguccaucggcgucaucacguacauacucuuaugcggcuaccccccauuuuacgaagagacagaaaguaaguuauucgagaagaucaaggagggcuauuacgaguuugagagcccauucugggacgacaucucugagagcgcaaaggauuuuauuugucacuuacuagaaaaggauccuaacgaacgcuacacgugcgaaaaggccuugucacacccuuggauugacgggaauacugcucuccaccgggacauuuaccccaguguguccuuacagauucagaaaaauuuugcuaaaaguaaauggaggcaggcuuuuaacgcugcugccgucgugcaccauaugcgcaaacuacauaugaaccuucacucaccaggcguccggccugagguggagaaccgaccacccgagacccaagcaagcgaaacaucucggccguccagcccugagauuaccauuaccgaagcuccugucuuagaccacuccguugcacugccagcacucacacaacucccaugccaacacggccgacgaccaaccgcacccgggggacgcucuuuaaauugccuagucaauggaucucugcacauuucuuccagccuuguuccaaugcaucaaggcucacucgcugcuggcccaugcggcuguuguuccuccugucucaauauuggaucaaaaggcaaaucuuccuauuguucugaaccaaccuuauugaagaaggcaaacaagaagcagaauuuuaagagcgaagucaugguuccaguuaaagcaagugguagcucacacugucgagcgggucaaacaggagugugccuaaucauguag

SEQ ID NO: 204392 - protein, 1063 aa, Artificial Sequence
  derived and/or modified sequence
MPHLPLASFRPPFWGLRHSRGLPRFHSVSTQSEPHGSPISRRNREAKQKRLREKQATLEAEIAGESKSPAESIKAWRPKELVLYEIPTKPGEKKDVSGPLPPAYSPRYVEAAWYPWWVREGFFKPEYQARLPQATGETFSMCIPPPNVTGSLHIGHALTVAIQDALVRWHRMRGDQVLWVPGSDHAGIATQAVVEKQLWKERGVRRHELSREAFLREVWQWKEAKGGEICEQLRALGASLDWDRECFTMDVGSSVAVTEAFVRLYKAGLLYRNHQLVNWSCALRSAISDIEVENRPLPGHTQLRLPGCPTPVSFGLLFSVAFPVDGEPDAEVVVGTTRPETLPGDVAVAVHPDDSRYTHLHGRQLRHPLMGQPLPLITDYAVQPHVGTGAVKVTPAHSPADAEMGARHGLSPLNVIAEDGTMTSLCGDWLQGLHRFVAREKIMSVLSEWGLFRGLQNHPMVLPICSRSGDVIEYLLKNQWFVRCQEMGARAAKAVESGALELSPSFHQKNWQHWFSHIGDWCVSRQLWWGHQIPAYLVVEDHAQGEEDCWVVGRSEAEAREVAAELTGRPGAELTLERDPDVLDTWFSSALFPFSALGWPQETPDLARFYPLSLLETGSDLLLFWVGRMVMLGTQLTGQLPFSKVLLHPMVRDRQGRKMSKSLGNVLDPRDIISGVEMQVLQEKLRSGNLDPAELAIVAAAQKKDFPHGIPECGTDALRFTLCSHGVQAGDLHLSVSEVQSCRHFCNKIWNALRFILNALGEKFVPQPAEELSPSSPMDAWILSRLALAAQECERGFLTRELSLVTHALHHFWLHNLCDVYLEAVKPVLWHSPRPLGPPQVLFSCADLGLRLLAPLMPFLAEELWQRLPPRPGCPPAPSISVAPYPSACSLEHWRQPELERRFSRVQEVVQVLRALRATYQLTKARPRVLLQSSEPGDQGLFEAFLEPLGTLGYCGAVGLLPPGAAAPSGWAQAPLSDTAQVYMELQGLVDPQIQLPLLAARRYKLQKQLDSLTARTPSEGEAGTQRQQKLSSLQLELSKLDKAASHLQQLMDEPPAPGSPEL

SEQ ID NO: 204393 - protein, 115 aa, Artificial Sequence
  derived and/or modified sequence
MPHLPLASFRPPFWGLRHSRGLPRFHSVSTQSEPHGSPISRRNREAKQKRLREKQATLEAEIAGESKSPAESIKAWRPKELVLYEIPTKPGEKKDVSGPLPPAYSPRYVEAAWYP

SEQ ID NO: 204394 - protein, 326 aa, Artificial Sequence
  derived and/or modified sequence
MPHLPLASFRPPFWGLRHSRGLPRFHSVSTQSEPHGSPISRRNREAKQKRLREKQATLEAEIAGESKSPAESIKAWRPKELVLYEIPTKPGEKKDVSGPLPPAYSPRYVEAAWYPWWVREGFFKPEYQARLPQATGETFSMCIPPPNVTGSLHIGHALTVAIQDALVRWHRMRGDQVLWVPGSDHAGIATQAVVEKQLWKERGVRRHELSREAFLREVWQWKEAKGGEICEQLRALGASLDWDRECFTMDVGSSVAVTEAFVRLYKAGLLYRNHQLVNWSCALRSAISDIEVENRPLPGHTQLRLPGCPTPVSFGLLFSVAFPVDG

SEQ ID NO: 204395 - protein, 257 aa, Artificial Sequence
  derived and/or modified sequence
MPHLPLASFRPPFWGLRHSRGLPRFHSVSTQSEPHGSPISRRNREAKQKRLREKQATLEAEIAGESKSPAESIKAWRPKELVLYEIPTKPGEKKDVSGPLPPAYSPRYVEAAWYPWWVREGFFKPEYQARLPQATGETFSMCIPPPNVTGSLHIGHALTVAIQDALVRWHRMRGDQVLWVPGSDHAGIATQAVVEKQLWKERGVRRHELSREAFLREVWQWKEAKGGEICEQLRALGASLDWDRVFYHGCWLLSGCD

SEQ ID NO: 204396 - protein, 1063 aa, Artificial Sequence
  derived and/or modified sequence
MPHLPLASFRPPFWGLRHSRGLPRFHSVSTQSEPHGSPISRRNREAKQKRLREKQATLEAEIAGESKSPAESIKAWRPKELVLYEIPTKPGEKKDVSGPLPPAYSPRYVEAAWYPWWVREGFFKPEYQARLPQATGETFSMCIPPPNVTGSLHIGHALTVAIQDALVRWHRMRGDQVLWVPGSDHAGIATQAVVEKQLWKERGVRRHELSREAFLREVWQWKEAKGGEICEQLRALGASLDWDRECFTMDVGSSVAVTEAFVRLYKAGLLYRNHQLVNWSCALRSAISDIEVENRPLPGHTQLRLPGCPTPVSFGLLFSVAFPVDGEPDAEVVVGTTRPETLPGDVAVAVHPDDSRYTHLHGRQLRHPLMGQPLPLITDYAVQPHVGTGAVKVTPAHSPADAEMGARHGLSPLNVIAEDGTMTSLCGDWLQGLHRFVAREKIMSVLSERGLFRGLQNHPMVLPICSRSGDVIEYLLKNQWFVRCQEMGARAAKAVESGALELSPSFHQKNWQHWFSHIGDWCVSRQLWWGHQIPAYLVVEDHAQGEEDCWVVGRSEAEAREVAAELTGRPGAELTLERDPDVLDTWFSSALFPFSALGWPQETPDLARFYPLSLLETGSDLLLFWVGRMVMLGTQLTGQLPFSKVLLHPMVRDRQGRKMSKSLGNVLDPRDIISGVEMQLLQEKLRSGNLDPAELAIVAAAQKKDFPHGIPECGTDALRFTLCSHGVQAGDLHLSVSEVQSCRHFCNKIWNALRFILNALGEKFVPQPAEELSPSSPMDAWILSRLALAAQECERGFLTRELSLVTHALHHFWLHNLCDVYLEAVKPVLWHSPRPLGPPQVLFSCADLGLRLLAPLMPFLAEELWQRLPPRPGCPPAPSISVAPYPSACSLEHWRQPELERRFSRVQEVVQVLRALRATYQLTKARPRVLLQSSEPGDQGLFEAFLEPLGTLGYCGAVGLLPPGTAAPSGWAQAPLSDTAQVYMELQGLVDPQIQLPLLAARRYKLQKQLDSLTARTPSEGEAGTQRQQKLSSLQLELSKLDKAASHLRQLMDEPPAPGSPEL

SEQ ID NO: 204397 - protein, 1063 aa, Artificial Sequence
  derived and/or modified sequence
MPHLPLASFRPPFWGLRHSRGLPRFHSVSTQSEPHGSPISRRNREAKQKRLREKQATLEAEIAGESKSPAESIKAWRPKELVLYEIPTKPGEKKDVSGPLPPAYSPRYVEAAWYPWWVREGFFKPEYQARLPQATGETFSMCIPPPNVTGSLHIGHALTVAIQDALVRWHRMRGDQVLWVPGSDHAGIATQAVVEKQLWKERGVRRHELSREAFLREVWQWKEAKGGEICEQLRALGASLDWDRECFTMDVGSSVAVTEAFVRLYKAGLLYRNHQLVNWSCALRSAISDIEVENRPLPGHTQLRLPGCPTPVSFGLLFSVAFPVDGEPDAEVVVGTTRPETLPGDVAVAVHPDDSRYTHLHGRQLRHPLMGQPLPLITDYAVQPHVGTGAVKVTPAHSPADAEMGARHGLSPLNVIAEDGTMTSLCGDWLQGLHRFVAREKIMSVLSEWGLFRGLQNHPMVLPICSRSGDVIEYLLKNQWFVRCQEMGARAAKAVESGALELSPSFHQKNWQHWFSHIGDWCVSRQLWWGHQIPAYLVVEDHAQGEEDCWVVGRSEAEAREVAAELTGRPGAELTLERDPDVLDTWFSSALFPFSALGWPQETPDLARFYPLSLLETGSDLLLFWVGRMVMLGTQLTGQLPFSKVLLHPMVRDRQGRKMSKSLGNVLDPRDIISGVEMQVLQEKLRSGNLDPAELAIVAAAQKKDFPHGIPECGTDALRFTLCSHGVQAGDLHLSVSEVQSCRHFCNKIWNALRFILNALGEKFVPQPAEELSPSSPMDAWILSRLALAAQECERGFLTRELSLVTHALHHFWLHNLCDVYLEAVKPVLWHSPRPLGPPQVLFSCADLGLRLLAPLMPFLAEELWQRLPPRPGCPPAPSISVAPYPSACSLEHWRQPELERRFSRVQEVVQVLRALRATYQLTKARPRVLLQSSEPGDQGLFEAFLEPLGTLGYCGAVGLLPPGAAAPSGWAQAPLSDTAQVYMELQGLVDPQIQLPLLAARRYKLQKQLDSLTARTPSEGEAGTQRQQKLSSLQLELSKLDKAASHLRQLMDEPPAPGSPEL

SEQ ID NO: 204398 - protein, 923 aa, Artificial Sequence
  derived and/or modified sequence
MCIPPPNVTGSLHIGHALTVAIQDALVRWHRMRGDQVLWVPGSDHAGIATQAVVEKQLWKERGVRRHELSREAFLREVWQWKEAKGGEICEQLRALGASLDWDRECFTMDVGSSVAVTEAFVRLYKAGLLYRNHQLVNWSCALRSAISDIEVENRPLPGHTQLRLPGCPTPVSFGLLFSVAFPVDGEPDAEVVVGTTRPETLPGDVAVAVHPDDSRYTHLHGRQLRHPLMGQPLPLITDYAVQPHVGTGAVKVTPAHSPADAEMGARHGLSPLNVIAEDGTMTSLCGDWLQGLHRFVAREKIMSVLSERGLFRGLQNHPMVLPICSRSGDVIEYLLKNQWFVRCQEMGARAAKAVESGALELSPSFHQKNWQHWFSHIGDWCVSRQLWWGHQIPAYLVVEDHAQGEEDCWVVGRSEAEAREVAAELTGRPGAELTLERDPDVLDTWFSSALFPFSALGWPQETPDLARFYPLSLLETGSDLLLFWVGRMVMLGTQLTGQLPFSKVLLHPMVRDRQGRKMSKSLGNVLDPRDIISGVEMQLLQEKLRSGNLDPAELAIVAAAQKKDFPHGIPECGTDALRFTLCSHGVQAGDLHLSVSEVQSCRHFCNKIWNALRFILNALGEKFVPQPAEELSPSSPMDAWILSRLALAAQECERGFLTRELSLVTHALHHFWLHNLCDVYLEAVKPVLWHSPRPLGPPQVLFSCADLGLRLLAPLMPFLAEELWQRLPPRPGCPPAPSISVAPYPSACSLEHWRQPELERRFSRVQEVVQVLRALRATYQLTKARPRVLLQSSEPGDQGLFEAFLEPLGTLGYCGAVGLLPPGTAAPSGWAQAPLSDTAQVYMELQGLVDPQIQLPLLAARRYKLQKQLDSLTARTPSEGEAGTQRQQKLSSLQLELSKLDKAASHLRQLMDEPPAPGSPEL

SEQ ID NO: 204399 - protein, 923 aa, Artificial Sequence
  derived and/or modified sequence
MCIPPPNVTGSLHIGHALTVAIQDALVRWHRMRGDQVLWVPGSDHAGIATQAVVEKQLWKERGVRRHELSREAFLREVWQWKEAKGGEICEQLRALGASLDWDRECFTMDVGSSVAVTEAFVRLYKAGLLYRNHQLVNWSCALRSAISDIEVENRPLPGHTQLRLPGCPTPVSFGLLFSVAFPVDGEPDAEVVVGTTRPETLPGDVAVAVHPDDSRYTHLHGRQLRHPLMGQPLPLITDYAVQPHVGTGAVKVTPAHSPADAEMGARHGLSPLNVIAEDGTMTSLCGDWLQGLHRFVAREKIMSVLSEWGLFRGLQNHPMVLPICSRSGDVIEYLLKNQWFVRCQEMGARAAKAVESGALELSPSFHQKNWQHWFSHIGDWCVSRQLWWGHQIPAYLVVEDHAQGEEDCWVVGRSEAEAREVAAELTGRPGAELTLERDPDVLDTWFSSALFPFSALGWPQETPDLARFYPLSLLETGSDLLLFWVGRMVMLGTQLTGQLPFSKVLLHPMVRDRQGRKMSKSLGNVLDPRDIISGVEMQVLQEKLRSGNLDPAELAIVAAAQKKDFPHGIPECGTDALRFTLCSHGVQAGDLHLSVSEVQSCRHFCNKIWNALRFILNALGEKFVPQPAEELSPSSPMDAWILSRLALAAQECERGFLTRELSLVTHALHHFWLHNLCDVYLEAVKPVLWHSPRPLGPPQVLFSCADLGLRLLAPLMPFLAEELWQRLPPRPGCPPAPSISVAPYPSACSLEHWRQPELERRFSRVQEVVQVLRALRATYQLTKARPRVLLQSSEPGDQGLFEAFLEPLGTLGYCGAVGLLPPGAAAPSGWAQAPLSDTAQVYMELQGLVDPQIQLPLLAARRYKLQKQLDSLTARTPSEGEAGTQRQQKLSSLQLELSKLDKAASHLRQLMDEPPAPGSPEL

SEQ ID NO: 204400 - protein, 1063 aa, Artificial Sequence
  derived and/or modified sequence
MPHLPLASFRPPFWGLRHSRGLPRFHSVSTQSEPHGSPISRRNREAKQKRLREKQATLEAEIAGESKSPAESIKAWRPKELVLYEIPTKPGEKKDVSGPLPPAYSPRYVEAAWYPWWVREGFFKPEYQARLPQATGETFSMCIPPPNVTGSLHIGHALTVAIQDALVRWHRMRGDQVLWVPGSDHAGIATQAVVEKQLWKERGVRRHELSREAFLREVWQWKEAKGGEICEQLRALGASLDWDRECFTMDVGSSVAVTEAFVRLYKAGLLYRNHQLVNWSCALRSAISDIEVENRPLPGHTQLRLPGCPTPVSFGLLFSVAFPVDGEPDAEVVVGTTRPETLPGDVAVAVHPDDSRYTHLHGRQLRHPLMGQPLPLITDYAVQPHVGTGAVKVTPAHSPADAEMGARHGLSPLNVIAEDGTMTSLCGDWLQGLHRFVAREKIMSVLSERGLFRGLQNHPMVLPICSRSGDVIEYLLKNQWFVRCQEMGARAAKAVESGALELSPSFHQKNWQHWFSHIGDWCVSRQLWWGHQIPAYLVVEDHAQGEEDCWVVGRSEAEAREVAAELTGRPGAELTLERDPDVLDTWFSSALFPFSALGWPQETPDLARFYPLSLLETGSDLLLFWVGRMVMLGTQLTGQLPFSKVLLHPMVRDRQGRKMSKSLGNVLDPRDIISGVEMQVLQEKLRSGNLDPAELAIVAAAQKKDFPHGIPECGTDALRFTLCSHGVQAGDLHLSVSEVQSCRHFCNKIWNALRFILNALGEKFVPQPAEELSPSSPMDAWILSRLALAAQECERGFLTRELSLVTHALHHFWLHNLCDVYLEAVKPVLWHSPRPLGPPQVLFSCADLGLRLLAPLMPFLAEELWQRLPPRPGCPPAPSISVAPYPSACSLEHWRQPELERRFSRVQEVVQVLRALQATYQLTKARPRVLLQSSEPGDQGLFEAFLEPLGTLGYCGAVGLLPPGAAAPSGWAQAPLSDTAQVYMELQGLVDPQIQLPLLAARRYKLQKQLDSLTARTPSEGEAGTQRQQKLSSLQLELSKLDKAASHLRQLMDEPPAPGSPEL

SEQ ID NO: 204401 - protein, 923 aa, Artificial Sequence [sequence omitted]

SEQ ID NO: 204402 - DNA, 348 bp, Artificial Sequence
  derived and/or modified sequence
atgccccacctgcccctggccagcttcagaccccccttctggggcctgagacacagcagaggcctgcccagattccacagcgtgagcacccagagcgagccccacggcagccccatcagcagaagaaacagagaggccaagcagaagagactgagagagaagcaggccaccctggaggccgagatcgccggcgagagcaagagccccgccgagagcatcaaggcctggagacccaaggagctggtgctgtacgagatccccaccaagcccggcgagaagaaggacgtgagcggccccctgccccccgcctacagccccagatacgtggaggccgcctggtacccctag

SEQ ID NO: 204403 - DNA, 981 bp, Artificial Sequence
  derived and/or modified sequence
atgccccacctgcccctggccagcttcagaccccccttctggggcctgagacacagcagaggcctgcccagattccacagcgtgagcacccagagcgagccccacggcagccccatcagcagaagaaacagagaggccaagcagaagagactgagagagaagcaggccaccctggaggccgagatcgccggcgagagcaagagccccgccgagagcatcaaggcctggagacccaaggagctggtgctgtacgagatccccaccaagcccggcgagaagaaggacgtgagcggccccctgccccccgcctacagccccagatacgtggaggccgcctggtacccctggtgggtgagagagggcttcttcaagcccgagtaccaggccagactgccccaggccaccggcgagaccttcagcatgtgcatccccccccccaacgtgaccggcagcctgcacatcggccacgccctgaccgtggccatccaggacgccctggtgagatggcacagaatgagaggcgaccaggtgctgtgggtgcccggcagcgaccacgccggcatcgccacccaggccgtggtggagaagcagctgtggaaggagagaggcgtgagaagacacgagctgagcagagaggccttcctgagagaggtgtggcagtggaaggaggccaagggcggcgagatctgcgagcagctgagagccctgggcgccagcctggactgggacagagagtgcttcaccatggacgtgggcagcagcgtggccgtgaccgaggccttcgtgagactgtacaaggccggcctgctgtacagaaaccaccagctggtgaactggagctgcgccctgagaagcgccatcagcgacatcgaggtggagaacagacccctgcccggccacacccagctgagactgcccggctgccccacccccgtgagcttcggcctgctgttcagcgtggccttccccgtggacggctag

SEQ ID NO: 204404 - DNA, 774 bp, Artificial Sequence
  derived and/or modified sequence
atgccccacctgcccctggccagcttcagaccccccttctggggcctgagacacagcagaggcctgcccagattccacagcgtgagcacccagagcgagccccacggcagccccatcagcagaagaaacagagaggccaagcagaagagactgagagagaagcaggccaccctggaggccgagatcgccggcgagagcaagagccccgccgagagcatcaaggcctggagacccaaggagctggtgctgtacgagatccccaccaagcccggcgagaagaaggacgtgagcggccccctgccccccgcctacagccccagatacgtggaggccgcctggtacccctggtgggtgagagagggcttcttcaagcccgagtaccaggccagactgccccaggccaccggcgagaccttcagcatgtgcatccccccccccaacgtgaccggcagcctgcacatcggccacgccctgaccgtggccatccaggacgccctggtgagatggcacagaatgagaggcgaccaggtgctgtgggtgcccggcagcgaccacgccggcatcgccacccaggccgtggtggagaagcagctgtggaaggagagaggcgtgagaagacacgagctgagcagagaggccttcctgagagaggtgtggcagtggaaggaggccaagggcggcgagatctgcgagcagctgagagccctgggcgccagcctggactgggacagagtgttctaccacggctgctggctgctgagcggctgcgactag

SEQ ID NO: 204405 - DNA, 348 bp, Artificial Sequence
  derived and/or modified sequence
atgccccacctgcctctcgcatcattccggccccctttctgggggctcagacattctcggggtctgcctcgcttccattctgtgtccacacagtccgagccgcatggatcccccatatcacgacggaaccgcgaagccaagcaaaagagactgcgggaaaagcaggctactttagaagctgaaatcgcaggtgagtccaaatctcccgccgaatccatcaaggcctggagacctaaagagctcgtgctgtatgagattccgactaagcccggagaaaaaaaggatgtgtcgggcccactccccccggcttacagccccagatacgtggaagccgcgtggtacccatag

SEQ ID NO: 204406 - DNA, 981 bp, Artificial Sequence
  derived and/or modified sequence
atgcctcacctcccactggcctccttccgccctcccttttgggggttgcgccattccagaggactgcctcggtttcactctgtcagcactcaatctgagccacacggcagtcctatttcccgtaggaaccgcgaagctaagcagaagcggttacgcgagaagcaggccacattggaagccgagatcgcgggcgagtccaagtctcccgccgaaagcataaaagcctggcgccctaaggagttagtgctttacgaaatccccactaagccgggggaaaagaaggacgttagcggcccactgccgccggcttacagcccgaggtacgtggaggcagcctggtatccctggtgggtcagggagggcttctttaagcctgagtaccaagctcgcctcccccaggcaacaggcgagacattttccatgtgtatccctccccccaacgtcacgggatcattgcacatcgggcacgccttgaccgtggctattcaggacgcgctagtaagatggcatcgcatgagaggcgatcaagtgctgtgggtccccggctctgaccatgcaggaattgcaacacaggcagtagtcgagaaacagctgtggaaggagcgcggcgttcgtagacatgagttatctcgtgaagcctttttgcgggaagtgtggcagtggaaagaagccaaggggggtgagatctgtgaacagttaagagccctgggagcatccctggactgggacagggagtgttttactatggacgtagggtcgagcgtcgccgtcacagaggcatttgttcgcctgtataaggcaggcttgctgtaccgcaatcatcagctggtgaattggagttgcgccctacgaagcgcaataagtgacattgaagtggagaacagacccctaccaggccacacccagttgcgcctccctggatgccccacaccagtgtccttcgggctccttttttcagtggctttccctgttgatggctag

SEQ ID NO: 204407 - DNA, 774 bp, Artificial Sequence
  derived and/or modified sequence
atgccgcacctgcctttggcctcatttaggcccccattttggggcttgcggcattcacgcggcctccctcgattccattctgtgagcacacagtcagaacctcacgggagtccgattagcagaaggaatcgagaggcgaagcagaagcggctgagggagaaacaagcaaccctcgaagcagagatcgcgggggaatctaaaagtcctgccgaatctattaaggcttggcgtcccaaggagctagtgctttatgagattccaacaaaaccgggagaaaaaaaggacgtatccggcccactgccccctgcctactcccccagatatgtcgaagcagcctggtatccatggtgggtgcgcgaggggtttttcaaaccagagtaccaggccaggttacctcaggccactggggagacattttctatgtgtattccacccccaaacgtcaccggctcgctccatattggccacgcacttaccgtcgctatccaggatgctctggttcggtggcaccgaatgagaggggatcaagtgctctgggtccccgggtccgatcatgcaggtattgctacacaggccgtggtggaaaagcagctctggaaggaaagaggtgtccgtaggcatgagcttagtagagaagcctttctcagagaggtgtggcagtggaaggaggcaaagggtggtgaaatttgtgaacagctcagggctctaggcgcttcactggactgggacagagtgttttaccatggctgttggctgttgagcggttgcgactag

SEQ ID NO: 204408 - DNA, 348 bp, Artificial Sequence
  derived and/or modified sequence
atgccccacctgcccctggccagcttccggccccccttctggggcctgcggcacagccggggcctgccccgcttccacagcgtgtccacccagagcgagccccacggcagccccatcagcagaagaaaccgggaggccaagcagaagaggctgcgggagaagcaggccaccctggaggccgagattgctggggagagcaagagccctgctgagagcatcaaggcctggaggcccaaggagctggtgctgtatgagatccccaccaagccaggagagaagaaggatgtgtctggccccctgcccccagcctacagcccccgctacgtggaggccgcctggtacccctag

SEQ ID NO: 204409 - DNA, 981 bp, Artificial Sequence
  derived and/or modified sequence
atgccccacctgcccctggccagcttccggccccccttctggggcctgcggcacagccggggcctgccccgcttccacagcgtgtccacccagagcgagccccacggcagccccatcagcagaagaaaccgggaggccaagcagaagaggctgcgggagaagcaggccaccctggaggccgagattgctggggagagcaagagccctgctgagagcatcaaggcctggaggcccaaggagctggtgctgtatgagatccccaccaagccaggagagaagaaggatgtgtctggccccctgcccccagcctacagcccccgctacgtggaggccgcctggtacccctggtgggtgcgggagggcttcttcaagccagagtaccaggcccggctgccccaggccactggagagaccttctccatgtgcatccccccaccaaatgtgacaggcagcctgcacatcggccacgccctgactgtggccatccaggatgccctggtgcgctggcacaggatgagaggagaccaggtgctgtgggtgcccggcagtgaccacgccggcatcgccacccaggccgtggtggagaagcagctgtggaaggagcggggcgtgagaagacatgagctgagccgggaggccttcctgcgggaggtgtggcagtggaaggaggccaagggcggggagatctgtgagcagctgcgggccctgggcgccagcctggactgggaccgggagtgcttcaccatggatgtgggcagctctgtggccgtgacagaggcctttgtgcggctgtacaaggccggcctgctgtacagaaaccaccagctggtgaactggagctgtgccctgcggagcgccatcagtgacatcgaggtggagaaccggcccctgcccggccacacccagctgcggctgcccggctgccccacccctgtgtcctttggcctgctcttctctgtggccttccctgtggatggatag

SEQ ID NO: 204410 - DNA, 774 bp, Artificial Sequence
  derived and/or modified sequence
atgccccacctgcccctggccagcttccggccccccttctggggcctgcggcacagccggggcctgccccgcttccacagcgtgtccacccagagcgagccccacggcagccccatcagcagaagaaaccgggaggccaagcagaagaggctgcgggagaagcaggccaccctggaggccgagattgctggggagagcaagagccctgctgagagcatcaaggcctggaggcccaaggagctggtgctgtatgagatccccaccaagccaggagagaagaaggatgtgtctggccccctgcccccagcctacagcccccgctacgtggaggccgcctggtacccctggtgggtgcgggagggcttcttcaagccagagtaccaggcccggctgccccaggccactggagagaccttctccatgtgcatccccccaccaaatgtgacaggcagcctgcacatcggccacgccctgactgtggccatccaggatgccctggtgcgctggcacaggatgagaggagaccaggtgctgtgggtgcccggcagtgaccacgccggcatcgccacccaggccgtggtggagaagcagctgtggaaggagcggggcgtgagaagacatgagctgagccgggaggccttcctgcgggaggtgtggcagtggaaggaggccaagggcggggagatctgtgagcagctgcgggccctgggcgccagcctggactgggacagagtcttctaccacggctgctggctgctgagcggctgtgactag

SEQ ID NO: 204411 - DNA, 348 bp, Artificial Sequence
  derived and/or modified sequence
atgccccacctgcccctggccagcttccggccccccttctggggcctgagacactcgagaggtctcccaagattccattctgtgagtacccagagtgaaccccacggcagtcccattagccgtaggaaccgtgaagctaagcaaaaacgtctgcgagagaagcaggcaacgcttgaagccgaaattgctggggaaagcaagtctcctgccgagtctattaaagcttggcgcccaaaggaactcgttctgtatgagatccccactaaacctggggagaagaaagatgtgtccggaccactgccacctgcctattctccccgttatgtagaggccgcctggtacccctag

SEQ ID NO: 204412 - DNA, 981 bp, Artificial Sequence
  derived and/or modified sequence
atgccccacctgcccctggccagcttccggccccccttctggggcctgcggcacagtcggggccttccacggtttcactccgtgtctacacagagtgagcctcacggatcccctattagccggcgaaaccgggaagccaaacagaagaggcttagggaaaaacaggccacccttgaagccgagattgctggggagagcaaaagcccggccgaatctatcaaggcctggagacctaaagagttggtgctttacgagatacctaccaagccgggagaaaaaaaggacgtgtcggggcccctgccgccagcttattcccccagatatgtggaggctgcatggtatccatggtgggtccgggaaggcttctttaaacccgagtaccaggcaaggctgccccaggccacgggagagaccttttcaatgtgcattccgcctccaaatgtcacggggtctctacatattggacacgcgctgaccgtggcgatccaggatgctcttgtgcggtggcatcggatgcggggggaccaagtgctctgggtccccggaagtgaccacgctggaatcgcaacgcaagctgtcgtggagaagcagctgtggaaagaacggggtgtccgacgccacgagttgagtagggaggcatttttgagggaagtctggcaatggaaagaggcaaaagggggggaaatttgcgagcaactgagagccctgggggcatcattagactgggatagggaatgcttcaccatggatgtgggatcctctgtggcggtaacagaggccttcgtgaggctgtacaaggcgggattactttaccggaaccatcagctggtcaactggtcttgcgctttgcgctcagctataagtgacattgaggtggagaaccggcctcttcccggccacacacagttgcgtctaccagggtgtccaacccccgtgagctttggtctgctgtttagtgtcgcattccccgtcgatgggtag

SEQ ID NO: 204413 - DNA, 774 bp, Artificial Sequence
  derived and/or modified sequence
atgccccacctgcccctggccagcttccggccccccttctggggcttgagacactccagggggctgccaagatttcatagcgttagtacacagtcagaaccacacggatcaccgataagcagacgcaacagagaagccaagcaaaagcggctccgcgagaaacaggctaccctggaggccgaaatagcgggtgagtctaagtcccctgcggagtcgataaaggcctggcgccccaaggaactggtcctgtatgagattccgacaaaaccaggcgagaaaaaagacgtgtcaggacctctaccaccagcctacagcccccgctacgttgaggcagcttggtatccttggtgggtccgagagggttttttcaagcccgagtaccaggcccggttgccacaggccacaggtgagactttttcgatgtgtatcccccctccaaatgtaactggatccttgcatatcggacacgctctaaccgtggccatccaggacgccctggtgagatggcaccgaatgcgtggcgatcaagtgctctgggtgccaggcagtgaccatgcaggaatcgccacgcaggccgtagttgagaagcaattatggaaagaaaggggcgtgagaagacacgagctttcaagggaggctttcctgcgagaggtctggcaatggaaggaggcgaaggggggcgagatctgcgagcagttgcgcgctctgggagcatctttggactgggaccgggttttttatcacggttgttggctcctgtccggatgcgattag

SEQ ID NO: 204414 - DNA, 348 bp, Artificial Sequence
  derived and/or modified sequence
atgccccacctccctctggcatcattcagaccacccttttggggcttacgccatagcagggggctgccccgtttccatagcgtcagcacacagtccgaaccacacggttcacccatcagtaggcggaatcgtgaagccaagcagaaacgcctgagggagaagcaagcaacactcgaagccgaaatcgcaggggaatccaagtctccagccgaaagtattaaggcctggcgaccaaaagaattggtcctttatgagattcccactaagcccggtgagaaaaaagacgtttcaggcccactgccccctgcttattccccaaggtatgttgaagcggcttggtacccatag

SEQ ID NO: 204415 - DNA, 981 bp, Artificial Sequence
  derived and/or modified sequence
atgccacacctgccccttgcctcttttaggcctcccttttggggactgcggcatagcaggggattgcctagattccacagcgtatctacccagtctgaaccacacggctctccaattagccgaagaaaccgggaagctaagcagaaacgactgcgcgaaaagcaagccacccttgaggcagaaattgctggtgagagtaagtcaccagccgaaagtattaaagcatggcgccctaaggaattagtgctgtatgaaatccccaccaaacccggagagaaaaaggatgtgtcggggccactacccccagcctactccccccgttacgtagaggccgcttggtacccctggtgggtgcgggagggcttcttcaaacccgagtaccaagccaggctgccacaggctacaggcgaaacattcagcatgtgtataccgcctcctaacgtgacaggctcgctgcacataggacacgccttgacagttgccattcaggacgcactggtgcgttggcacagaatgcggggagaccaggtgctatgggtgcctggctccgatcatgccggaatcgctacccaggcggtcgtggagaaacaactctggaaggaacgcggagtgaggcgtcacgagttgtcccgggaagccttcttgagagaagtctggcagtggaaagaggccaaaggcggtgaaatatgcgaacagttacgtgccttgggcgcttctctcgattgggaccgtgagtgtttcaccatggacgtgggttccagtgtggccgtcaccgaggcgtttgtgagattgtataaagcaggattgctctatcggaaccaccagctggttaattggtcctgcgccctgagatccgctatatctgacatagaagtcgagaaccggccactccccggacatacccagctgcgtctaccaggttgtcccacccctgttagtttcggcctcctgttttctgtagcctttccagtggatgggtag

SEQ ID NO: 204416 - DNA, 774 bp, Artificial Sequence
  derived and/or modified sequence
atgcctcatctgcctctggcttcttttagaccccctttctgggggcttcgacactccaggggtctccctcggtttcactctgtgagtacacagagcgaaccgcatggttccccaatcagtcgtaggaatagggaggccaagcaaaaacgtcttcgggaaaaacaggccaccctcgaagctgagatcgccggagagtctaagtcccccgctgaaagtatcaaggcatggagacccaaagagctggtcctttatgaaatccccacaaaacctggcgaaaaaaaggatgtatcagggcctctccccccagcctattccccaagatacgtagaggccgcttggtacccttggtgggtgcgcgaaggattcttcaagccagagtatcaggctcgtctgcctcaggctactggcgagaccttctcaatgtgcatcccaccgcctaatgtcacggggtcgctccacattggtcacgcactaaccgtggccatccaagacgcgcttgtaagatggcatcgtatgagaggcgaccaggttctgtgggtccccggtagtgaccacgctggaatcgcaacacaggccgttgtagaaaagcagctgtggaaggagcggggtgtgaggaggcacgagctgagcagggaggcattcctgcgcgaagtgtggcagtggaaggaagctaaaggcggtgaaatatgcgaacagctgagggccctgggtgcttcacttgattgggacagagtgttctaccacgggtgctggctactgtccggatgcgattag

SEQ ID NO: 204417 - DNA, 981 bp, Artificial Sequence
  derived and/or modified sequence
atgccacacctccccctggcctcatttcgccccccattctgggggctgcgccattcaaggggcttgcctcggtttcattcagtgtccacccagtccgagccacatggatcccccatctctcggaggaatagggaggctaagcaaaagcgcctgcgggaaaagcaggccacgctggaagctgaaattgccggagaaagcaagtctccagccgagtccatcaaggcttggcggcccaaggagctcgtgttgtatgagatacccaccaaaccaggagagaaaaaggacgtcagtggccctcttccaccggcctactctcctaggtacgttgaggcagcatggtacccttggtgggttagggagggcttctttaaaccagaataccaggcccgcctgcctcaggccactggcgaaactttcagcatgtgcatacctccccccaacgtaaccggaagcttgcacattggccacgctctaaccgtcgcgatccaagacgctctggtgcggtggcaccgtatgcgtggcgatcaggttctctgggttcccggatccgaccatgcaggtatcgctactcaggcagtggtcgagaagcagctttggaaggagagaggtgtgagacgccatgaactctcccgcgaggcattcttgcgggaagtgtggcagtggaaggaagcaaagggtggcgagatatgcgaacagttaagagcccttggagcctccctggactgggaccgcgagtgtttcacgatggatgtcggtagctccgtggctgttaccgaggcttttgtgcgcttgtacaaggcagggctcttatataggaaccatcaactagtgaactggtcttgtgcactcagatctgctataagcgacattgaagtagagaatcgccctctgcctggacatacacagctgagattgccaggctgccccacccctgtgtcttttggtctgctgttctccgtggcattccccgtcgacggatag

SEQ ID NO: 204418 - DNA, 348 bp, Artificial Sequence
  derived and/or modified sequence
atgccgcacctccctctcgcctctttccgaccccccttctggggactgcgtcattctcggggactgcccaggtttcacagtgtgtcgacccaatctgagcctcatgggtctccaatctccaggcgcaatagggaagctaagcagaagcgtctgcgggagaagcaagcaactctcgaggcggagattgccggagagagcaagagcccagccgagagtattaaagcatggcgcccaaaggagcttgtgttgtacgagattcccacaaaacctggcgagaagaaagatgtgagtggccctcttcccccagcctattctcctcgctatgtggaagccgcctggtatccctag

SEQ ID NO: 204419 - DNA, 348 bp, Artificial Sequence
  derived and/or modified sequence
atgccacatctccccctcgcttccttccgtccacccttctgggggctgcggcactcgcgaggcttgcccagattccatagcgtctccacccagagcgagccccacggctcccctatttctcggaggaaccgggaagctaaacagaaacgcctgcgcgagaaacaggcgactctcgaggcagaaattgccggcgaatcaaaatcaccagccgaatccattaaggcttggagacccaaagagcttgtactgtatgagatacccaccaagccaggagagaaaaaggacgtatccggcccacttcccccagcatatagtcctagatatgtggaagctgcttggtacccctag

SEQ ID NO: 204420 - DNA, 348 bp, Artificial Sequence
  derived and/or modified sequence
atgccacacctgccgctcgcctctttccggccaccgttctgggggctccgtcattccaggggactgccaagattccactccgttagcactcagtcagaaccacacggttcacccatctctagaaggaatagggaagcgaaacagaaaaggctgcgggaaaagcaggccaccctggaggccgagatcgccggggagtctaagtccccggccgagtctataaaggcctggcggccaaaggaactggtgctgtatgagatcccaaccaagccaggggagaagaaagacgtgtcaggtccacttcctcccgcctattccccaagatacgtcgaagcggcatggtacccttag

SEQ ID NO: 204421 - DNA, 981 bp, Artificial Sequence
  derived and/or modified sequence
atgcctcacctccccttggccagcttcagaccaccgttttggggcctgcgccactcacgaggcctgcctcgcttccattccgtcagtacgcagtccgaaccgcacggatcccctatcagtcggagaaaccgagaagccaaacagaaaaggctgcgcgaaaagcaggctacactggaagcagagattgcaggagaatctaagagccccgcagagtccattaaagcatggcgcccaaaggaactagtcttgtacgaaattcctaccaagccaggcgagaagaaggacgtatcaggtcccttacctcctgcatatagcccccggtacgtggaggccgcctggtatccttggtgggtgagagaaggcttcttcaagcccgaatatcaggcacgcctcccccaggccaccggtgaaacctttagcatgtgtatcccccccccaaacgtaaccggatcccttcacatcggccatgcgctgactgtagctatacaagatgccctcgtgcgatggcacagaatgcgaggcgatcaggtcctgtgggtgcccggaagcgaccatgccgggatcgcgactcaggccgtggttgagaaacagctctggaaagaacgtggagtcaggaggcatgagctgagccgggaagccttcctgagagaggtgtggcagtggaaggaagccaaagggggggagatctgtgagcaactgcgcgccctcggcgcctctcttgattgggatcgagaatgcttcaccatggacgtagggtcttcagtcgctgttaccgaagcatttgtgaggttgtacaaggctggcttactgtatcgaaatcaccagctcgtgaattggtcttgcgctttacgctcagccattagcgacatagaggtggaaaatcggcccttacccggccacacccaattgagactgccaggctgtcccacccccgtgagttttggcctgctcttctccgtggcgttcccagtggacggttag

SEQ ID NO: 204422 - DNA, 981 bp, Artificial Sequence
  derived and/or modified sequence
atgccccatcttccgctggctagcttccggcccccattctggggcctgcgccacagtcgagggctcccccgattccactccgtgagcactcagtctgagccacatggcagtcccatttctcgccgaaaccgggaggcaaagcagaagcgcctgcgcgaaaaacaggccaccctggaggcagaaatagctggtgaaagcaagagccctgctgagagcattaaagcctggcgtccaaaggaactcgtgctatacgagatacctaccaagccaggagaaaaaaaagacgtttcaggacccttgcctcctgcatactcccctaggtatgtggaagcagcctggtatccatggtgggtccgtgagggcttcttcaagcctgaatatcaagctcggctcccccaggcaacaggggaaaccttctctatgtgcattccaccccctaacgttaccgggagcctccatatagggcacgccttgaccgtcgctatacaggacgcactcgtcaggtggcatcggatgcggggagaccaggtcctctgggttcccgggagcgatcatgccggcatcgcaacacaagccgttgtggagaaacagttgtggaaagagcgtggggttcgacggcatgaactgagcagagaagcatttcttagagaagtgtggcagtggaaggaggccaagggaggcgaaatctgcgaacagttgagggcactgggggcgtctctggactgggaccgtgagtgcttcactatggatgtgggctcctccgtagcagttactgaagccttcgtacgcctttataaagccggcctgctatacagaaaccatcagttggtgaattggtcttgtgcacttcgctccgctatctcagatatcgaagtggaaaatcggcccctccccggccatactcagctgcggctgcctggttgtcccacccccgtctcattcggtctcctgttcagcgttgcgttccccgttgacggttag

SEQ ID NO: 204423 - DNA, 774 bp, Artificial Sequence
  derived and/or modified sequence
atgccccaccttcctctggcaagctttaggccgccgttttggggcttaaggcattcaaggggattaccacggtttcactccgtgtccacgcaatctgagccccacggatcccctatttctcgtcgcaaccgtgaggccaagcaaaaacggctaagggagaagcaggccacattagaagccgagatagcaggggagagcaaatccccagctgaatccattaaggcctggcgtcctaaggaacttgtgctttacgaaataccaacaaagcctggtgaaaagaaggacgtgtctggcccgctgcctccggcatattctcctcgatacgtcgaggcagcatggtacccttggtgggttcgcgaggggttttttaagccggaataccaggccaggctgccacaggctaccggtgagacattctctatgtgtatacctccccccaacgtcacaggatcactgcacatcggccatgccctcaccgtggctattcaggatgctctcgtaaggtggcataggatgagaggcgatcaagtgctatgggtgcccgggagcgaccacgccggaattgcgacacaagctgtcgttgaaaagcagctgtggaaagagcggggcgtgcggaggcacgaactgagtcgggaagcttttctccgggaggtgtggcagtggaaggaagctaaggggggcgagatttgtgagcaattacgagccctcggcgcatctctggactgggaccgggtcttttaccacggctgttggctgctatctggatgcgattag

SEQ ID NO: 204424 - DNA, 774 bp, Artificial Sequence
  derived and/or modified sequence
atgccacacctgccccttgcctcctttcgccctcctttctggggcctccggcattccaggggactgccgaggtttcatagcgtttcaacacagtccgagccacatgggtccccaatctcgcggaggaatagggaggccaagcagaagagactgagagaaaaacaggccactttggaggcggaaatcgctggagagtccaagagcccagctgagagtatcaaagcatggcgccccaaagagctggtgctgtatgagatccctaccaaaccaggcgaaaagaaggatgtatccggaccgctgccacccgcttactctccgcggtacgtcgaggccgcatggtacccatggtgggtaagggaagggttctttaagcccgaataccaggcaaggctcccacaggccaccggcgagacattctctatgtgcatcccacctccaaatgtaactggctctctgcatatcggacatgcgctaaccgtggccattcaggacgcccttgtgcgttggcatcgaatgcggggcgaccaagtattgtgggttcccgggagcgaccacgccggaattgccactcaggctgttgtggaaaagcagctgtggaaggaacggggagtacgacgccacgagctctcccgggaagcctttcttagagaggtctggcagtggaaagaggcgaaagggggcgaaatctgtgaacaactgcgagccctcggagcgtctctggactgggatagggtcttttaccatggctgttggctgctttcgggatgtgattag

SEQ ID NO: 204425 - DNA, 774 bp, Artificial Sequence
  derived and/or modified sequence
atgccgcacttgcccttggcctctttccgcccacctttctggggactgagacatagtcgcggtcttccccgcttccacagtgtgagcacccagtccgagcctcacgggtcaccgatcagcaggcggaatcgggaggccaagcagaaacgccttagggaaaagcaggctactctagaagctgaaatcgcaggggagagcaagtcccccgccgagagcatcaaagcttggcggcctaaagaactggtcttatatgagattcccacgaaacctggggaaaaaaaagacgtgagcggacccctgccccccgcgtattctccccgttacgttgaggccgcctggtatccgtggtgggttagggaaggatttttcaagcctgagtaccaggcccgcttgccccaggcaaccggcgagactttttccatgtgtatccctccacccaatgttactggctctctccatattggtcatgctctaacagtcgccatccaggatgctttggtgcggtggcatagaatgagaggtgaccaggttttatgggtccctggctcagaccatgccggaatcgccacacaggcagttgtagagaagcaattatggaaagagaggggcgtgagaagacacgagttaagccgagaggcctttttacgagaagtgtggcaatggaaggaggccaagggcggagagatctgcgaacagctcagggcacttggcgccagcttggattgggatcgggtgttttatcacggatgctggctgctgtcgggttgtgattag

SEQ ID NO: 204426 - DNA, 981 bp, Artificial Sequence
  derived and/or modified sequence
atgccccacctgcccctggccagcttccggccccccttctggggcctgagacactccagggggctgccccgatttcatagtgtctccacccagagcgagccacatggaagccccatctcacggcgcaatcgagaagcaaagcagaagaggttgagggagaagcaagctaccctggaggccgagatcgcaggtgagtccaagtctccggctgagtccatcaaagcgtggaggcccaaggaacttgtcctctatgagattcctaccaaacctggtgaaaagaaggatgttagcgggccgctgccacccgcatattcccctcgttacgtggaagccgcttggtacccatggtgggtcagggagggcttctttaagcccgagtatcaggcccgccttcctcaagccactggcgaaaccttttctatgtgcatcccaccccccaatgtgaccgggtctttacatatagggcatgcactgacagtagccatccaggatgcactggtccgttggcatagaatgagaggggaccaggtcctttgggtgccggggtcagaccatgcaggcatagccactcaggcggtggtggaaaaacagctatggaaagaaaggggagtaagacgccatgagttatcccgggaggcgtttctgcgggaagtgtggcagtggaaggaggctaaaggaggcgagatttgtgagcagcttcgggctctcggagcatcactggattgggacagggagtgttttacaatggatgttgggtctagcgtggctgtgacagaagctttcgttcggctgtacaaagcaggcctactttaccgcaaccatcagcttgtgaattggtcgtgcgctctgcgtagcgcaattagcgatatagaggtcgagaaccgccccctccccggacacacacagttgcgcctgcccggctgcccaacacccgtgtcctttggtttgctcttctccgtggcgttcccagtggacggatag

SEQ ID NO: 204427 - DNA, 348 bp, Artificial Sequence
  derived and/or modified sequence
atgccccacctgcccctggccagcttccggccccccttctggggcctccgccatagccggggtctcccccgatttcacagcgtgtccacccagtcagagccgcacgggtcccctatttcacggagaaatagggaggctaaacaaaaaaggctgagggaaaagcaggcgactctggaggcggagatcgcgggtgaaagcaagtcccccgccgagtccattaaggcatggcggcccaaagaactggttctatacgagataccgaccaagccaggggaaaagaaagatgtttcaggacctctgcccccagcctacagccccaggtatgtggaagccgcttggtacccctag

SEQ ID NO: 204428 - DNA, 348 bp, Artificial Sequence
  derived and/or modified sequence
atgccccacctgcccctggccagcttccggccccccttctggggcctccgtcatagccgggggttgcctcgattccattctgttagtactcaatccgaaccccacgggagccctatttccaggagaaaccgcgaggcaaagcagaagagattgcgggagaagcaggccacgttggaggccgagattgcgggagagtcaaaatctccagctgaaagtataaaggcttggcggcccaaggagctcgtgctttacgaaataccaaccaagcctggagagaaaaaagatgtctccggtccccttccgcccgcctattcccctcgatatgtggaggccgcatggtatccttag

SEQ ID NO: 204429 - DNA, 348 bp, Artificial Sequence
  derived and/or modified sequence
atgccccacctgcccctggccagcttccggccccccttctggggcctccgacacagcagggggttgcctcgcttccatagtgtgagtacacagtctgaacctcacggaagccccatcagtagaaggaatcgggaagctaaacaaaagcgtctgcgcgaaaaacaggcgacactggaggcagagatcgccggtgagagtaaaagccctgcagagtctattaaggcctggcgccccaaggagctggtgctatacgagatccctacaaagcctggtgagaaaaaagatgttagcggccccctgcccccggcatactcccctagatatgtcgaagctgcatggtacccatag

SEQ ID NO: 204430 - DNA, 981 bp, Artificial Sequence
  derived and/or modified sequence
atgccccacctgcccctggccagcttccggccccccttctggggcctacgccactctcgggggttgccacggttccactctgtgagtactcaaagtgaaccccacggcagcccaataagtaggaggaatcgtgaagccaaacagaagcgcctgagagaaaaacaagctacattagaagcggagatcgccggggagagcaagtctccagccgaatccataaaggcctggcgtccaaaggaactcgtgctgtatgaaatccccaccaaacccggcgaaaaaaaggatgtctccgggccacttcctccagcttactctccaaggtatgtggaggccgcatggtatccctggtgggtgagggaaggctttttcaagcccgaatatcaagcaaggcttccgcaggcaacaggagagacgttttccatgtgcataccccctcccaatgtgactggctctctgcacataggccacgccctgactgtggccattcaggacgcactagtccggtggcaccgcatgcgaggggatcaggttctctgggtgccaggcagtgatcatgctggcattgccactcaggccgtggtggaaaaacagctgtggaaagagcgaggcgtacggcgtcacgaactgtcaagagaagccttcctgcgagaagtgtggcagtggaaagaggctaagggaggcgagatttgtgaacagctgcgggccttaggcgcatcattggactgggatcgcgagtgttttacaatggacgtcgggagcagcgttgccgtaactgaagcattcgtccggctgtacaaggccgggctcctgtatagaaatcatcagctggtgaattggtcctgtgcgctccggagcgcaatctctgacatcgaagttgagaacaggcctctgccaggccacactcaactgaggctgcctggatgccctacaccggtgtctttcgggctgttgttctcagtggcctttcctgtcgatggctag

SEQ ID NO: 204431 - DNA, 981 bp, Artificial Sequence
  derived and/or modified sequence
atgccccacctgcccctggccagcttccggccccccttctggggcctccgtcatagtcgcggactcccgagattccattccgtttccactcaatctgagccgcatggaagcccaatttccaggcgtaaccgagaagctaagcaaaagcggctgcgtgagaaacaggcgacactcgaagccgaaatcgcgggagaaagcaagtcacctgccgaaagcattaaggcatggaggcccaaggagcttgtcctctacgagatccctacgaagcccggggaaaagaaagatgtgagcggccccctgccccccgcttatagccccaggtatgtcgaggccgcctggtacccttggtgggtgcgcgagggattctttaagccagaatatcaggcgcgactgccacaggcaactggcgaaaccttcagtatgtgtattccccctccaaacgtgacgggcagtcttcacataggccacgccctgacagttgcaatccaggacgccctcgtgcgctggcacaggatgcgcggagaccaggtactttgggtgccgggttccgatcacgctggtattgcgactcaggctgtagtcgagaagcagctgtggaaggaacgcggcgtacgcagacatgaactctcacgcgaagcatttctcagagaggtatggcagtggaaggaggccaagggaggcgaaatctgcgaacagctgagggcccttggagctagtctggactgggatcgggagtgttttactatggatgtggggagcagtgtcgccgtgacggaagccttcgtccggctgtacaaagccggactactgtatagaaatcatcagctggtgaactggtcctgcgcccttcgctctgcaatttcagatatcgaggtggagaaccggcccctgcccgggcacacacaattacgcctacccgggtgtcccaccccagtgagttttggtctgctattctcagtggcctttccagtggatggctag

SEQ ID NO: 204432 - DNA, 774 bp, Artificial Sequence
  derived and/or modified sequence
atgccccacctgcccctggccagcttccggccccccttctggggcctgcggcactcacggggcttaccaaggtttcatagcgtgagtacacagtctgaaccacacggctctcctataagcagacgcaaccgcgaggccaagcaaaagcgtctgagagagaagcaggccacactggaggccgagatcgctggcgagagcaaatcccccgctgaatctataaaggcctggcggccaaaggaactcgtcctgtatgagatcccaacaaagccgggggagaaaaaggacgtgtccggtcctctgcctcccgcttactcccctagatacgtggaggcagcctggtatccttggtgggtacgcgaaggattcttcaagcccgagtaccaggcccggttgccccaggcaaccggagagacattctcgatgtgcattcctccgccaaatgtcactggtagcctccacattgggcacgccctgacagtcgccatccaggatgcattggtgcgctggcatagaatgcgtggcgatcaagtgctttgggtgcctggctctgatcacgccggaatcgcaacccaggccgtagtggaaaaacagctctggaaggaacggggagtccgccgccacgagctgtctcgggaggcattcctgagggaagtttggcaatggaaggaggccaagggcggcgagatttgtgagcagctcagggctttaggagccagtctggattgggaccgagttttctatcacgggtgctggctgctctccggttgcgactag

SEQ ID NO: 204433 - DNA, 774 bp, Artificial Sequence
  derived and/or modified sequence
atgccccacctgcccctggccagcttccggccccccttctggggcctaagacacagccgaggactgcctagattccactctgtatcaacacagagtgagcctcacggctcccctattagccggcgcaacagggaagcgaagcagaaaagattgagggagaagcaggcaacccttgaagctgagatagcgggggaatcaaagtctcctgcggagtccatcaaggcctggcgcccaaaggagcttgtgttgtacgagatcccaaccaaacccggtgagaaaaaggatgtgagtggacccctcccaccggcttattccccccgatacgtggaggcagcctggtacccgtggtgggtacgtgaaggattcttcaaaccagaataccaggcaagactgccccaggccaccggagaaaccttttcaatgtgtattccgcctccaaacgtgacagggagcctccacataggccacgctctgactgttgctattcaagatgctcttgtcagatggcatagaatgaggggtgaccaggtgctttgggtgccgggaagcgatcatgcagggatcgccacccaggctgtggtcgaaaagcagctgtggaaggagagaggagttcgccgtcacgagctgtctagggaagccttcctgcgtgaagtttggcagtggaaggaggctaaaggaggtgagatctgcgagcaactaagagccctcggggcctccctggactgggatcgggtgttttatcacgggtgctggctgctgtctggttgcgactag

SEQ ID NO: 204434 - DNA, 774 bp, Artificial Sequence
  derived and/or modified sequence
atgccccacctgcccctggccagcttccggccccccttctggggcttaaggcactcaaggggtctcccacggttccacagcgtgtctacgcaatcagaacctcacgggagccccatcagcaggagaaacagggaggccaaacagaagcgcttgagagaaaagcaggccacactggaagccgaaattgctggggaaagcaagtcgcctgcagaatctatcaaagcctggcgtcccaaggagcttgtgctgtatgagatacccactaagcctggagagaagaaagatgtcagtgggcctctgcctcccgcatatagcccgaggtacgtggaggccgcctggtacccttggtgggtaagggagggattcttcaaacctgagtatcaggcccgacttcctcaagctaccggcgaaacattcagtatgtgcatccccccaccaaatgtgaccggcagcctccacataggacacgcactcactgtcgcaatccaggatgcccttgtgagatggcacagaatgcggggcgatcaggtgctgtgggtgcccggctcagaccacgctggaatcgccacacaggccgtggtcgagaaacagctgtggaaggaacggggagtcagacgtcacgagttgagcagggaggcgtttttgcgtgaagtttggcagtggaaggaggctaaaggcggcgaaatttgcgaacaactaagagccctgggcgcgtcacttgactgggatcgcgttttctaccacggttgctggctgctgagcgggtgcgattag

SEQ ID NO: 204435 - DNA, 981 bp, Artificial Sequence
  derived and/or modified sequence
atgccgcaccttcctcttgcttcattccggcctcccttctggggcctacgacactcgcgcggactgcccagattccactcagtttctacccagtctgagcctcatggatcacctatttcacggagaaacagggaagctaagcaaaaaagactgagagaaaagcaggctacccttgaggcggagattgcaggagaatcgaagagcccagccgaatctattaaggcgtggaggcctaaagagctcgtgctgtatgaaatccccaccaaaccgggtgagaagaaggacgtctctggcccacttcctcccgcatatagccccagatatgtggaagcagcatggtatccatggtgggtaagggaaggcttcttcaaacctgaatatcaggctagactacctcaagcaactggagagacattttcgatgtgcattcctcccccaaacgtaaccgggtctcttcacatagggcatgcactgaccgtcgcaatccaggacgcgctggttcgttggcatcggatgaggggtgatcaggtgctctgggtccctgggtcggatcatgctggaatcgctacacaagccgtcgtggagaagcagctatggaaagagcgcggagtacgccgacacgagctcagccgcgaagccttcttacgggaagtgtggcaatggaaagaggctaagggtggtgaaatttgcgagcagcttcgggcactcggcgctagtctggactgggaccgcgagtgtttcaccatggatgtcggtagtagcgtggctgtcacagaagcctttgtgagactttacaaagctggcctgctttaccgtaaccaccagctcgttaattggtcttgtgccctgaggtcagcgatctctgacatcgaggtggagaaccgacccttgccaggccacacccagctgaggttacctgggtgccccacccctgtgagttttggcctcctgttttccgtggcttttcctgtcgacgggtag

SEQ ID NO: 204436 - DNA, 348 bp, Artificial Sequence
  derived and/or modified sequence
atgccacaccttcccctagcttcgttccgacccccattttggggtctgcgccattctcggggattgccacgctttcatagcgtgtcaacacagtccgaaccccacggaagccccatctcccgacgcaatagggaggcgaagcaaaagagactgcgggaaaagcaggcaacgctcgaagcagaaatagccggagaatccaaaagtcccgcagaaagcatcaaggcctggcgaccgaaggaacttgtgttgtatgagatcccaaccaaaccaggagagaagaaggacgtatcgggccctctgccaccggcttactcgcccaggtacgttgaagcggcatggtacccatag

SEQ ID NO: 204437 - DNA, 348 bp, Artificial Sequence
  derived and/or modified sequence
atgcctcacttgccgctcgcatccttccgccctcccttctgggggcttcgacacagtcggggattgcccaggtttcatagtgtttccactcagtctgaaccgcacggctcccctatctctagaaggaatcgtgaggccaaacagaagcgattaagagagaagcaggccactctggaggccgagatcgccggagagtccaaatcccccgctgagagtattaaggcctggcgccctaaggagttggttctctacgaaataccaactaagcctggcgaaaagaaggacgtttccggcccactgccgccagcttattcgcccagatatgtcgaagccgcatggtatccctag

SEQ ID NO: 204438 - DNA, 348 bp, Artificial Sequence
  derived and/or modified sequence
atgccacatctccctctggcctcattcaggcccccattctggggactgcggcatagtagaggcctcccacgattccatagcgtcagcacacagtccgaaccccatggctcaccgatctctaggagaaacagggaggcgaagcagaagcgtctaagagagaagcaggccacattagaggcggagattgccggtgagagcaagtccccggcagagagcattaaggcatggagaccaaaggagctggtgttatatgagattcccaccaagccaggcgaaaagaaagacgtctctggacctctaccacccgcatactctcccaggtacgttgaggctgcttggtatccctag

SEQ ID NO: 204439 - DNA, 981 bp, Artificial Sequence
  derived and/or modified sequence
atgccgcacctaccattggcctcttttagacctccattttggggcctgaggcactcaagaggcctgccacggtttcatagcgtcagtacccagagtgagcctcatgggtctcctattagccggcgtaatagggaagccaagcagaagcggctgagagaaaagcaggccacgctcgaagcagaaatcgcaggcgagagtaagtcaccagccgaaagcataaaagcctggcgcccaaaagagttagtcttgtatgaaatccctactaagcccggtgaaaagaaggacgtgagcggacctctgcccccagcttacagtccaaggtatgtcgaagccgcatggtacccctggtgggtgagagagggctttttcaaaccagaataccaagctcggctaccacaggctacaggcgagacattttcaatgtgtattccaccccctaatgtgacagggtcactgcacatcgggcacgcactgacagttgccattcaggatgctttagttcgctggcacaggatgagaggagaccaggtcctctgggtgccaggatctgaccatgcgggaatagccacgcaagccgtcgtggagaaacagctgtggaaggaaagaggcgtgcgcaggcacgagctgagtcgtgaagcattcctgcgcgaggtgtggcagtggaaagaggctaaaggcggagagatctgtgaacagctgagggcccttggagccagtctagactgggatagggagtgttttactatggatgtgggatcaagtgtggccgtcaccgaagcctttgtgaggctttacaaggcaggactcttatatagaaatcaccagctggtaaattggtcttgtgcccttagaagtgccatttccgacatcgaggtcgaaaacaggccgttacccggacatacacagttaagactaccaggatgtcctacccctgtgtcattcggactccttttctcggttgcattccctgtggatgggtag

SEQ ID NO: 204440 - DNA, 981 bp, Artificial Sequence
  derived and/or modified sequence
atgccccatcttcctctggcaagctttcgtccacctttctgggggctgagacattcacgaggattgcctcgctttcattccgttagtacacagtctgaaccccatggctcacccattagccgcaggaatagggaagccaagcagaagcggctcagagaaaaacaggcaactctggaagccgagatagcgggagaaagcaaatcacccgctgagtctatcaaggcgtggagaccaaaggaactggtcctttatgaaatccccaccaagccaggcgaaaagaaggatgtatccggccctcttcctcctgcctatagtcctcgatatgtcgaggccgcttggtatccttggtgggtcagagagggattttttaaacctgagtaccaggccaggctcccccaggcgacgggtgagactttttcaatgtgcatacctcctccgaacgtaacaggctccctacacatcgggcacgctttgaccgtggctattcaggatgctttggtccggtggcatagaatgcgtggggaccaagtgttgtgggtgcccggaagtgatcatgccggtatagcaacccaggccgttgtggaaaaacagctttggaaggagagaggagtgaggcggcacgaactgtctcgcgaagcatttctccgcgaggtgtggcagtggaaggaagctaagggaggagagatatgcgagcagcttcgggcactgggtgcatccctggattgggatagggaatgcttcactatggatgtcggctctagcgtcgccgttacggaagccttcgtacggttgtataaggcagggctattgtaccgtaatcaccagcttgtgaactggtcctgtgctctccgctcagcaatatctgatatcgaagtcgagaatcggccactgcccggtcacacacagctgcggctgccaggctgtccaacccccgtgtccttcgggttgctcttctcggtggcttttccggtggatgggtag

SEQ ID NO: 204441 - DNA, 774 bp, Artificial Sequence
  derived and/or modified sequence
atgccccatcttcctctcgctagcttccgcccacccttttgggggcttcgccactcccgcggattgccccgttttcattctgtgtctactcaatccgagccccacgggtccccaatctcaagaaggaaccgtgaggcaaaacagaagcgactccgggagaaacaggcaacacttgaagcagaaattgcgggtgagtcgaaatccccagctgaaagcattaaagcctggaggccgaaggaactggtgttgtacgaaatcccaactaagcccggagaaaagaaggatgtgtctgggccactcccacccgcatacagtccaaggtacgttgaagccgcttggtacccctggtgggttagggaaggcttttttaaacctgagtatcaggcacgcctcccacaggccaccggcgagactttttcaatgtgtattccacctccaaacgtgaccgggagtttgcacatcggccatgccttaactgtggctattcaagatgccctcgtgcggtggcataggatgcggggagaccaggtcctatgggtcccagggtctgaccacgctggcattgccacccaggcggtggtggagaagcaactgtggaaggaaaggggggtacgccgacacgagctatcccgcgaagcgttcttgagagaagtgtggcagtggaaagaggctaaggggggagagatctgcgaacagctgagggctctgggagcatcactcgactgggatagggtgttctaccatggctgctggttactctcaggatgcgactag

SEQ ID NO: 204442 - DNA, 774 bp, Artificial Sequence
  derived and/or modified sequence
atgcctcaccttcctttggcgtcctttcggccaccattctggggcctgaggcattctcgtggcctcccccgttttcactctgtgtctactcaaagtgagccccacggctcaccgatctcacgcaggaaccgggaagcaaagcagaaacgactcagggagaagcaggctaccctagaagccgaaatagccggtgaaagtaagagtcctgccgaaagcatcaaggcatggcggccaaaggagctggtgctctacgagattcccaccaaaccaggagagaaaaaggacgtgtctgggccactgccacctgcatattctccaaggtatgtagaggctgcatggtacccctggtgggtgcgcgagggcttcttcaaaccagagtaccaggccagactgccacaggccacaggagaaaccttctcgatgtgtatccccccaccgaatgtgacaggctccctccatatcggacatgcattaactgtggcgatccaagatgcactagtgaggtggcacagaatgcgcggagatcaggtgttgtgggtgccaggcagcgaccatgctggtattgccacccaggcagtagttgagaagcagctgtggaaagaaaggggggtaaggagacatgagctttcaagagaggcattcctcagggaagtgtggcaatggaaggaggcaaaaggcggagagatttgtgagcagctccgcgctctgggcgcttctctcgattgggatcgggtattttaccacggttgttggttgctttctggatgcgactag

SEQ ID NO: 204443 - DNA, 774 bp, Artificial Sequence
  derived and/or modified sequence
atgccacacctacctctggcaagttttcggccacctttctggggcctgcgacacagccggggactgcctcgcttccactctgtatccacccagtctgagccccacggaagccccatctcccgcaggaaccgcgaggctaaacagaagcgcctgagggagaagcaggccacactggaggctgaaatcgcaggcgaatccaagagccctgccgagtcaattaaggcgtggcgcccaaaggagctagtgctctatgagattccaaccaagcccggtgaaaaaaaggacgtgtctggtccacttcccccagcctactctcccaggtatgtcgaagccgcatggtacccatggtgggtccgcgagggattttttaaaccagaataccaggccagattgccacaggccaccggggagaccttttccatgtgcataccccctcctaatgtaacgggatccctgcacataggccatgctcttactgtggcgatccaagatgcattagttagatggcaccgtatgaggggcgaccaggtgctgtgggtccctggatctgaccacgccggaatcgctacccaggcggtggtagagaagcagttgtggaaggagcggggagtgaggcgtcacgaactgtcgcgggaggcatttcttagggaggtgtggcaatggaaggaagccaagggcggagagatctgtgagcagctgagagccctcggagcttccctggactgggatcgggtcttctaccatggctgttggctcctaagcggctgtgactag

SEQ ID NO: 204444 - DNA, 981 bp, Artificial Sequence
  derived and/or modified sequence
atgcctcacctgcctctcgcgagcttccgcccacccttctggggactgagacattctcgaggactccccagatttcattcagtatcaacgcaaagtgaaccccacggttcccctatctcacggaggaatagagaggccaaacaaaagcgcctgcgagagaagcaggcgaccctggaggccgagattgctggcgagtcgaagtcccctgcagagagcatcaaagcatggaggcccaaggagctagtgctgtatgaaatccccacaaaaccaggcgaaaagaaggatgtgtctggtcccctccctcccgcgtatagccctcgctatgtggaagctgcttggtacccgtggtgggttcgagagggattcttcaagcccgagtatcaggccaggcttccacaggcaacaggtgaaacgtttagcatgtgtatccccccaccgaatgtgacaggatcactgcatataggacacgctctcaccgtcgccatccaagatgcactggtccgttggcacagaatgcgaggagatcaggtgttgtgggtgcccggctccgaccatgccgggattgctacccaggcggtcgtggagaaacagctctggaaggagcggggggtaaggaggcacgaattgtcgcgcgaggctttcctgagggaggtctggcagtggaaagaagctaaaggcggtgagatctgtgaacagctgcgtgccttgggcgcctcactagactgggacagggaatgctttactatggatgtgggttcatctgtggctgtgactgaagcattcgtacgcctttacaaagcgggcctcctttacaggaatcatcaactggttaactggtcatgtgccctcagatccgctatatccgacatagaggtggagaaccggccactacctggccacacccagttacgcctgccaggttgtccgacccctgttagttttggattactattttctgtagcattccccgtggatgggtag

SEQ ID NO: 204445 - DNA, 348 bp, Artificial Sequence
  derived and/or modified sequence
atgcctcacctgccactggcctccttccgccccccattttgggggttacgtcattccagaggcctgcctaggtttcatagcgttagtacgcagagcgagcctcacgggtctccgatcagtaggagaaatcgcgaggctaagcagaaaaggctgagggagaagcaggcgaccctggaagcagagattgctggcgagtccaagagcccagctgagagcattaaggcatggcgccctaaagagcttgtactctatgaaattcctaccaagcctggggaaaaaaaggatgtttctgggcctctacctcctgcttatagccctcgctacgttgaggctgcgtggtacccttag

SEQ ID NO: 204446 - DNA, 774 bp, Artificial Sequence
  derived and/or modified sequence
atgcctcatctgcctcttgcctctttccgaccgccgttttggggcttgcggcattctcggggactgccaagatttcattccgtttccactcaatctgagccccatggtagtcctatcagccgcagaaatcgagaggcaaagcagaaacgcctgagggaaaaacaagccacactggaggctgagattgctggagagagtaagtcgcctgcagagtctatcaaagcctggcggccaaaagagctcgtactgtatgaaatcccgacaaaaccaggagagaagaaggatgtttcgggacccttgcctcctgcttacagccctcggtacgtggaggcggcttggtacccgtggtgggtccgcgagggcttcttcaagcccgaataccaggcaagactgcctcaggcaaccggagagaccttttccatgtgtatccctccacctaacgtgaccggtagcttgcacattggccatgctctgacagttgcaatacaagacgcactggtccgatggcataggatgcggggggatcaggtgctttgggtcccaggcagcgaccatgccggtatcgccactcaggccgtcgtggagaagcagctgtggaaggagaggggagtaaggagacacgaactgagtcgagaagcgtttctgcgagaagtgtggcaatggaaggaagccaaagggggggaaatctgcgaacagctgagagccctgggcgcttcactcgactgggatagagtcttctatcatggatgctggctgctaagtggatgcgattag

SEQ ID NO: 204447 - DNA, 981 bp, Artificial Sequence
  derived and/or modified sequence
atgccccacctgcccctggccagcttccggccccccttctggggcctgcgtcacagccggggtcttccccgtttccatagtgtatcaactcagagcgagccacacggctctccgatctcgagaagaaatcgcgaagctaagcagaagcggctgagagagaaacaggccacattggaagccgagatcgccggggaatccaagagccccgccgaaagcatcaaagcatggaggcccaaggaattagtgctctacgagatccccactaagcccggagagaaaaaggacgttagcggccccttgcctccagcttattctccccggtacgtcgaagccgcatggtacccctggtgggttcgagaggggttcttcaagcccgaataccaggctcgcctgcctcaggcaacgggagagaccttctccatgtgtatcccaccaccgaacgtgacaggatccctccatattgggcacgctctcacagttgccattcaggatgctttagtgcgctggcataggatgcgcggagaccaggtgctatgggtacccggctccgatcacgccgggatagccacccaggccgtagttgagaaacaactgtggaaagagagaggcgtgcgacgtcacgagctctccagggaggcatttttaagagaagtctggcagtggaaggaggcaaagggaggagaaatttgcgaacaactccgggctttaggggcctcattggattgggacagagagtgctttacaatggatgtggggagctccgtggctgtgaccgaggcattcgtccgcctgtataaggcagggcttttataccggaaccatcagttagtcaattggtcttgtgctctccgtagcgcgatcagtgacatcgaggtagagaaccgtccactgcccggccatacacagctgcggcttcccggttgccccacacctgtctcgttcgggctcctcttttccgttgcttttcctgtggacggttag

SEQ ID NO: 204448 - DNA, 348 bp, Artificial Sequence
  derived and/or modified sequence
atgccccacctgcccctggccagcttccggccccccttctggggcttgaggcactcacggggactccctcgcttccattctgtcagcacacagagcgaaccacatggaagccccatcagccgccgcaacagagaagctaagcaaaagagactgagggagaagcaggccacactggaagctgaaatagccggagagagtaagagcccagctgagagtatcaaagcttggcgccccaaagagctcgtgttgtacgagatccctaccaagcctggtgagaaaaaggatgtgagcggtccattgccccctgcatatagcccccgctacgtggaggcggcctggtacccctag

SEQ ID NO: 204449 - DNA, 774 bp, Artificial Sequence
  derived and/or modified sequence
atgccccacctgcccctggccagcttccggccccccttctggggcctgagacactcccgcggtcttccccgatttcattccgtgtctacacaatctgaaccccacggctcacccatcagcagaaggaaccgcgaggccaaacagaagcgcctgcgagagaaacaggcgacattggaagccgagattgcaggcgagagcaagagcccggctgagagcatcaaagcatggcgtccaaaggaactggtgctatacgagattccaaccaaaccgggggagaaaaaggacgtctccgggcctctcccacccgcctattccccacgttatgtggaggctgcctggtacccctggtgggtgcgagagggcttttttaagcccgaatatcaggctaggcttcctcaggcaacgggcgaaacgttttccatgtgtattcctccgcccaatgtgaccggctccctccatattggccatgccctgaccgtcgccatccaagacgccctggttcggtggcatcggatgagaggagaccaggttctgtgggtgcctgggtcagaccacgccggcatcgctactcaggctgtggtggaaaagcagctatggaaagaaaggggcgttaggcgccacgaactcagtcgtgaagccttcctgagagaggtttggcagtggaaggaagccaaaggcggagaaatctgcgagcagctccgtgctttgggcgcttcccttgattgggacagggtgttctaccatggatgctggctgctgtcaggttgcgactag

SEQ ID NO: 204450 - DNA, 981 bp, Artificial Sequence
  derived and/or modified sequence
atgccccatctgcccctggcttctttccggccaccattctggggcctgcggcactcaagagggttgccgagattccacagcgtgtcaacgcagagcgaaccccatgggagcccaatttcccggagaaatcgcgaggctaaacaaaaacgcctgagagagaagcaagccacgcttgaggcagagattgctggcgagagcaagtcgcctgcagaatcaatcaaggcctggcgccctaaggagctcgttttgtacgaaatacccacgaaacctggtgagaaaaaggacgtgtcaggccctctcccccctgcgtattcaccaagatatgtcgaggcagcctggtatccatggtgggtgagggagggttttttcaagcctgagtatcaggcgagactccctcaggccacaggcgaaactttctccatgtgtataccgccacccaatgtgaccgggtcactgcatatcggacacgctctgacagtggcaatccaggatgcccttgtgcgttggcatcggatgcgtggggaccaagtactctgggttcctggcagcgaccatgctgggattgcaactcaggcggtggtggaaaaacagctctggaaagagcgtggggtgcgaaggcacgagctttccagggaggcctttttgcgggaggtgtggcagtggaaagaggccaagggcggagagatttgtgaacagctgagagccctgggtgcctcactggactgggacagggaatgcttcacgatggacgtaggttctagtgtggcggtgaccgaagccttcgtccggttatataaagccggactactgtaccggaatcaccagctagtcaattggagttgcgctctcagaagcgcaatcagcgacatagaagtggagaataggcccctgccgggtcacactcagcttaggcttccaggctgccctactcctgttagcttcgggctcctgttttccgtcgcgtttccagtggacgggtag

SEQ ID NO: 204451 - DNA, 348 bp, Artificial Sequence
  derived and/or modified sequence
atgccccatttgcccctagcgagcttccgacccccattctggggtttgagacacagtaggggcctccccagattccattctgtcagtacccaaagcgagccacatggctctcctatttcgcgacggaatcgggaggctaagcagaaaagattacgagaaaaacaagcaaccctcgaggccgaaatcgccggagagtctaagagcccagccgagagtattaaagcatggagaccgaaggagctcgtgttgtatgagattcctaccaagccaggggagaaaaaggatgtgagcggaccactgcctccagcatattcaccgaggtatgtggaagccgcatggtacccctag

SEQ ID NO: 204452 - DNA, 774 bp, Artificial Sequence
  derived and/or modified sequence
atgccacatctccctctagcttccttcagaccaccattctggggtctgagacacagtaggggccttccacgcttccactcagtgtccactcagtctgagccgcatggttcccccatctcacgaaggaatagggaggccaaacaaaaaaggctcagagaaaagcaggctaccctcgaggccgagatcgcaggggagtcaaaaagtcccgcagagagtataaaggcatggaggccgaaggagttggtcctttatgagatcccgaccaagccgggagagaagaaggatgtaagcgggccactgccacccgcttactcccctcggtacgtggaggccgcatggtacccctggtgggtgcgagaagggtttttcaagcccgaataccaggcacggcttccccaagccacgggcgaaacattctcaatgtgcataccccctcccaatgtgaccggctccctgcacatcggccatgccttgaccgttgccattcaagacgccctggtgcgatggcaccgcatgcgaggggaccaggtattgtgggttcccggttcagatcacgctggaatcgccacccaggcggtagtcgaaaagcagctctggaaggaacggggagttcgtcggcacgaactaagtcgcgaagcctttttgcgggaggtgtggcagtggaaggaggctaagggcggagagatttgcgagcagctgagagccttgggagcgtctctggactgggaccgtgtattctaccacggttgctggctcctctccgggtgcgattag

SEQ ID NO: 204453 - DNA, 774 bp, Artificial Sequence
  derived and/or modified sequence
atgccccatttaccattggcctcctttaggccaccattctggggattgaggcattctcgtggtttgccacgatttcactccgtgtctactcagagtgagcctcacggtagccctatcagtcggcgcaatcgtgaggcaaaacagaaaagactccgagagaagcaggctactctggaggccgagatagccggggaatctaaatcaccagccgaatctatcaaagcctggcgccctaaagagctcgtgctgtatgaaattcccacgaagcctggggaaaaaaaagatgtgtcaggcccattgcccccggcttactctccacgctacgtcgaagctgcctggtacccatggtgggtccgcgaaggttttttcaaaccggagtatcaggctaggctcccacaagctacaggagagacattcagcatgtgcattccaccccccaacgtcactggaagcctgcacattgggcatgcgctcacggtggccatccaggacgctctggtgcgttggcatcgcatgaggggagatcaagtgctctgggtacccggctctgatcacgccggcatcgcaacacaggcagtggtagagaagcaactctggaaggagcgtggagtccgtagacacgaactgtcacgcgaggcctttctgcgtgaggtctggcagtggaaagaagccaaggggggagaaatatgtgagcagctcagagctctcggagccagccttgactgggaccgagttttctaccacggctgttggctgttatccggatgcgattag

SEQ ID NO: 204454 - DNA, 348 bp, Artificial Sequence
  derived and/or modified sequence
atgccacatctgcccctggcttccttccgtccccctttttggggcctgcggcacagtcgaggcctgccccgcttccatagcgtcagcactcagtctgaaccacatggttctcccatcagccgaagaaaccgggaagctaagcaaaagcggctgcgggagaagcaagccacactggaagcagagatcgccggggagtccaagtcacctgcagagtctattaaggcttggcggcctaaggaactagtgctatatgagattccaaccaagcctggcgagaagaaggatgtcagtggaccactcccgccagcgtattccccccgatacgtggaagccgcttggtatccatag

SEQ ID NO: 204455 - DNA, 981 bp, Artificial Sequence
  derived and/or modified sequence
atgcctcatctgccgctcgctagtttccgcccccctttttggggtctgaggcactccagaggccttccccggttccactccgtgagtacccagtctgagcctcacggaagccccatcagcaggcggaatcgggaagcaaagcagaagaggctgagggaaaaacaggctactctggaggcggaaatcgctggcgagtcaaagtcacccgcggagtcgattaaagcctggaggcctaaggaacttgtgctgtacgaaatcccaacgaagcccggagagaagaaggacgtctccggcccccttccccccgcctattctcccagatacgtggaggcagcatggtacccatggtgggtccgcgagggttttttcaagcccgaataccaggcccgcctgcctcaggccacaggagagacttttagtatgtgtattcctcctccaaacgttaccgggagtctgcacatcggacatgccctgactgtggctattcaggatgctctggtgcggtggcatcgcatgaggggagaccaggtgttatgggtcccgggttctgatcacgccgggattgccacgcaagctgtcgttgaaaaacagctgtggaaggagcgaggggtacgcaggcacgaactgagcagagaggcattcctaagggaagtttggcagtggaaggaagctaaagggggcgagatatgcgagcagctgcgtgcgctgggtgctagtttggattgggacagagagtgtttcaccatggacgttggcagttctgtggctgttacagaagcattcgtccgactctataaagccgggctgttgtaccgtaaccatcagctcgtgaattggagctgcgcgttgcgctcggcaatcagtgacatcgaggtggaaaatagaccgcttcccggtcacactcagcttaggcttccaggatgcccaacaccagtatcctttggactgctctttagcgtagcgtttcctgtggacgggtag

SEQ ID NO: 204456 - DNA, 774 bp, Artificial Sequence
  derived and/or modified sequence
atgccccacctgcccctggccagcttccggccccccttctggggcctgaggcactccaggggactgccaaggtttcattcagttagcacacagtctgagccccatggcagccccatctctcgcagaaacagggaggcaaaacagaaaaggctgcgggaaaaacaggcaacactcgaggccgagatcgctggggaatccaaatctcctgccgagtcgattaaggcctggcgacccaaggaacttgtcctctatgaaatcccaactaaacctggcgaaaagaaagacgtgtcaggcccactgccgcccgcctattccccacgctatgtggaagcagcttggtacccttggtgggtgagagaggggttttttaaacctgagtaccaggccagacttcctcaagcaactggcgaaactttcagcatgtgcatccccccacctaacgtgacagggagtttacatattggccacgcgctgaccgtagcaatacaggacgctctggtgcgttggcacagaatgcgcggcgaccaggtgctctgggtccccggttcagatcatgctggaatcgcgacgcaggctgttgtggaaaaacagttgtggaaagagcggggcgtgagaaggcacgagcttagccgagaagccttcctgagggaggtctggcagtggaaagaggccaagggcggggagatttgtgaacaactgcgcgctcttggagcaagtctggactgggaccgggtgttttaccacggttgctggttgctcagcggttgtgattag

SEQ ID NO: 204457 - DNA, 348 bp, Artificial Sequence
  derived and/or modified sequence
atgccccacctgcccctggccagcttccggccccccttctggggcttgaggcactcgagggggcttcccagattccactctgtcagtacccagagcgaaccccacggatcacccatcagccggaggaacagggaggctaagcagaagcggttgcgggagaagcaggccaccttggaggcggagatagcaggtgaatccaagagccccgcagaatcaatcaaggcatggaggcctaaagagctcgtgctctatgaaatccccactaagccgggcgagaagaaagacgtaagcggacccctccccccggcatattcccccaggtatgtggaagcggcctggtacccttag

SEQ ID NO: 204458 - DNA, 981 bp, Artificial Sequence
  derived and/or modified sequence
atgccccacctgcccctggccagcttccggccccccttctggggccttcggcactctagaggactacctcgcttccactcagtgagtacccaatctgaaccccatggtagtcctatcagccgtagaaatcgagaagccaaacagaaacggcttcgcgagaaacaagcaactctcgaggccgagatcgccggggaatccaagagcccagcagagtcaatcaaagcttggcgacctaaagaactggtgctgtacgaaataccaactaagccaggcgagaaaaaagacgtttctggtcctctgccacccgcctattcaccccggtatgtcgaggccgcatggtacccttggtgggtccgggaaggctttttcaagcccgaatatcaggctcgtctaccccaggcaacgggtgagacattttcaatgtgcattcctcctcccaatgttacaggcagtttgcatattggccatgccctcactgtggccatacaggacgctctcgtaagatggcaccgaatgcgaggagaccaggtcctgtgggtgccgggatccgatcacgcaggcatagctacccaggccgtggtggagaagcaactgtggaaagaacgcggcgtgaggcgccacgaactcagtagagaagccttcttacgggaagtctggcagtggaaagaggccaaagggggcgagatatgcgagcagttgagggcccttggagcctccctcgattgggaccgtgagtgttttaccatggatgtgggcagttccgtggccgttacagaggcctttgtccggctgtataaggctggcctgctgtaccgaaatcatcagttagtcaactggtcctgcgccttgcgttctgctattagcgacatagaggtcgaaaaccgccccctgcctgggcacactcagttacggttgcccggctgtccgacacccgttagctttggacttctattttctgtggctttcccagtggatggatag

SEQ ID NO: 204459 - DNA, 774 bp, Artificial Sequence
  derived and/or modified sequence
atgccacacctacccttggcttctttccgccctccgttctggggactgcgtcactcacgtggactgccgcgtttccattcagtctccacccagtctgagcctcacggaagtccaatctctcgaaggaaccgtgaggcaaagcagaagagactgcgcgaaaaacaagccactctcgaggcggagatcgccggagaaagtaagtcccccgcagagtctatcaaagcatggcggcctaaagagttggttctgtatgagattcctacgaagcctggagagaagaaagacgtgagtggaccattgccgccagcgtattccccacgctacgtggaggctgcttggtatccttggtgggtgcgggaaggctttttcaaacccgagtatcaggctcgcttaccgcaagctaccggcgaaaccttttcaatgtgtattccacccccaaatgtcactgggagcctccacattggccacgccctgactgtggcaattcaggacgcactcgtacgctggcaccgaatgcgaggcgaccaggtactgtgggtaccaggaagtgatcatgcagggatcgccacccaggcggtcgtggaaaaacagctttggaaagagcgtggcgtgaggcggcatgagctgtctcgagaagcgtttttacgcgaagtatggcagtggaaagaggcgaaaggaggggagatctgcgagcagttaagagctcttggcgctagtttggattgggatagggttttttaccacgggtgttggctcctgtccggttgcgactag

SEQ ID NO: 204460 - DNA, 348 bp, Artificial Sequence
  derived and/or modified sequence
atgccccacctgcctcttgcgagcttcagacctcctttctggggcttaagacactcccgtggactgcctaggttccactcagttagcacccagtccgaaccccatggctccccaatttcacgaaggaaccgcgaagcaaaacaaaagagactccgcgaaaaacaggccacactggaagccgaaatcgccggtgaaagtaaatcgccggcagaatctattaaagcttggagacctaaggagcttgtgttatacgaaattcctacaaagcccggtgagaaaaaagatgtatccggaccactcccacctgcctacagccccagatatgtggaagctgcctggtacccatag

SEQ ID NO: 204461 - DNA, 981 bp, Artificial Sequence
  derived and/or modified sequence
atgccccacctgccccttgcctcatttaggcctcccttctggggtctgcgacattccagaggcctccccaggtttcacagcgtgtctacccagtctgagcctcatgggtccccgattagcaggaggaaccgcgaagccaagcagaagaggctgagggaaaagcaggccactctagaagccgagatagccggagaatctaaatcgcccgcagaatctataaaagcttggcgccctaaggagctggtcctgtacgagatcccaaccaagccaggagagaagaaagatgtgtccggacctttacccccagcctattctccaaggtatgtggaagccgcatggtacccgtggtgggtgcgggagggttttttcaagccagagtaccaggctagattgccccaggctaccggtgagacattctctatgtgcatacctccgccaaatgtaacaggctccctccatataggccatgcactgacagtggctatccaggatgccctcgtgcggtggcacaggatgagaggagatcaagtcctgtgggttcctggctcagaccacgccggaatcgcgacacaggccgtggttgaaaagcagttgtggaaggagagaggagtgcgtcgacacgagctgtctagagaggccttcctgagggaggtctggcagtggaaggaagcaaagggcggagaaatatgcgagcagctgcgcgcactaggggcatcattagactgggaccgcgagtgttttactatggatgtcggttctagcgtggctgtgacagaggcttttgttaggctgtataaggctggcttgctgtaccggaaccaccagcttgtaaattggtcatgtgcactgaggtcagctattagcgatattgaagtggaaaacagacctctgccaggtcacacacagctgagactccccggatgccccacgcctgttagcttcgggcttttattctctgttgcatttcccgtcgacggctag

SEQ ID NO: 204462 - protein, 1877 aa, Artificial Sequence
  derived and/or modified sequence
MLGSSVKSVQPEVELSSGGGDEGADEPRGAGRKAAAADGRGMLPKRAKAPGGGGGMAKASAAELKVFKSGSVDSRVPGGPPASNLRKQKSLTNLSFLTDSEKKLQLYEPEWSDDMAKAPKGLGKVGSKGREAPLMSKTLSKSEHSLFQAKGSPAGGAKTPLAPLAPNLGKPSRIPRGPYAEVKPLSKAPEAAVSEDGKSDDELLSSKAKAQKSSGPVPSAKGQEERAFLKVDPELVVTVLGDLEQLLFSQMLDPESQRKRTVQNVLDLRQNLEETMSSLRGSQVTHSSLEMTCYDSDDANPRSVSSLSNRSSPLSWRYGQSSPRLQAGDAPSVGGSCRSEGTPAWYMHGERAHYSHTMPMRSPSKLSHISRLELVESLDSDEVDLKSGYMSDSDLMGKTMTEDDDITTGWDESSSISSGLSDASDNLSSEEFNASSSLNSLPSTPTASRRNSTIVLRTDSEKRSLAESGLSWFSESEEKAPKKLEYDSGSLKMEPGTSKWRRERPESCDDSSKGGELKKPISLGHPGSLKKGKTPPVAVTSPITHTAQSALKVAGKPEGKATDKGKLAVKNTGLQRSSSDAGRDRLSDAKKPPSGIARPSTSGSFGYKKPPPATGTATVMQTGGSATLSKIQKSSGIPVKPVNGRKTSLDVSNSAEPGFLAPGARSNIQYRSLPRPAKSSSMSVTGGRGGPRPVSSSIDPSLLSTKQGGLTPSRLKEPTKVASGRTTPAPVNQTDREKEKAKAKAVALDSDNISLKSIGSPESTPKNQASHPTATKLAELPPTPLRATAKSFVKPPSLANLDKVNSNSLDLPSSSDTTHASKVPDLHATSSASGGPLPSCFTPSPAPILNINSASFSQGLELMSGFSVPKETRMYPKLSGLHRSMESLQMPMSLPSAFPSSTPVPTPPAPPAAPTEEETEELTWSGSPRAGQLDSNQRDRNTLPKKGLRYQLQSQEETKERRHSHTIGGLPESDDQSELPSPPALPMSLSAKGQLTNIVSPTAATTPRITRSNSIPTHEAAFELYSGSQMGSTLSLAERPKGMIRSGSFRDPTDDVHGSVLSLASSASSTYSSAEERMQSEQIRKLRRELESSQEKVATLTSQLSANANLVAAFEQSLVNMTSRLRHLAETAEEKDTELLDLRETIDFLKKKNSEAQAVIQGALNASETTPKELRIKRQNSSDSISSLNSITSHSSIGSSKDADAKKKKKKSWVYELRSSFNKAFSIKKGPKSASSYSDIEEIATPDSSAPSSPKLQHGSTETASPSIKSSTSSSVGTDVTEGPAHPAPHTRLFHANEEEEPEKKEVSELRSELWEKEMKLTDIRLEALNSAHQLDQLRETMHNMQLEVDLLKAENDRLKVAPGPSSGSTPGQVPGSSALSSPRRSLGLALTHSFGPSLADTDLSPMDGISTCGPKEEVTLRVVVRMPPQHIIKGDLKQQEFFLGCSKVSGKVDWKMLDEAVFQVFKDYISKMDPASTLGLSTESIHGYSISHVKRVLDAEPPEMPPCRRGVNNISVSLKGLKEKCVDSLVFETLIPKPMMQHYISLLLKHRRLVLSGPSGTGKTYLTNRLAEYLVERSGREVTEGIVSTFNMHQQSCKDLQLYLSNLANQIDRETGIGDVPLVILLDDLSEAGSISELVNGALTCKYHKCPYIIGTTNQPVKMTPNHGLHLSFRMLTFSNNVEPANGFLVRYLRRKLVESDSDINANKEELLRVLDWVPKLWYHLHTFLEKHSTSDFLIGPCFFLSCPIGIEDFRTWFIDLWNNSIIPYLQEGAKDGIKVHGQKAAWEDPVEWVRDTLPWPSAQQDQSKLYHLPPPTVGPHSIASPPEDRTVKDSTPSSLDSDPLMAMLLKLQEAANYIESPDRETILDPNLQATL

SEQ ID NO: 204463 - DNA, 5634 bp, Artificial Sequence
  derived and/or modified sequence
atgctgggttcttctgtcaaatccgtacagcccgaggtggagcttagtagcggaggaggtgacgaaggcgcggacgaacctagaggggcaggccgcaaagccgcagccgctgatggcagggggatgttgcccaagcgtgctaaggctcctgggggtggtggcggcatggctaaggcctccgctgccgagctgaaggtatttaagtctgggtccgttgattcacgcgtgcccggcggtccccccgcatcaaacctgcgaaaacagaagagccttacgaacctgtctttcttaactgacagcgagaaaaagttacaactgtacgagccggagtggagtgacgacatggcaaaggctcctaaagggcttgggaaggtagggagcaaaggaagggaggctccactcatgtccaaaactctctcaaagtccgagcacagcttgttccaggccaaagggagccctgcgggaggcgccaaaactcccctggcaccactggccccgaacctggggaagcctagtcggatcccaagaggcccttatgcagaagttaagccgctgagcaaggcccccgaagccgctgtgtccgaggacgggaagagcgatgatgagctgctctcttccaaggcaaaggcccagaagtcctccggtcctgtgccgtctgcgaagggacaggaggagcgtgcgttcctgaaagtggatcccgagcttgtggtgaccgtactgggggatcttgagcagttactgttcagccagatgcttgatcccgaatcacagaggaaaagaactgtgcaaaatgtattggatctgcggcagaacctggaggagacaatgagttccctcaggggatctcaggtgacacactcctcactcgagatgacttgttatgatagtgacgacgcaaacccgcggtcagtctcaagtttgtcaaatcggtctagtcccctatcatggcggtatggccagtcttctccccgattgcaagcaggggacgctccctctgtcggggggagttgtagatcagaaggaacccccgcttggtatatgcacggggagagggcacactatagtcacactatgccgatgaggagtccctccaaactgagccacatcagtcggctcgaactggtggaaagccttgattctgacgaggttgatttgaagtccggctacatgtcagacagtgatttaatggggaagactatgactgaagacgacgacattactactggctgggacgaatcttccagcatcagctccggcttgagcgatgcctctgataaccttagcagtgaggaatttaatgcatcttcctcactgaattcgttacccagtacacctaccgcaagtcgccggaatagtaccatagtcttgcggacggacagcgagaaacgtagcttggcggaaagcggacttagctggttctcagaaagcgaggaaaaggcacctaagaagctggaatatgacagtgggagcctgaagatggaacctggaacgagcaaatggagaagggagcgacctgaatcctgcgacgactcatctaagggcggcgagctcaaaaaaccaatctcattgggtcaccccggcagtcttaagaaggggaaaacgcctcccgtcgctgtgacgtcccctattacacacactgcccagagtgcactcaaggttgccggcaaaccggaaggaaaggccaccgacaaagggaagctcgcagttaagaacactggcctccagcggagcagctctgacgccggccgggatcgcctcagtgatgctaagaagccgccatccggcatcgctagaccatccacttctggttccttcgggtacaagaagcctccaccagctacggggacagctactgtcatgcagactggggggagtgccaccctgagtaaaatccaaaaatcgtccggcatcccggtcaagcctgtcaatggtcgaaaaacctccctggatgtctccaattccgctgagccgggctttttggcccccggcgcccgctcaaacattcagtaccgttccctaccgcggcctgcaaaatccagctctatgtcggtgacgggaggcaggggcggccctcgaccagtttctagctcaatcgaccccagcctactctctaccaaacagggcggcttgacaccaagccgcctgaaggagcctactaaggtcgcttcgggtaggactactcccgcccccgttaaccagacagaccgagaaaaggagaaagccaaggctaaagcagttgccctggattccgacaatatctcactcaagtcgattggttcgcccgaatccacgcctaagaaccaagcctcacacccaaccgcgacgaagctggcggagctgccacccaccccactgcgagcaaccgctaagtcgttcgtaaagcctccatccttggccaacctagacaaggttaattctaattcacttgacctccccagctcatctgacaccacccacgctagcaaggtaccagatctgcatgccacatcttctgcctccgggggccccctcccttcatgctttactcctagtccagccccaatcctcaatatcaactcagcttcattttcccagggactcgagttaatgtccggcttctctgtacccaaagaaacacgcatgtacccaaaactatccggcttgcacagatccatggaatctttgcaaatgccaatgtccctgccttccgccttcccaagctctaccccagtgccaacgccaccagcccctccagcagccccgacagaagaggagacagaagaactgacttggagcggctccccccgggcaggccagctggatagcaaccagcgggatcggaatacactgcctaagaaggggctgcgctatcaactgcaatcccaggaggagacaaaggagcgaagacacagtcacacaatcggcggccttccagagtcagacgaccagagcgagctgccaagccccccggctctgccaatgtctctcagcgctaaaggccaactgactaacattgttagtcctacggctgcaaccacaccccgaatcacccggagcaattctatccctacccatgaggcagccttcgagttatattcaggctcacagatgggttccaccctgtccctggctgaacggcccaaagggatgatccgctccggatcattcagagacccaacggacgacgtgcacgggagcgtgctttcccttgccagctcggcctcaagcacgtattcgtctgcagaagagagaatgcagtctgagcagatccgtaagcttcggagggaattagaatcgagccaggaaaaggtggccaccctgaccagtcagttgtccgctaatgccaatctggtcgctgcttttgagcaatcactcgtgaacatgacttcccgcctgcgacatttggccgaaacagccgaggagaaagatacggaactgctcgatctgagggagacaattgactttctgaagaaaaagaattcagaggcccaggccgtgatccagggggccttgaacgccagcgagaccacccctaaggaattgagaattaaacgacagaactcatcagactctatcagcagcctgaactccatcacttcccacagttccatcggatcgagcaaagacgccgatgcgaagaaaaagaaaaaaaaatcttgggtctatgaattgcggagctcttttaacaaggctttttctattaagaaggggcccaagtctgccagttcttacagcgacatcgaagagatcgcgactcccgatagctccgccccgtcgtccccaaagctccagcatggctccacagaaactgcaagcccctctatcaaaagcagtacatctagttcagttggcacagacgtcaccgaaggacctgcccatcctgcgccccacactagattgtttcacgccaatgaggaggaagaaccagagaaaaaagaagtgagtgaattgcggagtgagctttgggagaaagagatgaagcttactgacattagacttgaggcactaaactcggcccaccagctggaccaactgagagagacgatgcataatatgcagctcgaggtggacttactcaaagccgagaatgataggctgaaggtggcgccaggaccctcctcaggctccacgccagggcaggtgccggggtcctctgctcttagcagccctagacgttctctcggactggcactgacccacagcttcgggccaagccttgccgacaccgacctgagtcccatggacggcattagcacatgtgggcccaaagaggaagtgaccctacgggtcgtggttagaatgcccccacagcatattattaagggtgacctcaagcagcaggagtttttcctcggctgcagcaaggtgtccgggaaggtcgattggaaaatgctcgacgaagccgtgtttcaagtttttaaagactatatttcaaagatggaccctgcctcaactctggggcttagcacggagagcatccatggatacagcatttctcatgtgaagagagtgctggacgcagaacctccagaaatgccaccatgcaggcggggcgtgaacaatatctctgtatctttaaaaggcctgaaagagaagtgcgttgatagtctggtgtttgagactctgatcccaaagcctatgatgcagcattacatctccctgctgcttaaacatcgcagattggtgctgtcgggcccaagtggaaccgggaaaacctatctgaccaataggttggccgagtatcttgtcgaacgctcaggccgggaggtgactgagggcatcgtgtctacattcaacatgcaccagcagtcttgcaaggatctgcagctgtacttgagcaacctcgctaaccagatcgaccgggagactggcatcggagacgtgcctctggtgatcctgctggatgacttatcagaagctggctctatctccgagctggtcaatggcgccctcacttgcaagtaccacaagtgtccctacatcattgggaccaccaatcagcctgtgaaaatgacccccaaccacggactgcatttgagcttcaggatgctgactttttccaataatgtagagccagctaacggcttcctcgtccgctacttgcggagaaagcttgtggaatcagatagcgatataaatgctaataaggaggaactgctccgagtcttagactgggtcccgaaactgtggtaccatctgcatacattccttgaaaagcacagtaccagcgattttctcataggaccgtgtttttttctctcctgcccgatcggcattgaagatttcaggacatggttcattgatctgtggaataattctatcattccctacctgcaagaaggtgccaaggacggaatcaaagtccacggtcaaaaggccgcctgggaggaccccgtcgaatgggttcgagatacattaccttggccctccgcccagcaggatcaaagcaaactgtatcatctcccgccgcctacggtgggtccacatagcatcgcctccccaccggaggacaggactgtaaaagattcaacgccctcgtctctggacagtgatcccctgatggcgatgctcctcaaactccaggaagcagcaaactatatcgaatcaccagatcgtgaaactatcctggatccgaacctgcaggctacactgtag

SEQ ID NO: 204464 - DNA, 5634 bp, Artificial Sequence
  derived and/or modified sequence
atgctgggcagctctgtgaagtctgtgcagcctgaggtggagctgagcagcggcggcggagatgaaggagcagatgagcccaggggggccggcaggaaggctgctgctgctgatggccggggcatgctgcccaagagggccaaggcccctgggggcggcggcggcatggccaaggccagcgctgctgagctgaaggtgttcaagagcggctctgtggacagccgggtgcctgggggccccccagccagcaacctgaggaagcagaagagcctgaccaacctgtccttcctgacagacagcgagaagaagctgcagctgtatgagcctgagtggagcgatgacatggccaaggcccccaagggcctgggcaaggtgggcagcaagggccgggaggcccccctgatgagcaagaccctgagcaagtctgagcacagcctcttccaggccaagggcagccctgctgggggcgccaagacccccctggcccccctggcccccaacctgggcaagcccagccgcatcccccggggcccctatgcagaggtgaagcccctgagcaaggcccctgaggccgctgtgtctgaagatggcaagagtgatgatgagctgctgagcagcaaggccaaggcccagaagagcagcggccctgtgcccagcgccaagggccaggaggagcgggccttcctgaaggtggaccctgagctggtggtgacagtgctgggggacctggagcagctgctcttcagccagatgctggaccctgagagccagaggaagaggacagtgcagaatgtgctggacctgcggcagaacctggaggagaccatgagcagcctgcggggcagccaggtgacccacagcagcctggagatgacctgctatgacagtgatgatgccaaccccaggtctgtgagcagcctgagcaacagaagcagccccctgtcctggaggtatggccagagcagcccccggctgcaggccggagatgcccccagcgtgggcggcagctgccgctctgagggcaccccagcctggtacatgcacggggagcgggcccactacagccacaccatgcccatgaggagccccagcaagctgagccacatcagccggctggagctggtggagagcctggacagtgatgaggtggacctgaagagcggctacatgtctgacagcgacctgatgggcaagaccatgacagaagatgatgacatcaccaccggctgggatgagagcagcagcatcagcagcggcctgagtgatgccagtgacaacctgagcagcgaggagttcaatgccagcagcagcctgaacagcctgcccagcacccccacagccagcagaagaaacagcaccatcgtgctgaggacagacagcgagaagaggagcctggccgagagcggcctgtcctggttcagcgagagcgaggagaaggcccccaagaagctggagtatgacagcggcagcctgaagatggagcccggcaccagcaagtggaggcgggagaggcctgagagctgtgatgacagcagcaaaggaggagagctgaagaagcccatcagcctgggccaccctggcagcctgaagaagggcaagaccccacctgtggccgtgaccagccccatcacccacacagcccagagcgccctgaaggtggccggcaagccagagggcaaggccacagacaagggcaagctggccgtgaagaacacaggcctgcagaggagcagcagtgatgctggccgggaccggctgagtgatgccaagaagccacccagcggcatcgcccggcccagcaccagcggcagctttggctacaagaagcccccaccagccaccggcacagccaccgtgatgcagacaggaggcagcgccaccctgagcaagatccagaagagcagcggcatccctgtgaagcctgtgaatggaaggaagaccagcctggatgtgagcaacagcgctgagcccggcttcctggcccctggggcccggagcaacatccagtaccgcagcctgcccaggcctgccaagagcagctccatgtctgtgactggaggccggggcggccccaggcctgtgagcagcagcattgaccccagcctgctgagcaccaagcagggcggcctgacccccagccggctgaaggagcccaccaaggtggccagcggccgcaccaccccagcccctgtgaaccagacagaccgggagaaggagaaggccaaggccaaggctgtggccctggacagcgacaacatcagcctgaagagcatcggcagccctgagagcacccccaagaaccaggccagccaccccacagccaccaagctggccgagctgccccccacccccctgcgggccacagccaagagctttgtgaagccacccagcctggccaacctggacaaggtgaacagcaacagcctggacctgcccagcagcagtgacaccacccacgccagcaaggtgcctgacctgcacgccaccagcagcgccagcggcggccccctgcccagctgcttcacccccagccctgcccccatcctgaacatcaacagcgccagcttcagccagggcctggagctgatgagcggcttctctgtgcccaaggagaccaggatgtaccccaagctgagcggcctgcaccgctccatggagagcctgcagatgcccatgagcctgcccagcgccttccccagcagcacccctgtgcccaccccaccagcccccccagctgcccccacagaggaggagacagaggagctgacctggagcggcagcccccgggccggccagctggacagcaaccagagggacaggaacaccctgcccaagaagggcctgcgctaccagctgcagagccaggaggagaccaaggagaggaggcacagccacaccatcggcggcctgcctgagagtgatgaccagagcgagctgcccagccccccagccctgcccatgagcctgagcgccaagggccagctgaccaacatcgtgagccccacagctgccaccaccccccgcatcaccaggagcaacagcatccccacccatgaggccgcctttgagctgtacagcggcagccagatgggcagcaccctgagcctggccgagcggcccaagggcatgatccgcagcggcagcttccgggaccccacagatgatgtgcacggctctgtgctgagcctggccagcagcgccagcagcacctacagcagcgctgaggagaggatgcagagcgagcagatcaggaagctgcggcgggagctggagagcagccaggagaaggtggccaccctgaccagccagctgagcgccaatgccaacctggtggccgcctttgagcagagcctggtgaacatgaccagccggctgcggcacctggccgagacagctgaggagaaggacacagagctgctggacctgcgggagaccatcgacttcctgaagaagaagaacagcgaggcccaggccgtcatccagggcgccctgaatgccagcgagaccacccccaaggagctgcgcatcaagaggcagaacagcagtgacagcatcagcagcctgaacagcatcaccagccacagcagcatcggcagcagcaaggatgctgatgccaagaagaagaagaagaagtcctgggtgtatgagctgcggagcagcttcaacaaggccttcagcatcaagaagggccccaagagcgccagcagctacagcgacatcgaggagatcgccaccccagacagcagcgcccccagcagccccaagctgcagcacggcagcacagaaacagccagccccagcatcaagagcagcaccagcagctctgtgggcacagatgtgacagagggccctgcccacccagccccccacaccaggctcttccacgccaatgaggaggaggagcctgagaagaaggaggtgtctgagctgcggtctgagctgtgggagaaggagatgaagctgacagacatccggctggaggccctgaacagcgcccaccagctggaccagctgcgggagaccatgcacaacatgcagctggaggtggacctgctgaaggcagaaaatgaccggctgaaggtggcccctggccccagcagcggcagcaccccaggccaggtgcccggcagcagcgccctgagcagcccccggcgcagcctgggcctggccctgacccacagctttggccccagcctggccgacacagacctgagccccatggatggcatcagcacctgtggccccaaggaggaggtgaccctgcgggtggtggtgaggatgccaccccagcacatcatcaagggggacctgaagcagcaggagttcttcctgggctgcagcaaggtgtctgggaaggtggactggaagatgctggatgaagctgtgttccaggtgttcaaggactacatcagcaagatggaccctgccagcaccctgggcctgagcacagagagcatccacggctacagcatcagccacgtgaagagggtgctggatgctgagcccccagagatgccaccctgcagaagaggagtgaacaacatctctgtgtccctgaagggcctgaaggagaagtgtgtggacagcctggtgtttgagaccctcatccccaagcccatgatgcagcactacatcagcctgctgctgaagcaccggcggctggtgctgagcggccccagcggcaccgggaagacctacctgaccaaccggctggccgagtacctggtggagaggagcggccgggaggtgacagagggcatcgtgtccaccttcaacatgcaccagcagagctgcaaggacctgcagctgtacctgagcaacctggccaaccagattgaccgggagaccggcattggagatgtgcccctggtgatcctgctggatgacctgtctgaggccggcagcatcagcgagctggtgaatggagccctgacctgcaagtaccacaagtgcccctacatcatcggcaccaccaaccagcctgtgaagatgacccccaaccacggcctgcacctgtccttcaggatgctgaccttcagcaacaacgtggagcccgccaacggcttcctggtgcgctacctgcggaggaagctggtggagagtgacagcgacatcaatgccaacaaggaggagctgctgcgggtgctggactgggtgcccaagctgtggtaccacctgcacaccttcctggagaagcacagcaccagtgacttcctgattggcccctgcttcttcctgagctgccccatcggcatcgaggacttccgcacctggttcatcgacctgtggaacaacagcatcatcccctacctgcaggagggcgccaaggatggcatcaaggtgcacggccagaaggccgcctgggaggaccctgtggagtgggtgcgggacaccctgccctggcccagcgcccagcaggaccagagcaagctgtaccacctgcccccacccaccgtgggcccccacagcatcgccagccccccagaggacagaacagtgaaggacagcacccccagcagcctggacagcgaccccctgatggccatgctgctgaagctgcaggaggccgccaactacatcgagagcccagaccgggagaccatcctggaccccaacctgcaggccaccctgtag

SEQ ID NO: 204465 - DNA, 5634 bp, Artificial Sequence
  derived and/or modified sequence
atgctgggcagcagcgtgaagagcgtgcagcccgaggtggagctgtctagcggcggcggagacgaaggagccgatgaaccgcgcggtgcggggcgcaaggctgccgcagcagatggacgtggaatgctcccaaagcgcgcaaaagcgcctggaggaggcggcggaatggctaaagcgtctgctgcagaactaaaggttttcaaaagcggcagtgtggactctagagtacctggggggcctcctgctagcaatctgagaaaacaaaaatctctcactaatctgtcgtttttgacagattctgagaaaaagttacaactgtatgagcccgagtggtcggacgatatggccaaggcgccgaaaggactcgggaaagtcggaagcaagggccgcgaggccccgctcatgagtaagacgctctcaaaatctgagcacagtctgttccaggcgaaagggtctcccgctggtggggccaaaacacccctggcccccctagctcctaaccttggtaaaccgagccgcatccctagagggccttatgctgaagtgaaaccactgtccaaggcccccgaggctgccgtttcagaggatggcaaaagcgatgatgagctcctgagcagtaaggcgaaagcacagaaaagctccgggcccgttccctccgccaaggggcaagaggagcgtgccttcttgaaagtggatccggagctggttgtgactgtgctgggtgacctggaacagctgctcttcagccagatgttagaccctgagtcccaacgcaagaggaccgttcagaacgtattagacctaagacagaatctggaggagacaatgtcctccctgaggggatcccaggtaacgcactcttcattggaaatgacctgctacgattctgacgatgccaacccgcggtctgtcagctctctgtccaacagatcctctcctctcagttggagatatggacagtcaagccctaggctccaggctggtgatgccccttccgtcggtggctcatgcaggagcgaggggacgccagcctggtatatgcacggggagcgggctcattactctcatacaatgccgatgcgctctccgtccaagctatcccatatctccagattggaactggtcgagtctctagattccgatgaagtggatctgaagtcggggtatatgagcgattctgatctgatgggcaaaaccatgaccgaggacgatgacatcactaccggttgggacgaatcttcttctataagctctggcctgtccgatgctagtgacaacttgtcaagcgaagaatttaacgcaagttcaagcctaaacagtcttccaagcactcccacagcttcccgacgcaatagcacaatcgtgcttcggactgacagcgagaagaggtcactggcagaatccgggcttagttggtttagcgaatcagaagagaaggcccccaagaagctggaatatgacagcggctccttaaagatggagcccggcacttcaaagtggaggcgggagcggcctgagtcatgtgatgactcctctaaaggcggcgaacttaaaaaaccaatctctttaggacatcctggtagccttaagaagggcaagacaccccctgtggccgtgacttcacctatcacccataccgcccaatccgctctgaaggtggccggaaaacccgaaggaaaagccaccgataaaggtaagttggccgtcaagaacacaggtttacaaagatcctcctcagacgcgggtcgcgatcggttatctgacgctaaaaagccgccaagcggcattgcccggccttctaccagcggctcttttgggtacaagaaaccacccccggcaaccgggacggcaactgttatgcagaccgggggcagcgccaccctctctaagatccagaaatcttccggaattcccgtcaaacccgtgaatggccgcaagacgagcctcgacgtgtcaaattccgctgagccaggctttctggccccaggtgcaaggagcaatatccagtatagaagcctgccacgtccggctaaatctagcagcatgtcagttacgggtggccgaggaggacctaggcctgtgtctagctccattgacccatctctgctctcaaccaaacagggtggcctcacccctagtcgtttgaaggagccaacaaaagttgcctccggcaggaccaccccagcacctgtaaatcagacagaccgggagaaggaaaaagcgaaggctaaggctgtggccctcgacagtgataatatctctcttaaatctatagggagtccggagagcacgccgaaaaatcaggcatcacaccccaccgccacaaagcttgctgagcttcctcctactcccttaagagccacagccaaatcttttgtgaagcccccttctttggccaatctggataaggtgaattcaaattccctggacctcccctcttcttctgataccacccatgccagcaaagtgccagacctacacgccacgtctagcgcatcaggggggcccctgccaagctgttttacccctagcccagctccgatccttaacataaattccgccagcttcagtcagggccttgagctgatgtctggtttttctgtgccaaaggaaacacgcatgtatcccaaactgtccgggctgcaccgatcaatggaatcactccagatgcccatgtctcttccaagtgcatttccatccagtactccagtgcctacaccacctgcaccccccgcggctcctaccgaggaggagactgaggagctcacttggtcgggaagcccgagggccggccaacttgactccaaccagagggacaggaatactctccccaaaaaaggccttcggtatcagctgcagtcccaggaggagacaaaggaacggagacattctcataccattggaggactgcctgaaagtgacgatcagtcggagttaccatcgccacccgccctgcccatgagtttgtcagccaagggacagctgacgaatatcgtctcacctacagctgccacaactccgcgcatcacccggagcaatagtatccccacccacgaagccgcgttcgaactgtactcgggctcccaaatgggctccaccctgtccctggctgaaaggccgaaaggtatgatccgcagcgggagttttcgggaccctacggatgacgttcacggatccgtgctgtcactagcgagttcagcaagctccacatatagctctgcagaagaacgtatgcagtccgagcaaatcagaaaattaagacgggagctggagagttcccaagagaaggtggcaacactcacgtcccagctgtccgcaaatgccaacctggtggctgctttcgaacagtctctggtgaacatgacctcccgactacgccacctggcagagaccgccgaggaaaaagataccgaactgctggacctgcgcgagaccattgactttctgaaaaagaaaaactccgaggcccaggctgtgatccagggagctttgaacgcctcggagacgacaccaaaggagctgcgcataaagcgccaaaactcctcagattctatctctagcttgaattccattacgtcccatagctcaatcggatccagcaaggatgccgacgctaaaaagaaaaagaagaagtcatgggtgtatgaactgcgttcttctttcaacaaggcatttagtattaagaaaggaccaaagtctgcttctagctactcggacattgaagagatcgccacccctgattctagcgcacccagttcacctaagttgcagcacggcagcaccgaaacagcgtccccaagtatcaaatcgagcacctcttctagtgtgggcaccgatgtaacagaaggaccagctcaccccgccccgcacactaggctgtttcatgcaaacgaggaagaagaacccgagaagaaagaagtttccgagctgagaagcgagctgtgggagaaagaaatgaagcttaccgacatcagattagaagccctgaatagtgcccaccaactagatcagttgcgtgaaacaatgcacaacatgcaactggaggtagatctcctcaaagccgagaacgataggctgaaggtggcacctgggccgtctagtggcagtacgcctggtcaggtgccgggatctagcgctctgtctagcccacgcaggagcctcggccttgctctcacacactcttttggcccttcactggccgacaccgacctgtcaccaatggacgggatctccacatgcgggccaaaggaggaggtcaccctgagagtggttgtgcggatgccaccccagcatatcattaagggcgatcttaaacaacaggagtttttcctgggatgcagtaaagtctcagggaaagtcgattggaagatgcttgatgaggcagtgttccaggtattcaaggactacatctctaagatggacccagccagtaccctaggactgagcaccgagtccattcacggatacagcataagccatgtgaagcgggtcctggatgcagagccccccgaaatgccgccctgtaggcgaggagtcaataacataagtgtctcgttgaagggcctaaaggagaagtgtgtcgactctctcgtgtttgagacactcattcctaaacccatgatgcagcactacatcagcctgcttctgaagcatcgccggctggtactctctgggccatcaggcacaggcaagacttacctgactaaccggctcgccgagtacctcgtggaaagatccggcagggaagtgaccgaggggatcgtgagtacgttcaacatgcatcaacagagctgcaaggatctccagctgtacctgagtaatctcgctaatcagattgatagggagactggaataggggatgtcccgttggtgatccttctggacgacctctctgaagccggttccatctctgagctcgtgaacggggctctgacctgtaaatatcataagtgcccttatattatcggcaccacaaaccagcccgttaagatgacccctaaccacgggctgcatcttagcttccgtatgctgactttttctaacaacgttgagccagcgaacggattcttagtgcgatatctgaggagaaagctcgtggagagtgatagtgacatcaatgccaataaagaagaactgctgcgtgtcttagactgggtcccgaagctctggtaccacctccacaccttcctcgagaagcactccacatccgacttcctgatcggtccctgcttctttctgagctgtcccatcggcattgaggactttcgaacctggttcatcgacctctggaataacagtattataccttaccttcaagaaggggcaaaggatgggatcaaggtccatgggcaaaaggccgcgtgggaggacccggtagagtgggtgcgagatacacttccgtggccctcagcacagcaggaccagtccaagctgtatcacctccctccacccacagtcggcccacatagcatcgcctccccccctgaagaccggaccgtgaaggactccaccccatcaagtctcgacagtgatccattaatggccatgctactcaagctgcaggaagcggcaaattatatagagtctcctgacagagaaaccatcctcgaccctaatctccaggcgacactttag

SEQ ID NO: 204466 - DNA, 13091 bp, Artificial Sequence
  derived and/or modified sequence
cacgggactgacaggcaggcaggccgcgggctgggatccggacaccaaagcaaaagcaccgctgggcgccggaggagccgcggggcttccatccttcctttgactgatttttaaattttaatttgtattttccccgccgccccgccccttttcctccgaccccgccctatcgctccccggcttccctgctctttcctttttcccggcttccttcctcgcgtttctttcccctgcgccctcggcttgcctctctccctcctccctcgctctctcccccttctctccccttcttcctcggtttcttccgtcctctctctccccctcctcctcccccgcctcctcctcctgcgctcccgccccctgccccctccccccgtgcctgcagacgcgcggatcgtccatgcgctcctcgcgggcagaatgctgggcagcagcgtcaagagcgtgcagcccgaggtggagctgagcagcggcggcggcgacgagggcgcggacgaaccgcggggcgccggcaggaaggcggcagcggcggacggcagaggcatgctgcccaagcgcgccaaggcgcccggcggcggcggcggcatggccaaggccagcgcggctgagctgaaggtcttcaagtccggcagcgtggacagccgtgtccccggcgggccgcccgcctccaacctgcgcaagcagaagtcactcaccaacctctcttttctcacggactccgagaaaaagctgcagctttatgagcccgaatggagcgacgatatggccaaggcgcccaaaggcttaggcaaggtggggtccaagggccgtgaagctccgctgatgtccaagacgctgtccaagtcggagcactcgctcttccaggccaagggcagcccggcgggcggcgccaagacccccctggctccgctcgcgcccaacctgggaaagccgagccggatccctcgaggaccctatgcggaggtcaagccgctcagcaaggcgcctgaagcggccgtgagcgaagatggcaaatcggacgacgagctgctctccagcaaggccaaggcgcaaaagagctctgggcctgtcccctctgccaagggccaggaggagcgcgccttcctcaaggtggaccccgagctggtggtgaccgtgctgggagacctggagcagctgctcttcagccagatgctggacccagagtcccagagaaagaggacagtgcagaatgtcctggatctccggcagaacctggaagagaccatgtccagcctgcgagggtcccaggtgactcacagctccctggagatgacctgctacgacagcgatgatgccaacccacgcagcgtgtccagcctctccaaccgctcgtcccctctgtcatggcgctatggccagtccagtccgcggctgcaggctggtgacgcgccctctgtgggtgggagctgccgctcggaggggacgcccgcctggtacatgcacggcgaacgggcccactactcccacaccatgcccatgcgcagccccagcaagctcagccatatctcccgcctggagctggtcgaatccctggactcggatgaggtggacctcaagtccggctacatgagcgacagtgacctcatgggcaagaccatgacggaggatgatgacatcactaccggctgggatgaaagcagctccatcagtagtggactcagcgatgcctcagacaatctcagttcagaagaattcaatgccagctcctcactcaactccctcccaagtactcccactgcttctcgcaggaactcaacaatagtgctacgcacagactcagagaagcgctcactggcagaaagtgggctgagctggtttagtgaatcagaggagaaagcccctaaaaaactggagtacgacagtggtagcctgaagatggaacctgggacttctaagtggcggagggagcggcctgagagctgtgatgattcatccaagggtggagaactgaaaaagcccatcagcctgggccaccctggttccctgaagaagggcaagaccccacctgtggctgtaacttcccccatcactcacacagcccagagtgccctcaaagtcgcaggcaaacctgagggcaaagctacagacaagggtaagcttgcagtgaagaatactgggctccaacgctcctcctctgatgctggtcgggaccgcctgagtgatgctaagaagcccccctcgggcattgctcgcccctccacttcgggatcctttggctacaagaagcctcctcctgccacaggcacagccactgtcatgcaaactggtggttcagccactctcagcaagatccagaagtcctcaggcatccctgtcaagccagtaaatgggcgcaagactagcttagatgtttccaacagtgcagagccaggattcctggctcctggagcccgttctaacatccagtaccgcagcctgccccggccagccaagtcaagttctatgagcgtgaccggcgggcggggtggacctcgccctgtgagcagcagcattgaccccagtctcctcagcaccaagcagggaggccttacgccttccagactgaaggagcctaccaaggtagccagtgggcggaccactccagcccctgtcaatcagacagatcgggaaaaggagaaggccaaagccaaggcagtggccttggactcagacaacatctccttgaagagtattggctccccagaaagtactcccaagaaccaagcaagccaccccacagccaccaagctggcagagctgccaccaacccctctcagggccacagcgaagagctttgtcaaaccaccctcactagccaatcttgacaaggtcaactccaacagtctggatctaccatcatccagtgataccacccatgcttcaaaggtcccagatctgcatgctacaagctcagcatctgggggccctctcccttcctgcttcacccccagtccggcacccatcctcaatattaactcagccagcttctcccagggcctggagctaatgagtggtttcagtgtgccaaaagagacccgcatgtaccccaaactctcaggcctgcacaggagcatggagtccctccagatgccaatgagcctccccagtgccttccccagcagtactcccgtccccaccccacctgctccccctgctgctcccacagaagaagagacggaagagctgacttggagtggaagccccagagctgggcaactggacagtaatcagcgggatcggaacactcttcccaagaaagggctcaggtaccagcttcagtcccaggaggagaccaaggagaggcgacattcccataccattggtgggctgcctgaatccgatgaccagtcagagctgccttctccccctgcacttcccatgtctctgagtgcaaagggccaacttaccaacatagtgagtcccactgcggccaccacgccaagaatcacccgctccaacagcatccccacccacgaggcggccttcgagctgtacagcggctcccaaatggggagcaccctgtccctggccgagagacccaagggaatgattcggtcaggatccttccgagaccccacggacgatgttcacggctcagtgctgtccctggcctccagtgcctcctccacctactcctcagctgaggagaggatgcaatctgagcaaatccggaagcttcgtagggaactggaatcatcccaggaaaaagtggccaccttgacgtctcagctttctgccaatgctaatctggtggctgcttttgagcagagcctggtgaatatgacatcccgcctgcgacacctggcagagacggccgaggagaaggacactgagctgctggatttgcgagaaaccatagactttctgaagaaaaagaactctgaggcccaggcagtcattcagggagcccttaatgcctcagaaaccacacccaaagaacttcggatcaagagacaaaactcctcagatagcatctcaagcctcaacagcatcactagccattccagcatcggcagcagcaaggatgctgatgcgaaaaagaagaaaaaaaagagttgggtctatgagcttcgaagttccttcaacaaagcgttcagtataaaaaaggggcccaagtcagcttcctcatactcggatatagaggagattgctacacccgactcttcagccccctcatcccccaaactacagcatggttctacagagactgcttcaccctccatcaagtcctccacctcgtcctccgtgggcactgatgtcaccgagggccctgctcacccagccccccacactaggctgttccatgcaaatgaggaggaggagccagagaagaaggaggtatcggagctgcgctctgagctatgggagaaggaaatgaagcttacagacatccgcttggaggccctcaactctgcccaccaactggatcagcttcgggagaccatgcacaacatgcagttggaggtggacctgctgaaagcagagaatgaccgactgaaggtagccccaggcccctcatcaggctccactccagggcaggtccctggatcatctgcattatcttccccacgccgctccctaggcctggcactcacccattccttcggccccagtcttgcagacacagacctgtcacccatggatggcatcagtacttgtggtccaaaggaggaagtgaccctccgggtggtggtgaggatgcccccgcagcacatcatcaaaggggacttgaagcagcaggaattcttcctgggctgtagcaaggtcagtggaaaagttgactggaagatgctggatgaagctgttttccaagtgttcaaggactatatttctaaaatggacccagcctctaccctgggactaagcactgagtccatccatggctacagcatcagccacgtgaaacgagtgttggatgcagagccccccgagatgcctccttgccgtcgaggtgtcaataacatatcagtctccctcaaaggtctgaaggagaaatgcgtcgacagcctggtgttcgagacgctgatccccaagccgatgatgcagcactacataagcctcctgctgaagcaccggcgcctcgtcctctcgggccccagcggcacgggcaagacctacctgaccaatcgcttggccgagtacctggtggagcgctctggccgtgaggtcacagagggcatcgtcagcaccttcaacatgcaccagcagtcttgcaaggatctgcaactgtatctttccaacctagccaaccagatagaccgggaaacaggaattggggatgtgcccctggtgattctattggatgacctgagtgaagcaggctccatcagtgagttggtcaatggggccctcacctgcaagtatcataaatgtccctatattataggtaccaccaatcagcctgtaaaaatgacacccaaccatggcttgcacttgagcttcaggatgttgaccttctccaacaacgtggagccagccaatggcttcctggttcgttacctgaggaggaagctggtagagtcagacagcgacatcaatgccaacaaggaagagctgcttcgggtgctcgactgggtacccaagctgtggtatcatctccacaccttccttgagaagcacagcacctcagacttcctcatcggcccttgcttctttctgtcgtgtcccattggcattgaggacttccggacctggttcattgacctgtggaacaactctatcattccctatctacaggaaggagccaaggatgggataaaggtccatggacagaaagctgcttgggaggacccagtggaatgggtccgggacacacttccctggccatcagcccaacaagaccaatcaaagctgtaccacctgcccccacccaccgtgggccctcacagcattgcctcacctcccgaggataggacagtcaaagacagcaccccaagttctctggactcagatcctctgatggccatgctgctgaaacttcaagaagctgccaactacattgagtctccagatcgagaaaccatcctggaccccaaccttcaggcaacactttaagggttcggcaatcactgtcacccccggacagcagaacgctggcatcagctatcttagctcctcctctcccctctcctctttcagagcactggctctccagccccaggaggagaacaggagggaggaggagatgaaagaggagggacaggttcttggtgctgtacctttgagaacttcctaggaaggaatggtggggtggcgtttgggaacttgtgccccctaaacacatttactggcctcctctaatgactttggggaaaagatgattctgggtctttcccttgacttcttgtttcaattacaaactcctgggctttctggggaggggttcagaaaacatcaaaacactgcagcagttcctaaatgattctcacaagcaaccctgagagagacagtcttgtgagggagatctgggggaggcaggaagctcctcagattttctcacagacccttcccaattccatcaccactgccaacaactcctcccccagagatctggctggagcccagaaaaagaagcatgtggtttaaaaaatgtttaaatcaatctgtaaaaggtaaaaatgaaaaacaaaaacaagcaaacaaacaaaaaacaatggaaaagatgaagctggagagagaggaaccagttgccaaggtagagagctgcccgctcctgccctctggatgacataggggacatcaacaagacggctgccaacctgagaagtcaccaaaccacaaaaataaccttacagccttcagggaaagactaccagctctgtctttctaccctctaatttaacaatgcataagagtcaataaaccctacttttttatttttggtttttattttgttttcatttttttctcccatttgcctatttatttttttgtttcccttttttttttctttttccgtttttccatttcctcacatgtccacgagatgcttgggttgcttttccaggggctagtttggcttttccaagtgggttttctttggagaatctgatgccatgcaattggcatgacacctgccatgccactatctttggcatccatggggcttatatgagacatgaagcattggctcagaagtagagggagaagaggaacccagttcccttgacttcccttttgagagcacacgttctgctgggtagctcaattgccagcctctgtcatgagaaggtatagccccatcttgatagaagagttactccgagctttatcatggaccagaggaaaaccagaaaactgaaaacattcctctgtcttgtggccagtttggcctttcactgcactattctgatggtgcctgactgaatccaaatatcctagctggctcttactatttttcacaaatgagtattcacatataagagatgaacatccatgtgagatcatcccaatcagaatataagactcaaggagtttgacttggtggccaatacctgccttccaaagagatcctacctttgcagatttgctcctttcccattgccttgaaggtctggcaatccctgttctttcatttgacaagtacttactgagtactcactatatacaaatcattaggttaaaacagacacacacacacacacacacacacacacacacacacacacacacacaagacctgggcccttaagtttacagtccagcaggaaatgttaacctccattcagctacgcccccttgttatctagaccttcgggatcatctaagaaatgtagctgaaacccaaggagccagctagaaagaagcttttgattagatgtacaatacattgggggcagaagatctgggatcaattaagatggagcctgaaggactatggaatcttgcttgtcaggaatgggcaagtctacttcctgccatttctgaaagccccgcgggaccagcttctaggctgagctgcctagtaggctgaagcttcaggactctgcaggtcaaggatatgtgatgagcaccggcctaagtgtttgctcttcagattcctaagtagcacaagactttatcagaatctataggcataccaacctggatcactcttccacccaaccgaggagtagatgcatctgaatcttcatatcggtatattaagtccaaaagatggtccgggctgcccctcacaaaagcttctgcatccacgtggtaagctcccatggatgacagggttctgtatgatggagactattattgctattgctgctaattccatgagctgtgaagatccctaaccaactcagctgtaacatatgcaattctgtggtgggaagaggctgtgtgtccaaggatggtgctgaaatcactgccttaaggtctctgctgtgcagaatgaggaggcccccgagctggctgttctaacttagaaggaagagaagactggatgggcctgcttgggatctaggcctcttctaaaccctatcctaagctccagttccatggcaaggctcagacttttaatgccatcttaatctgatggttgagcgcttcactctattttctggtgctgcccagccagtgccttctgccatggatgttactggctacttgagaaaaaggagaggggagaaccccttctttcattccaactgcctccgaccccaaagggattcttggctctctggtaaccatggataccaccatgaattttatttggatcctcagcaggttgattctggaggcctcatgctatgactttttatttctcttcctgggatccaccaccctctactctcagctgactgctgcatttaggccaggtctccaattgctttcctccagaaagtgtgttcccgtctagtgaggtagtattgaagcctcggctttccctctggagcctgggaccctgtttacagttgcacatctgggcccctcactgtggggattgatcattctcatgaaggaatcacagttatatggcaactgcagaaggctgagcctcctcatggtgctataaccccttgggacactcatccagacttctctgaagcagaaaacctgagctccccactcactgccctagaatttatggcaaggagcaaatctacagcattctctcccacctacgtcctgcttcttggttgagactactgggatccttcagaaaagaaacactgggtcccatagctaaattctcaaccgccaggcaccttcagaagaatccagcctaatactggaatttgtgctattatcttcctctccagccccccaactccatccctcaccacagttgtctaggaaatgacatgaattcaatatctaatgtcaaccaatggggagagccacaactccaggagaggttcctgagctgagtcccttaatttctggatgaagaagaccaacaagttttgtccaatgtatttgtttctcagaccttgcctaggcactaaaaataaaatactaggtcattggaggctaatgtgggacctgatgtctgcgtgtgtgtgtgtgtgtgtgtgtgtgtgtgtctccctctctcacacacacaagagcagtttgctgttgctgtttcctaccttctgaggcttcaaagtattttttaaaatctatgctttgtggcagctctacggtgcttatctctgtctttgtgtcaatccttaagtacccatgtctttttcatgtctaaccattgggaaggtagaggctggcagggaagacaaatctgctacaagtccatgggaagaccctacaatgaaatgttcattggttggtatactgttttagtcttgaattgccaactttccaactgatctatccatattccttaagtactaaagacaaaatagagggcttctttttctctcttaatgtcttgccttctggttttcctggtttgcaagactaagtgtacctaatctcaccatctcttcacttctagctctctgaaacaagggtcacactactcagagggataaccccttacagtggtctgaggagtaactatttcctaaagtattctaaaagagtaggaagagagaaatggtagcctgctgcttctcacagacacctcacatcctcacttgggatggcatccacatagaaaccctgcatttaggtaaaatttgcctgactgaaggggactcagtcctccaaatcaaggtcaagaagatatctgcatgagaccttaagaactctttattgccattatttggagagggcgggggaattgtcctaatcacacatttaacacagggaataagtgctgaagtgacccagatcaccaagcgcagttcctcatcatactttatttttgctttccttattccttggcactgactaagctaaagttaagaagccgacttcataagccaacccctgtgatgggatggaaaaatgggcttttgcagagggtttattaatagagatggatatactactcacaagttctggctcatggctccactgagaaggccatagtaataaaatgatcttatgaacactgttccccaaaggccaaagcctgaagatattgccccttataatccaatcagccttatattttaataagtcctgaatcaacctgactacggatatatggggccaccagggtgcatgggtgcatgtctgctcagcctagccctggaagtgagcactgccggccacagatcctgggaaaggtggtagtaacccagaagatgtagccttgaagggaggatacctatcaaaatgccaaagctgcagggacacgaagacggttgaaaattcaacctgtgtatactagatccttccagtttgatggtttggtcattcttcttcatgattataccatggagaattttctgtgacaagggtggtcatggaagtaagtgagtgatcccctggtttctcattccttaaagcagtggttcgcaaagtatggcacaagaccagcagcatcagcagcctttgggaacttgttagaaacgaaaattctcaatcccatcccagatctgctgaatcagaaactctaatgagaggacccggcaatccacgttttaataagccctcctggtgattctgatgcacactaaattcaactgttttaaagggaaagccctttatagtattggagttcccacactgagaggctttggggcccaaaataagaaggttctaggttgtcattcagactttaacattaatttcaaagtcacctttctcatgcttccttgtgtttctgtttttccatttatgattttaacaaagaaaggtatgtgtgcttttgggtggaagttaggagaatgtttgtgtctttcctagttgaatacaaccttcagagaaaaaccttatgccttggaaattactacctggcacacaaaggggcttcaacaaggaaaagcagttggaggtctcttccagattgctcttctgccgaattatttgtatctattccgagctgattatgtaataggatggaaaaagtaaaaaaaaaaaaaaaaatctaatttgtatttccatgacaacgtgttctcccagcaacatccctctcctttatttgagttataaagggcactgctgggcctgagaaccaggccagaacctccttctgtatggcagctaacagtgtagggctccagtatcccaggaaggccccttatccacactccactcagctcataggagagtcttgcataatgaagacacagacctgggcacttcagtccttgtgctcctcctctcttttccccacagcaggacctggatacagaagtactcagccaaggtgacagaataaaatcctttttttgttgttttctgtttgtttgtttgttttggagaaggagtctcgctttgtcacccaggctggtgtgcagtggcacgatctcggctcactgcaacctccgcctcccaggttcaagcgattctcctgtctcagcctcctgagtagctgggattacagacgtgcgccatcacgcccagctaatttttgtatttttagtagatacggagttttgccttgttggccaggctgtgctggagctcctgacctcaggtgattcacctgccacagcctcccaaagtgctgggattacaggcgtgagccacagcaccctgccaaataagatcctttttaaaaaatatctgaaaaaagcttcatatctttacaaactcataaaatagctgattgggccatggaggagatgaggctgtttagaactggttttgtttcaagtttgtcaattttccctgtatgagaacttgggtaaagcacaaagaaacatacagtgctagtaacaggtctcctgcgccctggaactaagtgtttggaggaaggactaaaccccgggggaggtgagtataaaataattccactaagatcacctcctcagtccccagaaggctgatggtggatcctctggccatctcctgtggggtcttactgctcctctgccatttctctatgcctgaagacacgaagatgatatcaaggcagagctaccatatcgcagccagtctctaggctactgctgtgcagtggctcccactttctaatgcttttttgtttttgctttttctaacaaaacaatcttttttcaaaatgaattccaacccctgctagcttccttccccgcctccatactgttttaggcagcaccgtttatgtgacagagtccgtgtttctcaaatgcatggtgttcctcaggtggagagtgggcagaagtttttgcaacactttttttttaagttattgggtgcaaaatcccaaaccaggatatgtgtatgtctgtgtgtttatgttttttatttgaccctcccctctttcaacctacccccttttatatctaatgtagaaaaagcgaaattgaatctggaaagcaaactgttgtatatagttgcggtaacaatcatgaagagagagccgggctgtcccctcagtaattcattttaaataacaaattatttaaaaataaaattcatgccagagccagctgaagaggccttccttcatcaccactgaggccacccccaatctgggccctctgtccatctggcatgtctcctcccagcaagattcatctgttcaatgccatttgcgtttcaataaagttatctcctgtactgtc

SEQ ID NO: 204467 - DNA, 5633 bp, Artificial Sequence
  derived and/or modified sequence
atgctgggttctagtgtgaaatccgtgcagcccgaggttgaattgagctcagggggaggtgatgagggtgcggacgagcccaggggggcaggacgaaaggctgctgcggcagatggtagggggatgctacctaagagggctaaggcacctgggggagggggaggcatggccaaggcttcggctgcagagctgaaggtgttcaaatcaggctctgtggacagtagggttcccggagggccacccgcttccaacctccgcaaacagaagagtttgacaaatttgagctttctgacagactccgagaagaagctgcagctgtacgagcccgagtggagcgacgacatggccaaggcacctaaagggcttggcaaggtgggctccaaagggagggaagccccactaatgagcaaaacattatctaagagcgagcactccttgttccaggctaagggatctccagctggcggagcaaagaccccccttgcccctctggcccctaatctagggaagcctagccgaattccgcgtggcccatatgccgaagtgaagcccttgtcaaaggcaccagaagctgctgtgagcgaagacggcaaatccgacgatgagctgctgtcctctaaagctaaagcccagaagagctcagggcctgtcccaagcgcaaaagggcaggaagaaagagcatttctcaaagttgaccctgaactcgtggtcaccgtactcggcgacctcgaacagcttctgttttcccaaatgctcgaccctgagagccaacggaaacggaccgtgcagaacgttctagacttgcgccagaacctggaggaaacgatgtccagcctgcgcggatcacaggtcacccactcatccttagaaatgacgtgctacgattcagacgacgctaaccccagatcagtttcgtccctgtccaaccgatcctctcctctctcctggcgctacgggcaaagttcacctagattacaagcaggcgatgcgccttcagtgggaggaagttgccggtccgaggggacccctgcatggtatatgcatggagaaagggcccactactctcacactatgcccatgcggagcccctccaagctttcacatatcagtagactcgagcttgtagagtctttagattcagatgaggtggatctaaaatctggctatatgagcgacagtgacttgatgggcaaaacaatgaccgaggatgacgatattactaccgggtgggacgagtccagctcaatttcctcaggactttcggacgcctctgataatctttcctctgaagagttcaatgctagttccagtctcaactccttgccgtctactccaactgcctcaaggcgaaacagcaccattgtgcttcggacagacagcgagaagaggtctctcgccgagagcggtctttcctggttcagcgagagcgaggagaaggcgccaaaaaaactggagtatgatagcggatcattgaaaatggagccgggaacctccaagtggaggcgcgagcggcctgagtcctgtgacgatagttccaaaggaggcgagctaaagaaaccaataagtctgggccatccagggtcactcaaaaagggtaaaacccctccggtggcagttacttctccaattacccacacagctcagagcgcccttaaagtggccggaaaacctgagggaaaagctactgacaaagggaagctggccgtcaagaacactggactacagaggtcatcgtcagatgcgggtagggacaggctttcagacgcgaaaaaaccaccatccggaatcgcgcgaccttcgaccagcggatcatttggctataaaaaaccaccccctgccactgggaccgccaccgtcatgcagactggtggaagcgccactctcagtaagatccagaaaagcagcggaataccagtgaagcctgtcaatggcaggaagacctcccttgatgtgtctaattctgccgagcccggtttccttgcaccaggggcacggtcgaacattcagtatcggtccttgccacggccagccaaaagctcgtccatgagtgtgacaggcggtagaggtggccctaggcctgtgagtagctcaatagatcccagcctgctctccaccaagcagggcggactgactcccagtcgcctcaaagaaccaaccaaggtggcgtcagggcgaaccacaccagcccctgtaaatcaaaccgacagagagaaagaaaaggcaaaagctaaggccgttgctctggactcagataacatcagcctgaaaagtatcggatcgcccgaatcgacacctaaaaaccaggctagccacccaaccgcgacgaagctggccgagctgcctcccactccactccgcgctaccgccaagagctttgttaagcccccatcactcgctaatctcgataaggtgaattctaactcattggacctcccatcatcctcggacaccacacacgcttcgaaagtccccgaccttcatgcaaccagcagtgcctctggtggtcctctcccatcgtgcttcaccccaagccccgctcctattcttaatataaattcggccagtttctctcaggggcttgagctgatgtcgggattcagtgtcccaaaggagaccagaatgtaccctaagctgagcggtctgcacagaagtatggaatcacttcagatgccgatgtccctgccaagcgcctttccctcatcaacaccagttcccacaccaccagctccgcctgccgctcctactgaggaggaaaccgaagaactgacctggagcgggtctccacgcgcaggtcagttagactccaatcagcgcgaccgtaacactctcccgaagaagggactgaggtaccagttgcagtctcaggaagaaaccaaagaaagacggcactcccatacgattggcggtttaccggagtctgatgaccagagcgagttgcctagccccccagccttaccaatgtctctgtcagctaagggtcagctgactaacatcgtatcccccacagccgctactacccctcgcatcacaaggtctaactccatcccaacccacgaggcagcatttgagttgtactccggatctcagatgggtagtactctgtcactggctgagcgcccaaagggtatgatcaggtctggctcgtttagggaccctacagacgatgttcatgggagcgtgctgagtctggcatctagcgcctcctccacatattcatccgcggaagaacgcatgcagtcagaacagattcgtaaacttcgccgagagctcgagagtagtcaggagaaagtcgcaacactcacttcacaactgtccgccaatgctaacctggtagctgcttttgagcagagccttgtgaacatgacttctcggcttcgccacttggccgaaactgccgaggaaaaagacactgaattgctggacctgcgggaaactatcgactttcttaaaaagaagaatagcgaagctcaggccgtgatccagggggcactaaatgccagtgagaccacacctaaggagttaagaattaaacgccagaactcaagcgactccattagctctcttaacagtatcacaagtcatagcagcattgggtcgtccaaagacgctgacgccaaaaaaaaaaaaaaaaagtcttgggtttacgagctgagaagcagctttaacaaagcattctccatcaagaaaggcccaaaatccgcgtcctcatactcggatatagaggagattgccactcccgattcttcggcacccagttcacccaaactgcagcacggctctaccgaaactgccagcccgtctatcaagtcctcaaccagctcttctgttgggacagacgtcaccgaaggccctgcccaccccgcaccccatacacggctatttcacgcgaacgaagaagaagagcctgaaaaaaaagaagttagcgagctgcggagtgagctgtgggagaaggaaatgaaattgacggatatcagattggaggcactgaatagtgcccatcaactggaccagcttcgggaaaccatgcacaatatgcagctagaggtggatctgctgaaggctgagaacgatcgtctgaaagttgcgccaggacctagtagtggctctacacccggtcaggtgcccggaagctctgcattgtcttcacccagaagatcactgggcttggcattaacccattcttttggaccttcactggctgacacagaccttagtccaatggatggaatctctacatgtgggccaaaagaggaagtcacgctgagggtggtcgtgcgaatgcctcctcagcacattatcaaaggcgacctgaagcagcaggaattctttctggggtgttctaaggtttctgggaaagtcgactggaaaatgcttgacgaagctgtgttccaggtcttcaaagactacatatctaaaatggacccagccagcacattgggtctgtccacggagagtattcatggatactctatctctcacgtcaagcgcgtccttgatgctgaaccgcctgaaatgcccccatgtaggaggggagtcaataacatctcagtgagccttaaggggttgaaggaaaagtgtgtggattccttggtgtttgagacattaattcctaaacctatgatgcagcactatatctcactgctccttaagcacaggaggctcgtgttgtcaggtccatctgggacaggaaagacatatcttactaaccggctagctgagtatctggtcgaacggtcaggaagagaggtgaccgagggtattgtgagtaccttcaatatgcaccaacaaagttgtaaggacttacagctgtacttgagtaatctggccaaccagattgacagggagactgggataggggatgtcccactggtgattcttctggacgatctgtcagaagccggtagcattagcgagctggtgaacggggcattgacgtgcaaataccacaaatgcccttacattataggtacaacgaatcagcctgtgaaaatgacacctaaccatggcctgcacttgtcattcagaatgcttacctttagcaacaacgttgagccagcaaatggattcctggtaagatacctgcgaaggaagcttgtggaatctgatagcgatattaacgccaataaggaggaacttctgcgggtgctggactgggttccaaagctatggtatcatttgcacaccttcctcgaaaaacactcaacttcggactttctgattggaccatgtttctttctgagttgtccaattggaattgaagacttcaggacctggtttattgacttgtggaacaactcaataattccctacttgcaggaaggcgctaaggacggcatcaaagtgcatggtcagaaagccgcttgggaggatccagttgagtgggtccgggacactttgccttggcccagcgcacagcaggaccagtccaaactgtatcatttacccccacctactgtcggtcctcactctatcgccagcccgccagaggaccgcacagtgaaggacagcaccccctcctctctggatagtgatccattaatggccatgttgttgaaattacaagaagccgcaaattatatcgagagcccagatcgtgagactattctcgacccaaaccttcaggccaccctata

SEQ ID NO: 204468 - DNA, 5634 bp, Artificial Sequence
  derived and/or modified sequence
atgctgggcagcagcgtgaagagcgtgcagcccgaggtggagctgagcagcggcggcggcgacgagggcgccgacgagcccagaggcgccggcagaaaggccgccgccgccgacggcagaggcatgctgcccaagagagccaaggcccccggcggcggcggcggcatggccaaggccagcgccgccgagctgaaggtgttcaagagcggcagcgtggacagcagagtgcccggcggcccccccgccagcaacctgagaaagcagaagagcctgaccaacctgagcttcctgaccgacagcgagaagaagctgcagctgtacgagcccgagtggagcgacgacatggccaaggcccccaagggcctgggcaaggtgggcagcaagggcagagaggcccccctgatgagcaagaccctgagcaagagcgagcacagcctgttccaggccaagggcagccccgccggcggcgccaagacccccctggcccccctggcccccaacctgggcaagcccagcagaatccccagaggcccctacgccgaggtgaagcccctgagcaaggcccccgaggccgccgtgagcgaggacggcaagagcgacgacgagctgctgagcagcaaggccaaggcccagaagagcagcggccccgtgcccagcgccaagggccaggaggagagagccttcctgaaggtggaccccgagctggtggtgaccgtgctgggcgacctggagcagctgctgttcagccagatgctggaccccgagagccagagaaagagaaccgtgcagaacgtgctggacctgagacagaacctggaggagaccatgagcagcctgagaggcagccaggtgacccacagcagcctggagatgacctgctacgacagcgacgacgccaaccccagaagcgtgagcagcctgagcaacagaagcagccccctgagctggagatacggccagagcagccccagactgcaggccggcgacgcccccagcgtgggcggcagctgcagaagcgagggcacccccgcctggtacatgcacggcgagagagcccactacagccacaccatgcccatgagaagccccagcaagctgagccacatcagcagactggagctggtggagagcctggacagcgacgaggtggacctgaagagcggctacatgagcgacagcgacctgatgggcaagaccatgaccgaggacgacgacatcaccaccggctgggacgagagcagcagcatcagcagcggcctgagcgacgccagcgacaacctgagcagcgaggagttcaacgccagcagcagcctgaacagcctgcccagcacccccaccgccagcagaagaaacagcaccatcgtgctgagaaccgacagcgagaagagaagcctggccgagagcggcctgagctggttcagcgagagcgaggagaaggcccccaagaagctggagtacgacagcggcagcctgaagatggagcccggcaccagcaagtggagaagagagagacccgagagctgcgacgacagcagcaagggcggcgagctgaagaagcccatcagcctgggccaccccggcagcctgaagaagggcaagaccccccccgtggccgtgaccagccccatcacccacaccgcccagagcgccctgaaggtggccggcaagcccgagggcaaggccaccgacaagggcaagctggccgtgaagaacaccggcctgcagagaagcagcagcgacgccggcagagacagactgagcgacgccaagaagccccccagcggcatcgccagacccagcaccagcggcagcttcggctacaagaagcccccccccgccaccggcaccgccaccgtgatgcagaccggcggcagcgccaccctgagcaagatccagaagagcagcggcatccccgtgaagcccgtgaacggcagaaagaccagcctggacgtgagcaacagcgccgagcccggcttcctggcccccggcgccagaagcaacatccagtacagaagcctgcccagacccgccaagagcagcagcatgagcgtgaccggcggcagaggcggccccagacccgtgagcagcagcatcgaccccagcctgctgagcaccaagcagggcggcctgacccccagcagactgaaggagcccaccaaggtggccagcggcagaaccacccccgcccccgtgaaccagaccgacagagagaaggagaaggccaaggccaaggccgtggccctggacagcgacaacatcagcctgaagagcatcggcagccccgagagcacccccaagaaccaggccagccaccccaccgccaccaagctggccgagctgccccccacccccctgagagccaccgccaagagcttcgtgaagccccccagcctggccaacctggacaaggtgaacagcaacagcctggacctgcccagcagcagcgacaccacccacgccagcaaggtgcccgacctgcacgccaccagcagcgccagcggcggccccctgcccagctgcttcacccccagccccgcccccatcctgaacatcaacagcgccagcttcagccagggcctggagctgatgagcggcttcagcgtgcccaaggagaccagaatgtaccccaagctgagcggcctgcacagaagcatggagagcctgcagatgcccatgagcctgcccagcgccttccccagcagcacccccgtgcccaccccccccgccccccccgccgcccccaccgaggaggagaccgaggagctgacctggagcggcagccccagagccggccagctggacagcaaccagagagacagaaacaccctgcccaagaagggcctgagataccagctgcagagccaggaggagaccaaggagagaagacacagccacaccatcggcggcctgcccgagagcgacgaccagagcgagctgcccagcccccccgccctgcccatgagcctgagcgccaagggccagctgaccaacatcgtgagccccaccgccgccaccacccccagaatcaccagaagcaacagcatccccacccacgaggccgccttcgagctgtacagcggcagccagatgggcagcaccctgagcctggccgagagacccaagggcatgatcagaagcggcagcttcagagaccccaccgacgacgtgcacggcagcgtgctgagcctggccagcagcgccagcagcacctacagcagcgccgaggagagaatgcagagcgagcagatcagaaagctgagaagagagctggagagcagccaggagaaggtggccaccctgaccagccagctgagcgccaacgccaacctggtggccgccttcgagcagagcctggtgaacatgaccagcagactgagacacctggccgagaccgccgaggagaaggacaccgagctgctggacctgagagagaccatcgacttcctgaagaagaagaacagcgaggcccaggccgtgatccagggcgccctgaacgccagcgagaccacccccaaggagctgagaatcaagagacagaacagcagcgacagcatcagcagcctgaacagcatcaccagccacagcagcatcggcagcagcaaggacgccgacgccaagaagaagaagaagaagagctgggtgtacgagctgagaagcagcttcaacaaggccttcagcatcaagaagggccccaagagcgccagcagctacagcgacatcgaggagatcgccacccccgacagcagcgcccccagcagccccaagctgcagcacggcagcaccgagaccgccagccccagcatcaagagcagcaccagcagcagcgtgggcaccgacgtgaccgagggccccgcccaccccgccccccacaccagactgttccacgccaacgaggaggaggagcccgagaagaaggaggtgagcgagctgagaagcgagctgtgggagaaggagatgaagctgaccgacatcagactggaggccctgaacagcgcccaccagctggaccagctgagagagaccatgcacaacatgcagctggaggtggacctgctgaaggccgagaacgacagactgaaggtggcccccggccccagcagcggcagcacccccggccaggtgcccggcagcagcgccctgagcagccccagaagaagcctgggcctggccctgacccacagcttcggccccagcctggccgacaccgacctgagccccatggacggcatcagcacctgcggccccaaggaggaggtgaccctgagagtggtggtgagaatgcccccccagcacatcatcaagggcgacctgaagcagcaggagttcttcctgggctgcagcaaggtgagcggcaaggtggactggaagatgctggacgaggccgtgttccaggtgttcaaggactacatcagcaagatggaccccgccagcaccctgggcctgagcaccgagagcatccacggctacagcatcagccacgtgaagagagtgctggacgccgagccccccgagatgcccccctgcagaagaggcgtgaacaacatcagcgtgagcctgaagggcctgaaggagaagtgcgtggacagcctggtgttcgagaccctgatccccaagcccatgatgcagcactacatcagcctgctgctgaagcacagaagactggtgctgagcggccccagcggcaccggcaagacctacctgaccaacagactggccgagtacctggtggagagaagcggcagagaggtgaccgagggcatcgtgagcaccttcaacatgcaccagcagagctgcaaggacctgcagctgtacctgagcaacctggccaaccagatcgacagagagaccggcatcggcgacgtgcccctggtgatcctgctggacgacctgagcgaggccggcagcatcagcgagctggtgaacggcgccctgacctgcaagtaccacaagtgcccctacatcatcggcaccaccaaccagcccgtgaagatgacccccaaccacggcctgcacctgagcttcagaatgctgaccttcagcaacaacgtggagcccgccaacggcttcctggtgagatacctgagaagaaagctggtggagagcgacagcgacatcaacgccaacaaggaggagctgctgagagtgctggactgggtgcccaagctgtggtaccacctgcacaccttcctggagaagcacagcaccagcgacttcctgatcggcccctgcttcttcctgagctgccccatcggcatcgaggacttcagaacctggttcatcgacctgtggaacaacagcatcatcccctacctgcaggagggcgccaaggacggcatcaaggtgcacggccagaaggccgcctgggaggaccccgtggagtgggtgagagacaccctgccctggcccagcgcccagcaggaccagagcaagctgtaccacctgcccccccccaccgtgggcccccacagcatcgccagcccccccgaggacagaaccgtgaaggacagcacccccagcagcctggacagcgaccccctgatggccatgctgctgaagctgcaggaggccgccaactacatcgagagccccgacagagagaccatcctggaccccaacctgcaggccaccctgtag

SEQ ID NO: 204469 - protein, 418 aa, Artificial Sequence
  derived and/or modified sequence
MAGSLPPCVVDCGTGYTKLGYAGNTEPQFIIPSCIAIRESAKVVDQAQRRVLRGVDDLDFFIGDEAIDKPTYATKWPIRHGIIEDWDLMERFMEQVVFKYLRAEPEDHYFLMTEPPLNTPENREYLAEIMFESFNVPGLYIAVQAVLALAASWTSRQVGERTLTGIVIDSGDGVTHVIPVAEGYVIGSCIKHIPIAGRDITYFIQQLLREREVGIPPEQSLETAKAIKEKYCYICPDIVKEFAKYDVDPRKWIKQYTGINAINQKKFVIDVGYERFLGPEIFFHPEFANPDFMESISDVVDEVIQNCPIDVRRPLYKNVVLSGGSTMFRDFGRRLQRDLKRVVDARLRLSEELSGGRIKPKPVEVQVVTHHMQRYAVWFGGSMLASTPEFFQVCHTKKDYEEYGPSICRHNPVFGVMS

SEQ ID NO: 204470 - protein, 330 aa, Artificial Sequence
  derived and/or modified sequence
MERFMEQVVFKYLRAEPEDHYFLMTEPPLNTPENREYLAEIMFESFNVPGLYIAVQAVLALAASWTSRQVGERTLTGIVIDSGDGVTHVIPVAEGYVIGSCIKHIPIAGRDITYFIQQLLREREVGIPPEQSLETAKAIKEKYCYICPDIVKEFAKYDVDPRKWIKQYTGINAINQKKFVIDVGYERFLGPEIFFHPEFANPDFMESISDVVDEVIQNCPIDVRRPLYKNVVLSGGSTMFRDFGRRLQRDLKRVVDARLRLSEELSGGRIKPKPVEVQVVTHHMQRYAVWFGGSMLASTPEFFQVCHTKKDYEEYGPSICRHNPVFGVMS

SEQ ID NO: 204471 - DNA, 993 bp, Artificial Sequence
  derived and/or modified sequence
atggagagattcatggagcaggtggtgttcaagtacctgagagccgagcccgaggaccactacttcctgatgaccgagccccccctgaacacccccgagaacagagagtacctggccgagatcatgttcgagagcttcaacgtgcccggcctgtacatcgccgtgcaggccgtgctggccctggccgccagctggaccagcagacaggtgggcgagagaaccctgaccggcatcgtgatcgacagcggcgacggcgtgacccacgtgatccccgtggccgagggctacgtgatcggcagctgcatcaagcacatccccatcgccggcagagacatcacctacttcatccagcagctgctgagagagagagaggtgggcatcccccccgagcagagcctggagaccgccaaggccatcaaggagaagtactgctacatctgccccgacatcgtgaaggagttcgccaagtacgacgtggaccccagaaagtggatcaagcagtacaccggcatcaacgccatcaaccagaagaagttcgtgatcgacgtgggctacgagagattcctgggccccgagatcttcttccaccccgagttcgccaaccccgacttcatggagagcatcagcgacgtggtggacgaggtgatccagaactgccccatcgacgtgagaagacccctgtacaagaacgtggtgctgagcggcggcagcaccatgttcagagacttcggcagaagactgcagagagacctgaagagagtggtggacgccagactgagactgagcgaggagctgagcggcggcagaatcaagcccaagcccgtggaggtgcaggtggtgacccaccacatgcagagatacgccgtgtggttcggcggcagcatgctggccagcacccccgagttcttccaggtgtgccacaccaagaaggactacgaggagtacggccccagcatctgcagacacaaccccgtgttcggcgtgatgagctag

SEQ ID NO: 204472 - DNA, 1257 bp, Artificial Sequence
  derived and/or modified sequence
atggctgggtccttacctccctgcgtcgtggactgcggcactggatacacaaaactcggctatgctggtaatacagagccgcaattcatcatcccctcctgtatcgctattcgggagagcgctaaggtggtagaccaggctcagcgccgggtgctacgcggtgtggacgacctcgacttttttataggggatgaggccatagacaagcctacttacgccaccaaatggccaattcgtcacggtatcatcgaagattgggatctcatggagaggtttatggagcaggtggttttcaaatacctaagggctgaaccagaggaccactatttccttatgacggaaccgccgctcaacactcctgaaaaccgcgaatacctagccgaaatcatgtttgagtccttcaatgtaccaggcctatatatagcagttcaggccgtgctcgctctggccgcctcgtggactagccggcaggtgggggaacgaaccctcacaggcatcgtcatcgattccggtgatggcgttacacatgtcattcctgtggccgaaggttacgtcattggctcttgcatcaaacacatcccgatcgccggcagagacataacgtacttcatacagcagctgctgagagaaagagaagtaggcatccctcccgaacaatctctggaaactgccaaagccatcaaggagaaatactgctacatctgccctgacatcgtgaaggagttcgctaagtacgatgtggatcctcgtaagtggataaagcagtacaccggcatcaatgccataaatcagaagaaatttgtgatcgatgttggctatgagaggttcctcgggccagagatcttcttccaccctgaatttgcaaatcctgactttatggaatctattagtgatgtagttgatgaggtgatccaaaattgtcccatagacgtccgtaggcctttatacaagaatgtcgtcctctcaggaggctccaccatgtttagggactttggaagacgacttcagagggatttgaagagagtggtggacgctcgcctaagactgtccgaagaactttcgggaggacggattaaacctaaacctgtcgaagtgcaagttgtgacccatcacatgcagagatacgcggtgtggtttggagggtctatgttggcctcaactccagaattttttcaggtctgccacaccaagaaggattacgaagagtatggaccctctatctgtagacataatcccgtgttcggcgtgatgagctag

SEQ ID NO: 204473 - DNA, 993 bp, Artificial Sequence
  derived and/or modified sequence
atggagcgttttatggaacaagtcgtttttaagtatttaagggcagaaccggaagaccattatttcttgatgaccgagcccccacttaacactccagagaacagggagtatctggctgaaatcatgttcgagtcctttaacgtgcccggactgtacattgctgtccaggctgtcctggccctggctgctagctggacctctaggcaggtgggtgaacgcacactcaccggtatcgttatcgattcaggcgatggcgtcacgcacgtcatccccgtggcggagggctacgtgatagggtcatgcattaaacatatacccattgccggtagggatatcacatatttcatccagcaactgctgcgcgagagagaagtcggtatcccccccgaacagtccctggagactgctaaggcaattaaggagaaatactgctatatatgccccgacatcgtgaaagagttcgccaagtacgacgtagatccccgtaagtggataaagcagtacacaggaataaatgctattaaccagaaaaagtttgtcattgacgttggttatgagaggtttcttggtcctgagatttttttccaccctgaatttgccaatcccgattttatggagtctatctccgacgttgtggacgaagtgattcaaaactgcccaattgatgtgcgtagaccactctacaagaatgtggtgctgtcgggtggcagcaccatgttccgggatttcggcaggagactgcagagagaccttaagagagtggtcgacgcccgcctacgcctgtctgaggagctttcagggggcaggattaaacccaagccagtggaagtacaggtcgtcacacatcacatgcaaaggtatgcagtctggtttggagggagcatgctggcatccacaccggaattctttcaggtgtgccacactaaaaaagattatgaagaatacggccccagcatatgcaggcataatccggtgttcggagttatgtcctag

SEQ ID NO: 204474 - DNA, 993 bp, Artificial Sequence
  derived and/or modified sequence
atggaacggttcatggaacaggtggtgtttaaatacttacgcgcagagcccgaagaccactattttctgatgactgaaccccctcttaacacacctgagaatagagagtatctggctgagataatgttcgagagcttcaatgtgcccgggctgtacatagccgtccaggctgtcctcgctttggctgcatcatggacatccagacaagtgggggagcggacactcacaggaatcgtgatcgattctggtgacggcgtgacacacgtgattcccgtggccgagggctatgtgataggctcttgcatcaagcacatacccatcgctgggcgggacataacttacttcattcagcagctgctgcgggagagagaggtcggaatcccacccgaacaatctcttgaaactgcgaaggctatcaaggagaagtactgttatatttgtcccgacatcgtgaaagagtttgctaagtacgacgtggaccctcgcaaatggattaaacagtacaccggtatcaacgctataaatcagaaaaaatttgtgattgacgtggggtacgagagattcctcggcccagaaattttctttcatccagagttcgcaaatccagacttcatggaatccatttccgacgtggtcgatgaggttatccagaactgtcctatcgacgtgcgtagacccctttacaagaacgtggttctcagtggcggcagtaccatgttccgtgactttgggcgccgacttcaaagggacctgaagagagtggtggatgccaggctccgcctgtctgaagaactcagcggcggccggatcaagccaaagccagtggaagtacaggtagtgactcatcacatgcagaggtacgccgtttggttcggcgggtcaatgttggcatccactcctgagttctttcaagtgtgtcacacaaagaaagactatgaggaatatggtccctcaatatgtagacataaccctgtttttggcgttatgtcatag

SEQ ID NO: 204475 - DNA, 1257 bp, Artificial Sequence
  derived and/or modified sequence
atggccggcagcctgcccccctgtgtggtggactgtggcaccggctacaccaagctgggctacgccggcaacacagagccccagttcatcatccccagctgcatcgccatccgggagagcgccaaggtggtggaccaggcccagaggagagtgctgcggggcgtggatgacctggacttcttcatcggagatgaggccatcgacaagcccacctacgccaccaagtggcccatccgccacggcatcatcgaggactgggacctgatggagcgcttcatggagcaggtggtgttcaagtacctgcgggcagagcctgaggaccactacttcctgatgacagagccccccctgaacaccccagaaaatcgggagtacctggccgagatcatgtttgagagcttcaacgtgcccggcctgtacatcgctgtgcaggccgtgctggccctggccgcctcctggaccagccggcaggtgggggagaggaccctgaccggcatcgtcatcgacagcggagatggagtgacccacgtgattcctgtggccgagggctacgtgattggcagctgcatcaagcacatccccatcgccggccgggacatcacctacttcatccagcagctgctgcgggagcgggaggtgggcatccccccagagcagagcctggagacagccaaggccatcaaggagaagtactgctacatctgcccagacatcgtgaaggagtttgccaagtatgatgtggaccccaggaagtggatcaagcagtacacaggcatcaatgccatcaaccagaagaagtttgtgattgatgtgggctatgagcgcttcctgggccctgagatcttcttccaccctgagtttgccaacccagacttcatggagagcatcagtgatgtggtggatgaagtcatccagaactgccccattgatgtgcggcggcccctgtacaagaatgtggtgctgagcggcggcagcaccatgttccgggactttggaagaaggctgcagagggacctgaagagggtggtggatgcccggctgcggctgtctgaggagctgagcggcggccgcatcaagcccaagcctgtggaggtgcaggtggtgacccaccacatgcagagatatgctgtgtggtttggaggctccatgctggccagcaccccagagttcttccaggtgtgccacaccaagaaggactatgaggagtatggccccagcatctgccgccacaaccctgtgtttggagtgatgtcctag

SEQ ID NO: 204476 - DNA, 993 bp, Artificial Sequence
  derived and/or modified sequence
atggagcgcttcatggagcaggtggtgttcaagtacctgcgggcagagcctgaggaccactacttcctgatgacagagccccccctgaacaccccagaaaatcgggagtacctggccgagatcatgtttgagagcttcaacgtgcccggcctgtacatcgctgtgcaggccgtgctggccctggccgcctcctggaccagccggcaggtgggggagaggaccctgaccggcatcgtcatcgacagcggagatggagtgacccacgtgattcctgtggccgagggctacgtgattggcagctgcatcaagcacatccccatcgccggccgggacatcacctacttcatccagcagctgctgcgggagcgggaggtgggcatccccccagagcagagcctggagacagccaaggccatcaaggagaagtactgctacatctgcccagacatcgtgaaggagtttgccaagtatgatgtggaccccaggaagtggatcaagcagtacacaggcatcaatgccatcaaccagaagaagtttgtgattgatgtgggctatgagcgcttcctgggccctgagatcttcttccaccctgagtttgccaacccagacttcatggagagcatcagtgatgtggtggatgaagtcatccagaactgccccattgatgtgcggcggcccctgtacaagaatgtggtgctgagcggcggcagcaccatgttccgggactttggaagaaggctgcagagggacctgaagagggtggtggatgcccggctgcggctgtctgaggagctgagcggcggccgcatcaagcccaagcctgtggaggtgcaggtggtgacccaccacatgcagagatatgctgtgtggtttggaggctccatgctggccagcaccccagagttcttccaggtgtgccacaccaagaaggactatgaggagtatggccccagcatctgccgccacaaccctgtgtttggagtgatgtcctag

SEQ ID NO: 204477 - DNA, 1257 bp, Artificial Sequence
  derived and/or modified sequence
atggccggcagcctgcccccctgcgtggtggactgcggcaccggctacacaaaactgggatacgccggaaacactgagcctcaattcattattcccagctgtatagccatcagggaaagcgcaaaagtggtcgatcaggcgcaacgtagggtgctgcgtggagttgatgatctcgattttttcattggcgacgaagccattgacaagccaacctacgctacgaaatggccaattcggcacggtattatcgaagactgggatctgatggaaagattcatggagcaagtagttttcaagtatctgagggccgagccagaagaccactactttctgatgactgagcctccattgaataccccagagaatcgcgagtatttagctgagattatgttcgaatccttcaacgtgcctggcttatatattgccgtccaggccgtgctcgccctcgcagcttcgtggaccagccgccaagtcggagaacgtactttgaccggaatcgtcatcgactctggggacggagtgacacacgtgataccagtggctgaggggtatgtaattggatcctgtatcaagcatattccaatcgctggtagagatattacatatttcattcaacagctgttacgggaaagagaggtgggcattccccccgaacagtctctggaaaccgcgaaagccatcaaggagaagtattgttatatttgtcccgacattgtcaaagagtttgctaagtatgatgtagatccccggaaatggatcaaacagtacaccggcataaatgcaattaaccagaagaagttcgttatagacgtcggatacgagcgtttcctaggccccgaaatctttttccaccctgaattcgctaatccagattttatggaatcaatcagcgacgtcgtcgacgaggtaattcaaaattgtccaattgatgtgcgccgccctctgtataagaatgtggtgttgtccggcggctccaccatgttcagggattttggccgcaggctgcagagggacctgaagcgtgtcgtcgatgcccggctcagactgtccgaggaactttccggaggccgcataaaaccaaagccggtcgaggtgcaagtggtaacacatcatatgcagcggtacgccgtctggtttggaggaagcatgctggcgagcactcccgagttcttccaggtgtgtcacaccaagaaggactatgaggagtacgggccctcaatctgccgacacaacccagtgttcggagtgatgagctag

SEQ ID NO: 204478 - DNA, 1692 bp, Artificial Sequence
  derived and/or modified sequence
gggagacgctgcgcgcggggctagcgggcggcggagcggacggcgacggggcgctctcgggctgccggcggggccgagcgccgcgcgtcccgagcatggcaggctccctgcctccctgcgtggtggactgtggcaccgggtattgccatcagagagtcagcaaaggtagttgaccaagctcaaaggagagtgttgaggggagttgatgaccttgactttttcataggagatgaagccatcgataaacctacatatgctacaaagtggccgatacgacatggaatcattgaagactgggatcttatggaaaggttcatggagcaagtggtttttaaatatcttcgagctgaacctgaggaccattattttttaatgacagaacctccactcaatacaccagaaaacagagagtatcttgcagaaattatgtttgaatcatttaacgtaccaggactctacattgcagttcaggcagtgctggccttggcggcatcttggacatctcgacaagtgggtgaacgtacgttaacggggatagtcattgacagcggagatggagtcacccatgttatcccagtggcagaaggttatgtaattggaagctgcatcaaacacatcccgattgcaggtagagatattacgtatttcattcaacagctgctaagggagagggaggtgggaatccctcctgagcagtcactggagaccgcaaaagccattaaggagaaatactgttacatttgccccgatatagtcaaggaatttgccaagtatgatgtggatccccggaagtggatcaaacagtacacgggtatcaatgcgatcaaccagaagaagtttgttatagacgttggttacgaaagattcctgggacctgaaatattctttcacccggagtttgccaacccagactttatggagtccatctcagatgttgttgatgaagtaatacagaactgccccatcgatgtgcggcgcccgctgtataagaatgtcgtactctcaggaggctccaccatgttcagggatttcggacgccgactgcagagggatttgaagagagtggtggatgctaggctgaggctcagcgaggagctcagcggcgggaggatcaagccgaagcctgtggaggtccaggtggtcacgcatcacatgcagcgctacgccgtgtggttcggaggctccatgctggcctcgactcccgagttctttcaggtctgccacaccaagaaggactatgaagagtacgggcccagcatctgccgccacaaccccgtctttggagtcatgtcctagtgtctgcctgaacgcgtcgttcgatggtgtcacgttggggaacaagtgtccttcagaacccagagaaggccgccgttctgtaaatagcgacgtcggtgttgctgcccagcagcgtgcttgcattgccggtgcatgaggcgcggcgcgggcccttcagtaaaagccatttatccgtgtgccgaccgctgtctgccagcctcctccttctcccgccctcctcaccctcgctctccctcctcctcctcctccgagctgctagctgacaaatacaattctgaaggaatccaaatgtgactttgaaaattgttagagaaaacaacattagaaaatggcgcaaaatcgttaggtcccaggagagaatgtgggggcgcaaacccttttcctcccagcctattt

SEQ ID NO: 204479 - DNA, 993 bp, Artificial Sequence
  derived and/or modified sequence
atggagcggttcatggagcaggtggtgttcaagtacctgcgggccgaaccagaagatcactatttcctgatgacagagcctcctctcaatactcccgagaatagggaatacctggcagaaataatgttcgaaagcttcaatgttcccggcctctacatagctgtgcaagcagtgctcgctcttgctgccagttggaccagtcgacaggtgggcgagcgtaccctgacgggtattgttattgacagcggggacggagttacacacgtgataccagtcgctgaggggtatgtaatcgggtcatgtatcaaacatatcccaattgccggccgcgacatcacctactttattcagcaactcttacgtgagcgcgaggttggtatcccgccggagcagtctctcgagactgccaaggcgattaaggagaaatactgttacatctgtccggacatcgtcaaggaatttgccaagtatgatgtcgatccgcggaagtggattaagcagtacacaggcattaacgcgatcaatcagaaaaaattcgttattgacgtgggttacgaacgctttctgggccccgagatttttttccaccctgagtttgctaacccagattttatggagtccatcagcgatgtcgtggatgaggtgatccaaaactgccctatagatgtccgcagacccctctacaaaaacgtggttctgagtgggggcagcaccatgtttagagattttggacgcaggctgcagagagacctgaaacgggttgttgacgcgcgtctccgactgtcagaagagttaagtggcggccgcatcaaaccaaaaccagtggaggttcaagtggttacccaccacatgcaacggtacgccgtgtggtttggagggtctatgctagccagtacacctgagttcttccaggtgtgccacaccaagaaagactatgaggaatatggacctagtatctgccggcacaatccagtgtttggcgtaatgagctag

SEQ ID NO: 204480 - DNA, 993 bp, Artificial Sequence
  derived and/or modified sequence
atggagcggttcatggagcaggtggtgttcaagtacctgcgggccgaacctgaggaccactacttcttgatgacagagcctccccttaatacaccagagaatagggaatacctggcagaaatcatgtttgagtctttcaacgtgcctggtctctacattgccgtccaggctgtgttagctttggccgcaagctggacatcccgccaggtcggcgagcgaacgctgaccggaatcgttattgatagcggcgacggagtgacgcacgtgattcccgtggctgaaggctacgtcatcggctcttgcataaagcacatccccatagctggacgggacattacttattttattcagcagcttttgagagaacgcgaggtagggataccaccggagcagtctctggagaccgcaaaggccatcaaggagaagtattgttacatctgccccgacatagttaaggaattcgccaaatatgatgtcgacccacggaaatggatcaagcagtacaccggaattaacgccatcaatcagaagaaatttgtgatagacgtggggtacgagcggttcctggggccggagatcttctttcatccagagtttgccaaccctgacttcatggaatcaatttccgatgttgttgatgaggtaattcagaattgtcccattgacgtaagacgacccttgtacaaaaacgtagtactctccggggggtccactatgttcagggatttcggaaggagactgcagcgagaccttaagcgcgtggtggatgccagattaaggctcagcgaggaattatcaggcggccgaataaagcccaagcctgtcgaagtccaagtggtcacccaccacatgcagaggtacgcggtgtggtttgggggttctatgctggccagcacaccggaatttttccaggtgtgccacactaaaaaggattatgaggagtacgggcctagtatttgtagacacaaccctgtgtttggggtcatgagttag

SEQ ID NO: 204481 - DNA, 1257 bp, Artificial Sequence
  derived and/or modified sequence
atggccggtagcctgcctccctgcgtggtggactgcggcactggttatacgaaactgggatacgcaggaaacacagaaccccagtttatcattccctcttgtatcgccattagagagtccgcgaaggttgtggatcaggcgcagcggagggtgttgcgcggtgtggatgatttagattttttcataggagatgaagctattgacaagcccacatacgcaaccaaatggccgattcggcacgggataatcgaggactgggacttgatggaacgattcatggaacaagtggtgttcaaatatttgcgcgcagagccagaggaccactactttctgatgacggaaccccctctgaatactccagaaaacagagaatacctggcagaaataatgtttgagtctttcaatgtgcctggcctttacatagccgtgcaagccgtcctcgccttggcggcttcttggaccagccgacaagttggcgaacggacactcacaggaatcgtgatcgactccggtgatggagttacccacgtgatccctgtggctgaaggttacgtaattggttcttgtatcaaacacattcctattgctggcagagacatcacttactttatccagcaactcctcagagagagggaagtggggatacctcctgaacagtcactggaaaccgccaaagcaatcaaggagaagtactgctacatctgtccagacatcgttaaagagtttgcaaaatatgacgtcgatccgcgtaagtggattaagcaatacactggaatcaacgcaataaaccaaaaaaagttcgtgatagatgtagggtatgagcgatttctcgggcctgagattttcttccatcctgagttcgcgaaccccgactttatggaaagcatttccgatgtagtggatgaggtgattcagaactgccctattgacgtgagacgcccactctacaagaacgtagtgctcagtggcggatccactatgttcagggacttcggtcggagactgcagcgcgatctcaaacgtgtggtggacgccagactgcgcttaagcgaggagctcagcggtggacgaataaagccaaagccagtagaagtgcaggttgttacccaccacatgcagagatatgctgtctggttcgggggttccatgttagcctccacacctgaattcttccaagtgtgccataccaaaaaggactacgaggaatatggacccagcatctgccggcacaaccccgtgttcggtgttatgtcatag

SEQ ID NO: 204482 - DNA, 993 bp, Artificial Sequence
  derived and/or modified sequence
atggagcgctttatggagcaggtcgtgtttaaatacctgagagccgagccggaggaccactactttctaatgacagagccccctttgaacactcccgaaaaccgcgagtacctggcagaaataatgttcgagtcatttaatgtcccaggtctctacatcgcagtccaggccgtcctcgcactggctgccagctggacctctagacaagtcggagagcgcaccttgacagggattgtgatagactctggggacggagtcacccacgtcatcccggtagccgagggatacgtgataggttcttgtatcaagcatatacctatcgctggccgtgacatcacgtacttcattcagcagctattgagggagcgcgaggtcggaataccccctgaacagtccttggaaactgcaaaagcaataaaggagaagtactgctacatttgtccagatatagtgaaggagtttgctaagtatgacgtcgacccgaggaaatggattaaacagtacaccggcatcaacgccatcaaccaaaagaagttcgtaatcgacgtaggttacgagcggtttctgggacccgagattttctttcaccccgaattcgctaatcccgatttcatggagtcaattagcgacgtggtcgatgaagtgatacagaattgtcccattgatgttaggcgccctttgtacaagaatgtggtgctgtcaggcggttcaaccatgttccgcgattttggccgtcgcctccagcgtgatctgaagagagtcgtggatgcgaggctgcgtctgtcggaggagttgtctgggggacgcattaagcctaaaccagtggaggtgcaagtggttacccatcacatgcaacgttacgccgtctggtttggagggagtatgctggcctccaccccggaattctttcaggtctgtcacacaaaaaaggattacgaagaatatggcccatctatttgtcgacacaatccagtattcggcgtgatgagctag

SEQ ID NO: 204483 - DNA, 993 bp, Artificial Sequence
  derived and/or modified sequence
atggaacgcttcatggagcaggtcgtgttcaagtacctcagggctgagcccgaggatcactactttctgatgacagagccacccctaaacacccccgaaaacagagagtatctggcggagataatgtttgaatctttcaacgtgccgggactatatattgcggttcaggccgttctggccctcgctgccagttggactagtagacaggttggagaacgcacattgaccggtattgtaatcgattctggtgatggagtgacccacgttatccctgtagcagagggttacgtgattggctcatgtattaagcatatccccatcgcgggtagggatattacctatttcatccagcagttacttagagaaagagaagtaggtatccccccagaacagtccctcgaaactgccaaggcaatcaaggaaaagtactgctatatctgccccgatatagtgaaggagtttgctaagtacgatgtggatccaaggaagtggattaagcaatacactgggataaacgccattaaccaaaaaaaattcgtgatcgacgttgggtatgaaaggttcctcggccctgaaatatttttccatcctgaattcgcaaaccctgattttatggaatctatttcggatgttgtggatgaagttatacaaaactgtcccattgacgtgcggagacccctctacaaaaacgtcgtgctgagcggaggttcaaccatgtttcgggactttggtagacgcctccaacgcgacttgaagagggttgtggatgcccgtctgagactttccgaagaactctctggaggcagaataaagccaaagcccgttgaagttcaggtggttacccatcatatgcagcgatacgcagtgtggttcgggggatcgatgttggcctccacccctgagtttttccaagtgtgccatactaaaaaggattatgaggagtatggcccaagcatttgccggcataatcctgtgtttggtgtcatgtcatag

SEQ ID NO: 204484 - DNA, 2216 bp, Artificial Sequence
  derived and/or modified sequence
agcatccgggctcccggcagcggcgctgcggcggctcgcgggagacgctgcgcgcggggctagcgggcggcggagcggacggcgacggggcgctctcgggctgccggcggggccgagcgccgcgcgtcccgagcatggcaggctccctgcctccctgcgtggtggactgtggcaccgggtataccaagcttggctacgcaggcaacactgagccccagttcattattccttcatgtattgccatcagagagtcagcaaaggtagttgaccaagctcaaaggagagtgttgaggggagttgatgaccttgactttttcataggagatgaagccatcgataaacctacatatgctacaaagtggccgatacgacatggaatcattgaagactgggatcttatggaaaggttcatggagcaagtggtttttaaatatcttcgagctgaacctgaggaccattattttttaatgacagaacctccactcaatacaccagaaaacagagagtatcttgcagaaattatgtttgaatcatttaacgtaccaggactctacattgcagttcaggcagtgctggccttggcggcatcttggacatctcgacaagtgggtgaacgtacgttaacggggatagtcattgacagcggagatggagtcacccatgttatcccagtggcagaaggttatgtaattggaagctgcatcaaacacatcccgattgcaggtagagatattacgtatttcattcaacagctgctaagggagagggaggtgggaatccctcctgagcagtcactggagaccgcaaaagccattaaggagaaatactgttacatttgccccgatatagtcaaggaatttgccaagtatgatgtggatccccggaagtggatcaaacagtacacgggtatcaatgcgatcaaccagaagaagtttgttatagacgttggttacgaaagattcctgggacctgaaatattctttcacccggagtttgccaacccagactttatggagtccatctcagatgttgttgatgaagtaatacagaactgccccatcgatgtgcggcgcccgctgtataagaatgtcgtactctcaggaggctccaccatgttcagggatttcggacgccgactgcagagggatttgaagagagtggtggatgctaggctgaggctcagcgaggagctcagcggcgggaggatcaagccgaagcctgtggaggtccaggtggtcacgcatcacatgcagcgctacgccgtgtggttcggaggctccatgctggcctcgactcccgagttctttcaggtctgccacaccaagaaggactatgaagagtacgggcccagcatctgccgccacaaccccgtctttggagtcatgtcctagtgtctgcctgaacgcgtcgttcgatggtgtcacgttggggaacaagtgtccttcagaacccagagaaggccgccgttctgtaaatagcgacgtcggtgttgctgcccagcagcgtgcttgcattgccggtgcatgaggcgcggcgcgggcccttcagtaaaagccatttatccgtgtgccgaccgctgtctgccagcctcctccttctcccgccctcctcaccctcgctctccctcctcctcctcctccgagctgctagctgacaaatacaattctgaaggaatccaaatgtgactttgaaaattgttagagaaaacaacattagaaaatggcgcaaaatcgttaggtcccaggagagaatgtgggggcgcaaacccttttcctcccagcctatttttgtaaataaaatgtttaaacttgaaatacaaatcgatgtttatatttcctatcattttgtattttatggtatttggtacaactggctgatactaagcacgaatagatattgatgttatggagtgctgtaatccaaagtttttaattgtgaggcatgttctgatatgtttataggcaaacaaataaaacagcaaacttttttgccacatgtttgctagaaaatgattatactttattggagtgacatgaagtttgaacactaaacagtaatgtatgagaattactacagatacatgtatcttttagttttttttgtttgaactttctggagctgttttatagaagatgatggtttgttgtcggtgagtgttggatgaaatacttccttgcaccattgtaataaaagctgttagaatatttgtaaatatc

SEQ ID NO: 204485 - DNA, 1521 bp, Artificial Sequence
  derived and/or modified sequence
ggcgacggggcgctctcgggctgccggcggggccgagcgccgcgcgtcccgagcatggcaggctccctgcctccctgcgtggtggactgtggcaccgggtataccaagcttggctacgcaggcaacactgagccccagttcattattccttcattggccgatacgacatggaatcattgaagactgggatcttatggaaaggttcatggagcaagtggtttttaaatatcttcgagctgaacctgaggaccattattttttaatgacagaacctccactcaatacaccagaaaacagagagtatcttgcagaaattatgtttgaatcatttaacgtaccaggactctacattgcagttcaggcagtgctggccttggcggcatcttggacatctcgacaagtgggtgaacgtacgttaacggggatagtcattgacagcggagatggagtcacccatgttatcccagtggcagaaggttatgtaattggaagctgcatcaaacacatcccgattgcaggtagagatattacgtatttcattcaacagctgctaagggagagggaggtgggaatccctcctgagcagtcactggagaccgcaaaagccattaaggagaaatactgttacatttgccccgatatagtcaaggaatttgccaagtatgatgtggatccccggaagtggatcaaacagtacacgggtatcaatgcgatcaaccagaagaagtttgttatagacgttggttacgaaagattcctgggacctgaaatattctttcacccggagtttgccaacccagactttatggagtccatctcagatgttgttgatgaagtaatacagaactgccccatcgatgtgcggcgcccgctgtataagaatgtcgtactctcaggaggctccaccatgttcagggatttcggacgccgactgcagagggatttgaagagagtggtggatgctaggctgaggctcagcgaggagctcagcggcgggaggatcaagccgaagcctgtggaggtccaggtggtcacgcatcacatgcagcgctacgccgtgtggttcggaggctccatgctggcctcgactcccgagttctttcaggtctgccacaccaagaaggactatgaagagtacgggcccagcatctgccgccacaaccccgtctttggagtcatgtcctagtgtctgcctgaacgcgtcgttcgatggtgtcacgttggggaacaagtgtccttcagaacccagagaaggccgccgttctgtaaatagcgacgtcggtgttgctgcccagcagcgtgcttgcattgccggtgcatgaggcgcggcgcgggcccttcagtaaaagccatttatccgtgtgccgaccgctgtctgccagcctcctccttctcccgccctcctcaccctcgctctccctcctcctcctcctccgagctgctagctgacaaatacaattctgaaggaatccaaatgtgactttgaaaattgttagagaaaacaacattagaaaatggcgc

SEQ ID NO: 204486 - DNA, 1257 bp, Artificial Sequence
  derived and/or modified sequence
atggccggcagcctgcccccctgcgtggtggactgcggcaccggctacaccaagctgggctacgccggcaacaccgagccccagttcatcatccccagctgcatcgccatcagagagagcgccaaggtggtggaccaggcccagagaagagtgctgagaggcgtggacgacctggacttcttcatcggcgacgaggccatcgacaagcccacctacgccaccaagtggcccatcagacacggcatcatcgaggactgggacctgatggagagattcatggagcaggtggtgttcaagtacctgagagccgagcccgaggaccactacttcctgatgaccgagccccccctgaacacccccgagaacagagagtacctggccgagatcatgttcgagagcttcaacgtgcccggcctgtacatcgccgtgcaggccgtgctggccctggccgccagctggaccagcagacaggtgggcgagagaaccctgaccggcatcgtgatcgacagcggcgacggcgtgacccacgtgatccccgtggccgagggctacgtgatcggcagctgcatcaagcacatccccatcgccggcagagacatcacctacttcatccagcagctgctgagagagagagaggtgggcatcccccccgagcagagcctggagaccgccaaggccatcaaggagaagtactgctacatctgccccgacatcgtgaaggagttcgccaagtacgacgtggaccccagaaagtggatcaagcagtacaccggcatcaacgccatcaaccagaagaagttcgtgatcgacgtgggctacgagagattcctgggccccgagatcttcttccaccccgagttcgccaaccccgacttcatggagagcatcagcgacgtggtggacgaggtgatccagaactgccccatcgacgtgagaagacccctgtacaagaacgtggtgctgagcggcggcagcaccatgttcagagacttcggcagaagactgcagagagacctgaagagagtggtggacgccagactgagactgagcgaggagctgagcggcggcagaatcaagcccaagcccgtggaggtgcaggtggtgacccaccacatgcagagatacgccgtgtggttcggcggcagcatgctggccagcacccccgagttcttccaggtgtgccacaccaagaaggactacgaggagtacggccccagcatctgcagacacaaccccgtgttcggcgtgatgagctag

SEQ ID NO: 204487 - protein, 1426 aa, Artificial Sequence
  derived and/or modified sequence
MTEALQWARYHWRRLIRGATRDDDSGPYNYSSLLACGRKSSQTPKLSGRHRIVVPHIQPFKDEYEKFSGAYVNNRIRTTKYTLLNFVPRNLFEQFHRAANLYFLFLVVLNWVPLVEAFQKEITMLPLVVVLTIIAIKDGLEDYRKYKIDKQINNLITKVYSRKEKKYIDRCWKDVTVGDFIRLSCNEVIPADMVLLFSTDPDGICHIETSGLDGESNLKQRQVVRGYAEQDSEVDPEKFSSRIECESPNNDLSRFRGFLEHSNKERVGLSKENLLLRGCTIRNTEAVVGIVVYAGHETKAMLNNSGPRYKRSKLERRANTDVLWCVMLLVIMCLTGAVGHGIWLSRYEKMHFFNVPEPDGHIISPLLAGFYMFWTMIILLQVLIPISLYVSIEIVKLGQIYFIQSDVDFYNEKMDSIVQCRALNIAEDLGQIQYLFSDKTGTLTENKMVFRRCSVAGFDYCHEENARRLESYQEAVSEDEDFIDTVSGSLSNMAKPRAPSCRTVHNGPLGNKPSNHLAGSSFTLGSGEGASEVPHSRQAAFSSPIETDVVPDTRLLDKFSQITPRLFMPLDETIQNPPMETLYIIDFFIALAICNTVVVSAPNQPRQKIRHPSLGGLPIKSLEEIKSLFQRWSVRRSSSPSLNSGKEPSSGVPNAFVSRLPLFSRMKPASPVEEEVSQVCESPQCSSSSACCTETEKQHGDAGLLNGKAESLPGQPLACNLCYEAESPDEAALVYAARAYQCTLRSRTPEQVMVDFAALGPLTFQLLHILPFDSVRKRMSVVVRHPLSNQVVVYTKGADSVIMELLSVASPDGASLEKQQMIVREKTQKHLDDYAKQGLRTLCIAKKVMSDTEYAEWLRNHFLAETSIDNREELLLESAMRLENKLTLLGATGIEDRLQEGVPESIEALHKAGIKIWMLTGDKQETAVNIAYACKLLEPDDKLFILNTQSKDACGMLMSTILKELQKKTQALPEQVSLSEDLLQPPVPRDSGLRAGLIITGKTLEFALQESLQKQFLELTSWCQAVVCCRATPLQKSEVVKLVRSHLQVMTLAIGDGANDVSMIQVADIGIGVSGQEGMQAVMASDFAVSQFKHLSKLLLVHGHWCYTRLSNMILYFFYKNVAYVNLLFWYQFFCGFSGTSMTDYWVLIFFNLLFTSAPPVIYGVLEKDVSAETLMQLPELYRSGQKSEAYLPHTFWITLLDAFYQSLVCFFVPYFTYQGSDTDIFAFGNPLNTAALFIVLLHLVIESKSLTWIHLLVIIGSILSYFLFAIVFGAMCVTCNPPSNPYWIMQEHMLDPVFYLVCILTTSIALLPRFVYRVLQGSLFPSPILRAKHFDRLTPEERTKALKKWRGAGKMNQVTSKYANQSAGKSGRRPMPGPSAVFAMKSASSCAIEQGNLSLCETALDQGYSETKAFEMAGPSKGKES

SEQ ID NO: 204488 - DNA, 4281 bp, Artificial Sequence
  derived and/or modified sequence
atgaccgaggccctgcagtgggccagataccactggagaagactgatcagaggcgccaccagagacgacgacagcggcccctacaactacagcagcctgctggcctgcggcagaaagagcagccagacccccaagctgagcggcagacacagaatcgtggtgccccacatccagcccttcaaggacgagtacgagaagttcagcggcgcctacgtgaacaacagaatcagaaccaccaagtacaccctgctgaacttcgtgcccagaaacctgttcgagcagttccacagagccgccaacctgtacttcctgttcctggtggtgctgaactgggtgcccctggtggaggccttccagaaggagatcaccatgctgcccctggtggtggtgctgaccatcatcgccatcaaggacggcctggaggactacagaaagtacaagatcgacaagcagatcaacaacctgatcaccaaggtgtacagcagaaaggagaagaagtacatcgacagatgctggaaggacgtgaccgtgggcgacttcatcagactgagctgcaacgaggtgatccccgccgacatggtgctgctgttcagcaccgaccccgacggcatctgccacatcgagaccagcggcctggacggcgagagcaacctgaagcagagacaggtggtgagaggctacgccgagcaggacagcgaggtggaccccgagaagttcagcagcagaatcgagtgcgagagccccaacaacgacctgagcagattcagaggcttcctggagcacagcaacaaggagagagtgggcctgagcaaggagaacctgctgctgagaggctgcaccatcagaaacaccgaggccgtggtgggcatcgtggtgtacgccggccacgagaccaaggccatgctgaacaacagcggccccagatacaagagaagcaagctggagagaagagccaacaccgacgtgctgtggtgcgtgatgctgctggtgatcatgtgcctgaccggcgccgtgggccacggcatctggctgagcagatacgagaagatgcacttcttcaacgtgcccgagcccgacggccacatcatcagccccctgctggccggcttctacatgttctggaccatgatcatcctgctgcaggtgctgatccccatcagcctgtacgtgagcatcgagatcgtgaagctgggccagatctacttcatccagagcgacgtggacttctacaacgagaagatggacagcatcgtgcagtgcagagccctgaacatcgccgaggacctgggccagatccagtacctgttcagcgacaagaccggcaccctgaccgagaacaagatggtgttcagaagatgcagcgtggccggcttcgactactgccacgaggagaacgccagaagactggagagctaccaggaggccgtgagcgaggacgaggacttcatcgacaccgtgagcggcagcctgagcaacatggccaagcccagagcccccagctgcagaaccgtgcacaacggccccctgggcaacaagcccagcaaccacctggccggcagcagcttcaccctgggcagcggcgagggcgccagcgaggtgccccacagcagacaggccgccttcagcagccccatcgagaccgacgtggtgcccgacaccagactgctggacaagttcagccagatcacccccagactgttcatgcccctggacgagaccatccagaacccccccatggagaccctgtacatcatcgacttcttcatcgccctggccatctgcaacaccgtggtggtgagcgcccccaaccagcccagacagaagatcagacaccccagcctgggcggcctgcccatcaagagcctggaggagatcaagagcctgttccagagatggagcgtgagaagaagcagcagccccagcctgaacagcggcaaggagcccagcagcggcgtgcccaacgccttcgtgagcagactgcccctgttcagcagaatgaagcccgccagccccgtggaggaggaggtgagccaggtgtgcgagagcccccagtgcagcagcagcagcgcctgctgcaccgagaccgagaagcagcacggcgacgccggcctgctgaacggcaaggccgagagcctgcccggccagcccctggcctgcaacctgtgctacgaggccgagagccccgacgaggccgccctggtgtacgccgccagagcctaccagtgcaccctgagaagcagaacccccgagcaggtgatggtggacttcgccgccctgggccccctgaccttccagctgctgcacatcctgcccttcgacagcgtgagaaagagaatgagcgtggtggtgagacaccccctgagcaaccaggtggtggtgtacaccaagggcgccgacagcgtgatcatggagctgctgagcgtggccagccccgacggcgccagcctggagaagcagcagatgatcgtgagagagaagacccagaagcacctggacgactacgccaagcagggcctgagaaccctgtgcatcgccaagaaggtgatgagcgacaccgagtacgccgagtggctgagaaaccacttcctggccgagaccagcatcgacaacagagaggagctgctgctggagagcgccatgagactggagaacaagctgaccctgctgggcgccaccggcatcgaggacagactgcaggagggcgtgcccgagagcatcgaggccctgcacaaggccggcatcaagatctggatgctgaccggcgacaagcaggagaccgccgtgaacatcgcctacgcctgcaagctgctggagcccgacgacaagctgttcatcctgaacacccagagcaaggacgcctgcggcatgctgatgagcaccatcctgaaggagctgcagaagaagacccaggccctgcccgagcaggtgagcctgagcgaggacctgctgcagccccccgtgcccagagacagcggcctgagagccggcctgatcatcaccggcaagaccctggagttcgccctgcaggagagcctgcagaagcagttcctggagctgaccagctggtgccaggccgtggtgtgctgcagagccacccccctgcagaagagcgaggtggtgaagctggtgagaagccacctgcaggtgatgaccctggccatcggcgacggcgccaacgacgtgagcatgatccaggtggccgacatcggcatcggcgtgagcggccaggagggcatgcaggccgtgatggccagcgacttcgccgtgagccagttcaagcacctgagcaagctgctgctggtgcacggccactggtgctacaccagactgagcaacatgatcctgtacttcttctacaagaacgtggcctacgtgaacctgctgttctggtaccagttcttctgcggcttcagcggcaccagcatgaccgactactgggtgctgatcttcttcaacctgctgttcaccagcgccccccccgtgatctacggcgtgctggagaaggacgtgagcgccgagaccctgatgcagctgcccgagctgtacagaagcggccagaagagcgaggcctacctgccccacaccttctggatcaccctgctggacgccttctaccagagcctggtgtgcttcttcgtgccctacttcacctaccagggcagcgacaccgacatcttcgccttcggcaaccccctgaacaccgccgccctgttcatcgtgctgctgcacctggtgatcgagagcaagagcctgacctggatccacctgctggtgatcatcggcagcatcctgagctacttcctgttcgccatcgtgttcggcgccatgtgcgtgacctgcaacccccccagcaacccctactggatcatgcaggagcacatgctggaccccgtgttctacctggtgtgcatcctgaccaccagcatcgccctgctgcccagattcgtgtacagagtgctgcagggcagcctgttccccagccccatcctgagagccaagcacttcgacagactgacccccgaggagagaaccaaggccctgaagaagtggagaggcgccggcaagatgaaccaggtgaccagcaagtacgccaaccagagcgccggcaagagcggcagaagacccatgcccggccccagcgccgtgttcgccatgaagagcgccagcagctgcgccatcgagcagggcaacctgagcctgtgcgagaccgccctggaccagggctacagcgagaccaaggccttcgagatggccggccccagcaagggcaaggagagctag

SEQ ID NO: 204489 - DNA, 4281 bp, Artificial Sequence
  derived and/or modified sequence
atgaccgaagctctgcaatgggcccgatatcactggagacgtctaataagaggtgccacccgggacgatgatagtggcccatataactacagctccctgttagcctgtggtaggaaatcaagccagacaccaaagctgtctggaagacaccggatcgtcgtgccccacatccagccttttaaggacgagtacgaaaagtttagcggcgcatatgttaataatagaataaggaccaccaaatacaccctcctgaattttgtgcctagaaatctgtttgagcagtttcacagggccgcaaacctgtactttttattcctcgttgtgctaaactgggtgccactcgtggaggccttccagaaagaaataaccatgttgcctcttgtcgtcgttctgaccatcattgccatcaaagatgggcttgaagactaccgaaagtataagatcgacaagcaaatcaacaatcttattacgaaggtgtacagccgcaaggagaagaagtacattgataggtgctggaaggatgtgaccgtcggcgacttcattcggctgagctgtaacgaagtgattcctgcggatatggtcctgctgttctccacagacccggatggcatttgccacattgaaacaagtgggctggatggcgaaagtaacctgaagcagaggcaagttgtcaggggctacgccgaacaggactccgaggttgacccggaaaaattttcttcacgtatagaatgtgaaagcccaaacaacgacctaagcaggtttcgaggattcctggagcactcaaataaagagcgcgttgggctttcaaaggaaaatttgctcttgaggggttgtaccattagaaacactgaggcagtcgtcggcatcgtggtgtacgcgggacacgagacaaaggcaatgcttaacaatagtggacccaggtacaagcgaagcaagttggagcgtcgtgcgaacacagacgtattgtggtgcgtaatgttgctggtgatcatgtgtctcactggtgctgttggccatggaatctggctaagccggtatgaaaagatgcatttttttaacgtgcccgagccagatggacacattatttcccctctattagctggcttttatatgttctggactatgatcatcctgcttcaggtgctgattcctatatcactgtatgtgagcatcgagatcgttaagctcggtcagatatacttcattcagtccgacgtcgacttttacaacgaaaaaatggatagtatagtgcagtgtagggccttgaatatcgccgaggacctcggtcaaattcaatacttgttcagcgataagaccggaacacttacagagaataagatggtgttccggcgatgttccgtcgccgggtttgattattgccatgaagagaatgcacgcagactcgagagttatcaggaggccgtgtctgaggacgaagatttcatcgacaccgttagcgggtccctcagcaacatggctaaaccacgggccccatcttgtcgtacagttcataacggccccctgggaaataagcccagcaaccatctggcaggcagttcatttaccctcggctccggtgagggcgccagtgaggtgcctcacagtcgccaggccgcattcagctcccctatcgagactgacgttgtaccagacactcgacttctggataagttctctcagatcactccccgactgttcatgccgcttgatgaaacaatccagaatcctcctatggagactctgtatatcatcgacttctttattgcattggctatttgtaatacggttgtcgtcagcgcccctaatcaaccccggcaaaagattcggcacccatcactgggaggcctccctatcaagtctttggaggagattaagagcctgtttcaacgatggtctgtcagaaggagctcaagtccctctctgaactctggtaaagagcccagcagcggggtacccaacgcatttgtgtctcgtctgcccctgtttagtaggatgaagccagctagccccgtggaggaagaggtgtcccaggtgtgcgagagcccccagtgctcctcttcatctgcctgctgcacagaaactgagaaacaacacggagatgccgggctgctcaatggcaaggccgagtccctccccgggcagcccctagcatgtaacctgtgctatgaggcggagagcccggatgaggccgcgctcgtgtatgccgcgagagcctaccagtgcactctgaggagcagaacgcccgagcaggtaatggtcgacttcgcggccctcggccctttgacatttcagctgctacacattctgcctttcgacagtgtccgaaaaagaatgtccgtggtggtcagacaccctctcagtaatcaggtggtcgtgtataccaaaggtgcagatagtgtcatcatggagcttctatccgtggcttcccccgacggtgcctctctagaaaagcagcagatgatagtcagggagaagacccagaaacacctggacgactacgctaaacagggcttgcgaaccctctgcattgccaaaaaggtaatgtccgatacagaatatgcggagtggctgaggaaccactttctggccgaaacaagcatagacaaccgggaggagctacttctggagtctgctatgcgcctggagaataagctgacactgttgggggctactggtatagaggaccggctgcaggaaggggtgccagaatcaatagaggccctgcacaaggccggaattaagatctggatgctgacgggagacaagcaagagactgctgttaatatcgcctatgcttgtaagctcttagaacccgacgataagttgtttatcctgaacacccagagtaaggatgcttgcgggatgttgatgtctaccatcttaaaggagctacaaaagaagacacaggcgctgcctgagcaggtttccctgagtgaagacctgttgcagccccctgttcccagggattccgggctgagggcgggcttgatcattacgggtaaaaccctggagttcgcgttgcaagaatccctgcagaagcagttcctagaattgacgagctggtgtcaggctgtggtctgctgcagggccacgcccctgcaaaagtccgaggtggttaaactggtccgctcacacttacaagtaatgacattggccatcggcgatggagccaacgatgtctccatgatccaggtcgcagatatcggtattggggtatccggacaggaggggatgcaggctgtgatggcatccgactttgctgttagccagttcaaacacctttctaagttgctactggtgcacggacattggtgctatacgcgcttgagtaatatgatcttgtatttcttttataaaaacgttgcatacgtgaatctgttgttttggtaccagtttttttgtggattctctgggactagcatgacagattactgggtcctgatattcttcaacctgttatttacgagtgctcctcccgttatttatggagtcctggagaaagacgtcagcgctgaaacgctcatgcaattaccggagctgtaccgctctgggcagaagtcagaagcataccttccgcacacattctggattaccctgctggacgccttctaccagagtctcgtgtgtttcttcgtaccatacttcacctatcaaggctcagacactgatattttcgcatttggaaatccacttaataccgctgcgctatttatcgtgttactgcatctcgtgattgagagcaagagtctcacgtggatccatcttctagttattatcggtagtatcttgtcatactttcttttcgcaatcgtgttcggggcaatgtgcgttacatgcaacccgcccagtaatccgtactggattatgcaggagcacatgctggatccagttttttacctcgtttgcatcctgaccacttcaatcgccttgctgccccggttcgtctacagagtcttacagggtagtctcttccccagccctattctgagagcaaaacacttcgacaggctgacccccgaagaacgcactaaggctctcaaaaaatggcgaggcgccggtaagatgaatcaggtgaccagcaaatatgcaaaccagtccgctggtaaaagtggaaggcgcccaatgcccggccctagtgccgtgtttgcaatgaagagcgcctcaagctgtgccatcgaacaggggaacctgtccctctgtgagacagccctggatcaaggctatagcgaaaccaaggcattcgaaatggcagggcctagcaagggcaaggagtcatag

SEQ ID NO: 204490 - DNA, 4281 bp, Artificial Sequence
  derived and/or modified sequence
atgacagaggccctgcagtgggcccgctaccactggaggaggctcatccggggggccaccagagatgatgattctggcccctacaactacagcagcctgctggcctgtggcaggaagagcagccagacccccaagctgagcggccgccaccgcatcgtggtgccccacatccagcccttcaaggatgaatatgagaagttcagcggggcctacgtgaacaaccgcatccgcaccaccaagtacaccctgctgaactttgtgcccaggaacctgtttgagcagttccaccgggccgccaacctgtacttcctgttcctggtggtgctgaactgggtgcccctggtggaggccttccagaaggagatcaccatgctgcccctggtggtggtgctgaccatcatcgccatcaaggatggcctggaggactacaggaagtacaagattgacaagcagatcaacaacctgatcaccaaggtgtacagcaggaaggagaagaagtacatcgaccgctgctggaaggatgtgacagtgggggacttcatccggctgagctgcaatgaggtgatcccagctgacatggtgctgctcttcagcacagatcctgatggcatctgccacatcgagaccagcggcctggatggagagagcaacctgaagcagaggcaggtggtgcggggctacgccgagcaggacagcgaggtggaccctgagaagttcagcagcagaattgaatgtgagagccccaacaatgacctgagccgcttccggggcttcctggagcacagcaacaaggagcgggtgggcctgagcaaggagaacctgctgctgcggggctgcaccatccggaacacagaggccgtggtgggcatcgtggtgtatgccggccacgagaccaaggccatgctgaacaacagcggcccccgctacaagaggagcaagctggagcggcgggccaacacagatgtgctgtggtgtgtgatgctgctggtgatcatgtgcctgactggagctgtgggccacggcatctggctgagccgctatgagaagatgcacttcttcaacgtgcctgagccagatggccacatcatcagccccctgctggccggcttctacatgttctggaccatgatcatcctgctgcaggtgctgatccccatcagcctgtatgtgtccattgagatcgtgaagctgggccagatctacttcatccagagtgatgtggacttctacaatgagaagatggacagcatcgtgcagtgccgggccctgaacattgctgaggacctgggccagatccagtacctgttcagtgacaagacaggcaccctgacagagaacaagatggtgttccgccgctgcagcgtggccggctttgactactgccacgaggagaatgcccggcggctggagagctaccaggaggccgtgtctgaagatgaggacttcatcgacacagtgtctggcagcctgagcaacatggccaagccccgggcccccagctgcaggacagtgcacaacggccccctgggcaacaagcccagcaaccacctggccggcagcagcttcaccctgggcagcggggagggcgccagcgaggtgccccacagccggcaggccgccttcagcagccccattgaaacagatgtggtgcctgacacccggctgctggacaagttcagccagatcacccccaggctcttcatgcccctggatgagaccatccagaacccccccatggagaccctgtacatcatcgacttcttcatcgccctggccatctgcaacacagtggtggtgtctgcccccaaccagccccggcagaagatccgccaccccagcctgggcggcctgcccatcaagagcctggaggagatcaagagcctcttccagcgctggagcgtgagaagaagcagcagccccagcctgaacagcggcaaggagcccagcagcggcgtgcccaatgcctttgtgtcccggctgcccctcttcagcaggatgaagccagccagccctgtggaggaggaggtgtcccaggtgtgtgagagcccccagtgcagcagcagcagcgcctgctgcacagaaacagagaagcagcacggagatgctggcctgctgaatggcaaggccgagagcctgcccggccagcccctggcctgcaacctgtgctatgaagctgagagcccagatgaagctgccctggtgtatgctgcccgggcctaccagtgcaccctgcggagcaggaccccagagcaggtgatggtggactttgctgccctgggccccctgaccttccagctgctgcacatcctgccctttgacagcgtgaggaagaggatgtctgtggtggtgcgccaccccctgagcaaccaggtggtggtgtacaccaagggagctgacagcgtcatcatggagctgctgtctgtggccagcccagatggagccagcctggagaagcagcagatgattgtgcgggagaagacccagaagcacctggatgattatgccaagcagggcctgcggaccctgtgcatcgccaagaaggtgatgtctgacacagaatatgcagagtggctgaggaaccacttcctggccgagaccagcattgacaaccgggaggagctgctgctggagagcgccatgaggctggagaacaagctgaccctgctgggcgccaccggcattgaagatcggctgcaggagggcgtgcctgagagcattgaggccctgcacaaggccggcatcaagatctggatgctgaccggggacaagcaggagacagctgtgaacatcgcctatgcctgcaagctgctggagccagatgacaagctgttcatcctgaacacccagagcaaggatgcctgtggcatgctgatgagcaccatcctgaaggagctgcagaagaagacccaggccctgcctgagcaggtgtccctgtctgaggacctgctgcagccccctgtgccccgggacagcggcctgcgggccggcctcatcatcaccgggaagaccctggagtttgccctgcaggagagcctgcagaagcagttcctggagctgacctcctggtgccaggccgtggtgtgctgccgggccacccccctgcagaagtctgaggtggtgaagctggtgcgcagccacctgcaggtgatgaccctggccatcggagatggagccaatgatgtgtccatgatccaggtggccgacattggaattggagtgtctggccaggagggcatgcaggccgtgatggccagtgactttgctgtgtcccagttcaagcacctgagcaagctgctgctggtgcacggccactggtgctacacccggctgagcaacatgatcctgtacttcttctacaagaatgtggcctacgtgaacctgctcttctggtaccagttcttctgtggcttcagcggcacctccatgacagactactgggtgctgatcttcttcaacctgctcttcaccagcgcccctcctgtgatctatggagtgctggagaaggatgtgtctgctgagaccctgatgcagctgcctgagctgtaccgcagcggccagaagtctgaggcctacctgccccacaccttctggatcaccctgctggatgccttctaccagagcctggtgtgcttctttgtgccctacttcacctaccagggcagtgacacagacatctttgccttcggcaaccccctgaacacagctgccctcttcatcgtgctgctgcacctggtgattgagagcaagagcctgacctggatccacctgctggtgatcatcggcagcatcctgagctacttcctgtttgccatcgtgtttggagccatgtgtgtgacctgcaacccccccagcaacccctactggatcatgcaggagcacatgctggaccctgtgttctacctggtgtgcatcctgaccaccagcatcgccctgctgcccaggtttgtgtacagagtgctgcagggcagcctcttccccagccccatcctgcgggccaagcactttgaccggctgaccccagaggagaggaccaaggccctgaagaagtggagaggagctgggaagatgaaccaggtgaccagcaaatatgccaaccagagcgctgggaagtctggaagaagacccatgcctggccccagcgctgtgtttgccatgaagagcgccagcagctgtgccatcgagcagggcaacctgagcctgtgtgaaacagccctggaccagggctacagcgagaccaaggcctttgagatggccggccccagcaagggcaaggagagctag

SEQ ID NO: 204491 - DNA, 4281 bp, Artificial Sequence
  derived and/or modified sequence
atgaccgaggccctgcagtgggcccggtaccactggcggcggctgatccggggagctacccgagacgacgacagtgggccctacaattattcctcactcctggcctgtgggaggaaatcatcccagacaccaaagctgtccggccgacaccgcatcgttgttccacacatccagccatttaaagacgaatatgagaagttttctggcgcgtatgtcaacaacaggattcgcactaccaaatacaccctgctcaactttgttcccagaaacctgttcgagcagttccaccgcgccgcaaatctgtactttttgtttctggtcgtgctcaactgggttccgcttgtggaggcttttcagaaagaaatcaccatgttgcctctggttgtcgtgctgactatcatcgcaatcaaggacggactggaagactataggaaatacaaaattgataagcagataaataatctgattaccaaggtttactcaagaaaagagaaaaagtacatagacaggtgttggaaggatgtgaccgtgggagactttatccggttgtcctgtaatgaggtgattccagctgacatggtgctgttgttttcaacagatcctgatgggatttgtcacatagaaacatccgggctagatggggaatcaaatctcaagcagcgccaggttgtgaggggctacgctgaacaggattctgaagtagatcctgaaaagttttccagcaggatagagtgcgaatcaccgaataacgatctgtcacggtttcgtggctttctggaacactcaaataaagaacgagtcgggctttctaaggagaatctcctgctacgagggtgcaccataaggaacaccgaagcagtggtcggcattgtagtgtacgccggacacgagacgaaggcaatgctcaataatagcgggccacgatacaagcggtctaagctggaaaggagggccaacacagatgtgctgtggtgcgtgatgcttctggtgattatgtgtctgacaggggccgtgggacatgggatatggctctctcgttatgagaagatgcacttctttaatgttcctgaacctgacggccatatcatctcacccctgttagccggattttacatgttctggaccatgattatacttctgcaggtcctgatcccaatatctctgtacgtgtctatcgaaatcgtgaagctcggccagatctattttatacagagtgacgtcgacttttataacgaaaaaatggacagcatcgtgcagtgcagggctctaaatatcgctgaagatctggggcagattcaatacttgttctccgataaaaccggcaccctcaccgagaataaaatggtgttcaggcggtgcagtgttgcagggtttgattattgtcacgaagaaaacgctagaagactggaatcctatcaagaggctgtgagtgaggacgaggacttcatcgacaccgtgagtggatccctttcaaacatggctaaacccagagccccttcctgccgcaccgtgcacaatggaccgctaggaaacaagccctctaaccatcttgcaggcagtagctttactttgggaagcggtgagggtgcctccgaggtccctcactcccgccaggccgccttcagcagtccaattgaaaccgatgtcgtgccggacacaaggttgctcgacaagtttagtcagatcactccaagactgttcatgccgttggacgaaactatccagaatcctcctatggagacactgtacatcatagactttttcattgccctggccatctgcaatacagttgtagtgagcgcacccaaccagccaagacaaaagatcagacacccaagtctcggaggcttaccgattaaatcgctggaggaaattaaatctctcttccaacgatggagtgtcagaagatcctcctcaccttcgttgaactctggcaaggaacccagctccggcgtccctaacgcattcgtcagccggctccctctgttctcccgcatgaaacctgcatcccccgtcgaggaagaagtgtcccaggtctgtgaatcaccccagtgtagttcttccagtgcctgttgcaccgagaccgaaaaacagcacggagatgccggattactgaacggcaaagccgagtctctcccaggccagccactagcctgtaacttgtgctatgaagccgaaagtcctgatgaggcagcgttggtgtacgcagcccgggcctaccagtgcacactgagatctaggacacctgaacaggtgatggtcgacttcgcagcgctgggacccctgaccttccaactcctacatatcctgccttttgacagcgtcagaaagagaatgtcagtggttgttcggcatccactgtcaaatcaagtcgttgtctatactaagggagctgacagcgtcattatggagctgctgagcgtggctagccccgacggggcaagtctcgagaaacagcagatgatcgttcgggaaaagacccagaaacatttagatgattatgccaagcagggtttgcgtacgctgtgtattgctaagaaagtgatgagcgatacggagtacgccgaatggctccgtaatcatttcctggcagagacctcaattgataaccgcgaggaactcctgctcgaaagtgcaatgaggttggagaataaactaaccctacttggcgctacggggattgaggacaggctccaagagggcgtccccgaatcaatcgaggcactccacaaagcgggtattaagatttggatgttgacaggagataaacaggagaccgcagtgaatattgcctacgcgtgtaaactcctcgagccagacgataaattattcattctgaatacgcagtccaaagacgcctgtggcatgctgatgtctactatcctcaaagaactgcagaagaagacccaggctttaccagaacaggtttctttatcagaggacctcctgcaacctcctgttcctcgcgacagcgggcttcgcgccggactcattataacaggaaaaacgctggaatttgccctgcaagaatccctccaaaaacagtttctagagctcacctcctggtgtcaagcagtcgtttgctgtagagcgacgccacttcagaagtccgaggtggtgaagctcgtgaggtcccacttacaggttatgacactggccatcggtgacggggccaacgatgtatctatgatccaagtagcagacatcggaattggagtgagcggccaggagggtatgcaggctgtgatggcttcagattttgccgtttctcagtttaagcacctctcaaaactcctactggtgcacggccactggtgctatactcggctctccaacatgatcctctacttcttctacaagaatgtcgcctacgtgaatctgctcttttggtatcagttcttctgtggtttctctggtacatccatgactgactattgggtgctcatcttctttaatctcctttttaccagtgcgccccccgtcatttatggagtcttggagaaggacgtatccgccgaaaccctaatgcagctccccgagctctatcgtagcggccaaaaaagtgaagcttacctgcctcacacgttctggatcacccttcttgatgctttttatcagtcactcgtctgtttcttcgtaccatacttcacctatcagggatccgacacggacatatttgcgttcgggaatccccttaatactgccgcgctcttcatcgtactattgcacctagtgatcgagagtaagtcacttacctggatacatctcctcgtgataattggctctatcctctcctatttcctcttcgccattgtgttcggggccatgtgcgtgacatgtaaccccccctccaacccttactggattatgcaggagcacatgcttgacccagttttttacttggtctgcatcctcactacttccatagcattgctacctcgttttgtgtaccgagtgttacagggcagcctgttcccttcacccattcttcgagctaaacatttcgaccgtctgacccccgaagagcggactaaggctctgaaaaagtggcgcggggccgggaaaatgaaccaggtcacttctaaatacgctaaccagtcagccgggaaatcaggccgacgaccgatgcctggtccctcagcagtgttcgcaatgaaaagcgccagtagttgtgccatcgagcaggggaatttgtcactgtgtgaaactgctctagaccagggctactcagaaacaaaagcttttgagatggccgggccatctaaaggaaaagagtcatag

SEQ ID NO: 204492 - DNA, 4281 bp, Artificial Sequence
  derived and/or modified sequence
atgacagaggcacttcaatgggcccgatatcattggcgcagactgattagaggtgctactcgagatgacgatagtggcccatataactatagttccttgctagcatgtggaaggaaaagttctcagacgccaaagctgtcaggcagacatagaatcgttgtgccacatatccagcccttcaaggacgagtacgaaaagttttccggcgcatatgtgaacaaccgtattcgcacgactaagtacaccctgctcaatttcgtacccagaaatttgtttgaacaattccaccgggcagctaatctgtacttcctgtttttagtggtgctcaactgggtgccactggtggaggcctttcagaaggaaatcaccatgctgcccctggtggtggtgcttaccattatcgcaatcaaggatggtctggaggattaccgcaagtacaaaatcgacaagcaaataaataacctgataacgaaggtatattccaggaaagagaagaagtatatagaccggtgctggaaggacgtgactgtcggcgactttatacggctatcctgtaatgaggtgataccagccgatatggtgctgctgttctcaaccgaccctgatgggatctgtcacattgaaacttccggcctggacggcgagagtaaccttaagcagcggcaggtggtgcgcggttacgccgaacaagactctgaagttgatcctgagaagttttcctctcgaatcgaatgcgagagccccaataatgatctctctagatttcggggattcctcgaacatagcaataaagagcgcgtcgggttatccaaggaaaacctgctgctgcgtggctgtacgataaggaacaccgaggctgtggttgggatagtggtctatgcaggccacgagactaaagccatgctcaataattctggcccaagatataagagatccaaactagagcgccgagctaatacagacgtcctgtggtgtgtcatgcttctcgttatcatgtgcctgactggggctgtaggccacggcatatggctctcccgatacgagaagatgcacttctttaatgtgcctgaaccggacggccacattatctcacccttactggcagggttttacatgttctggactatgataattctcctccaagtcctcatcccaattagcctgtacgtctcaattgaaatagtgaagctgggacagatttatttcatccagtctgacgttgatttttacaatgagaaaatggattcaatagtccagtgtagggcattgaatattgctgaggacctcggccagatccagtacctcttttccgacaagacaggcacactcactgaaaacaaaatggtcttccgaagatgttccgttgccggattcgactactgtcacgaagagaacgccagaagacttgagtcttaccaggaggcagtctcggaagacgaggacttcatcgacaccgtttccggctccctgtccaatatggctaagccgcgtgccccatcctgtagaactgtccacaacggtccactcggcaacaagccgtcaaatcatctggctgggtcgtccttcacattgggatccggagagggcgcttcagaagtcccacactcccgacaggccgctttttcatcgcctatagagactgatgttgtgcctgataccagattactagataagttcagtcagataacaccgaggttgttcatgccactggatgaaaccattcagaatccgccaatggaaactctttatattattgatttttttatcgcacttgccatttgtaataccgtggttgtcagcgctcccaaccagcctagacagaagatccgccacccttcattgggaggactcccgattaaatcactggaggagattaaatctctgtttcaacgctggagcgtgaggcggtcctcaagtccctctctcaacagcggcaaagagccaagttccggggttcccaatgcctttgtctctcgacttcctttatttagtcggatgaagcctgcctctcctgtggaggaggaggtgtcccaggtgtgcgagtcacctcagtgttcgtcaagcagtgcttgttgcaccgagaccgagaaacagcacggggatgccggacttctcaacgggaaggcagagtcacttcccggtcagccactggcctgtaatctctgttacgaggccgaaagccctgacgaggccgctctggtgtacgcggctagagcttaccagtgtacactacgcagtcggactcccgaacaggttatggttgacttcgccgcactgggccctctgacgtttcagttgctccacatcttgccctttgactcggtgcgaaagagaatgtccgtggtagtccgccaccccctcagcaaccaggttgtcgtctatactaaaggagcagactctgttattatggagctattaagcgtggcctcccccgatggcgctagcctcgaaaaacagcagatgatagtgcgagagaagacacagaaacacttggatgactatgccaagcaggggctcaggacactttgtatagccaagaaagtcatgtctgataccgaatatgctgaatggctcaggaaccacttcttagctgagacgtccatagacaatagggaagaacttctcctggagagcgctatgcgtttagagaacaagctgactctgttgggagcaacagggatcgaagaccgcctacaagaaggagtgccagaaagcatcgaggcattacacaaggccggtattaagatctggatgctgactggagacaagcaggagactgcagtgaatatagcttatgcctgtaaactgctggaaccagatgacaaactctttattttaaatactcagtccaaagatgcttgtggcatgctgatgagcactatcttaaaggagttacagaaaaaaactcaggccctccctgagcaagtctcgttgagtgaagatctgctccagccgcctgtgccccgagacagtggcctgcgggctgggctgattatcacagggaaaactctggagttcgcattgcaggagtctctgcaaaagcagtttcttgagctgacctcatggtgtcaggctgtcgtgtgctgtcgcgcaacccctctccagaagtccgaggttgtcaaactagtccgtagccatttgcaggtgatgacactggcaatcggggacggggctaatgatgtttcaatgatacaggtcgccgacattgggatcggtgtctcagggcaggagggcatgcaagccgtgatggcgtcagatttcgccgtgtctcagtttaaacatctgtccaaactactcctggtacacggccactggtgctatacaagactgtctaacatgatcctctattttttctataagaacgttgcttacgtcaacctgctgttctggtaccagttcttctgcgggttcagcggcacctctatgactgattactgggtccttattttcttcaacctgttattcacctctgctccgccagtgatttacggggtattggaaaaagatgtatcggccgagacccttatgcagctgcccgagctttataggtcagggcagaaatctgaggcttatctgccccatactttttggatcacactgctcgacgccttctatcagagcttggtatgcttcttcgtcccctattttacgtaccagggcagcgacacagacatcttcgccttcggcaacccactgaatacggcagcgctgttcatagtactcctgcacctggtgattgaatcaaagtcactcacctggattcatctcttagtgattatcggcagcatcctgagttattttcttttcgctatagtgttcggggcaatgtgcgttacatgtaacccgccatccaacccttattggatcatgcaggaacatatgctcgacccagtattttacttggtgtgtatactaactacaagtattgctctgctgccaagattcgtctatagggtgctgcagggatcgctttttccttcgccaattctcagggcgaagcatttcgataggctaacgccagaggaaagaacaaaagcattaaagaaatggcggggtgcgggaaagatgaaccaggttaccagtaagtatgccaaccaatccgcaggtaaatcaggccgaagacctatgcccggaccatcagctgtatttgccatgaagtcagcctcaagctgcgccatcgaacaaggaaacttgtcattatgcgaaactgcgctggatcaaggctattctgagaccaaggccttcgaaatggctggaccatctaagggaaaggagtcttag

SEQ ID NO: 204493 - DNA, 6655 bp, Artificial Sequence
  derived and/or modified sequence
gacgggaggaggagcggagggagaagtaggttgcgagctcagcacaggctccggcgctggctcccgcagctgagtttgggagatgtctaagtgattttttttttttcccggaaggcaaatggctggcgtggaagcacaacccgctttcactcttcgaatttgtgcttagctcttttcttgtaccttgcgactcgtgaccaacatgctgtgatgtgtgccgagggaggaattggtcagctacacaacctggatcttaccacagtttggatatgactgaggctctccaatgggccagatatcactggcgacggctgatcagaggtgcaaccagggatgatgattcagggccatacaactattcctcgttgctcgcctgtgggcgcaagtcctctcagacccctaaactgtcaggaaggcaccggattgttgttccccacatccagcccttcaaggatgagtatgagaagttctccggagcctatgtgaacaatcgaatacgaacaacaaagtacacacttctgaattttgtgccaagaaatttatttgaacaatttcacagagctgccaatttatatttcctgttcctagttgtcctgaactgggtacctttggtagaagccttccaaaaggaaatcaccatgttgcctctggtggtggtccttacaattatcgcaattaaagatggcctggaagattatcggaaatacaaaattgacaaacagatcaataatttaataactaaagtttatagtaggaaagagaaaaaatacattgaccgatgctggaaagacgttactgttggggactttattcgcctctcctgcaacgaggtcatccctgcagacatggtactactcttttccactgatccagatggaatctgtcacattgagacttctggtcttgatggagagagcaatttaaaacagaggcaggtggttcggggatatgcagaacaggactctgaagttgatcctgagaagttttccagtaggatagaatgtgaaagcccaaacaatgacctcagcagattccgaggcttcctagaacattccaacaaagaacgcgtgggtctcagtaaagaaaatttgttgcttagaggatgcaccattagaaacacagaggctgttgtgggcattgtggtttatgcaggccatgaaaccaaagcaatgctgaacaacagtgggccacggtataagcgcagcaaattagaaagaagagcaaacacagatgtcctctggtgtgtcatgcttctggtcataatgtgcttaactggcgcagtaggtcatggaatctggctgagcaggtatgaaaagatgcattttttcaatgttcccgagcctgatggacatatcatatcaccactgttggcaggattttatatgttttggaccatgatcattttgttacaggtcttgattcctatttctctctatgtttccatcgaaattgtgaagcttggacaaatatatttcattcaaagtgatgtggatttctacaatgaaaaaatggattctattgttcagtgccgagccctgaacatcgccgaggatctgggacagattcagtacctcttttccgataagacaggaaccctcactgagaataagatggtttttcgaagatgtagtgtggcaggatttgattactgccatgaagaaaatgccaggaggttggagtcctatcaggaagctgtctctgaagatgaagattttatagacacagtcagtggttccctcagcaatatggcaaaaccgagagcccccagctgcaggacagttcataatgggcctttgggaaataagccctcaaatcatcttgctgggagctcttttactctaggaagtggagaaggagccagtgaagtgcctcattccagacaggctgctttcagtagccccattgaaacagacgtggtaccagacaccaggcttttagacaaatttagtcagattacacctcggctctttatgccactagatgagaccatccaaaatccaccaatggaaactttgtacattatcgactttttcattgcattggcaatttgcaacacagtagtggtttctgctcctaaccaaccccgacaaaagatcagacacccttcactgggggggttgcccattaagtctttggaagagattaaaagtcttttccagagatggtctgtccgaagatcaagttctccatcgcttaacagtgggaaagagccatcttctggagttccaaacgcctttgtgagcagactccctctctttagtcgaatgaaaccagcttcacctgtggaggaagaggtctcccaggtgtgtgagagcccccagtgctccagtagctcagcttgctgcacagaaacagagaaacaacacggtgatgcaggcctcctgaatggcaaggcagagtccctccctggacagccattggcctgcaacctgtgttatgaggccgagagcccagacgaagcggccttagtgtatgccgccagggcttaccaatgcactttacggtctcggacaccagagcaggtcatggtggactttgctgctttgggaccattaacatttcaactcctacacatcctgccctttgactcagtaagaaaaagaatgtctgttgtggtccgacaccctctttccaatcaagttgtggtgtatacgaaaggcgctgattctgtgatcatggagttactgtcggtggcttccccagatggagcaagtctggagaaacaacagatgatagtaagggagaaaacccagaagcacttggatgactatgccaaacaaggccttcgtactttatgtatagcaaagaaggtcatgagtgacactgaatatgcagagtggctgaggaatcattttttagctgaaaccagcattgacaacagggaagaattactacttgaatctgccatgaggttggagaacaaacttacattacttggtgctactggcattgaagaccgtctgcaggagggagtccctgaatctatagaagctcttcacaaagcgggcatcaagatctggatgctgacaggggacaagcaggagacagctgtcaacatagcttatgcatgcaaactactggagccagatgacaagctttttatcctcaatacccaaagtaaagatgcctgtgggatgctgatgagcacaattttgaaagaacttcagaagaaaactcaagccctgccagagcaagtgtcattaagtgaagatttacttcagcctcctgtcccccgggactcagggttacgagctggactcattatcactgggaagaccctggagtttgccctgcaagaaagtctgcaaaagcagttcctggaactgacatcttggtgtcaagctgtggtctgctgccgagccacaccgctgcagaaaagtgaagtggtgaaattggtccgcagccatctccaggtgatgacccttgctattggtgatggtgccaatgatgttagcatgatacaagtggcagacattgggataggggtctcaggtcaagaaggcatgcaggctgtgatggccagtgactttgccgtttctcagttcaaacatctcagcaagctccttcttgtccatggacactggtgttatacacggctttccaacatgattctctattttttctataagaatgtggcctatgtgaacctccttttctggtaccagttcttttgtggattttcaggaacatccatgactgattactgggttttgatcttcttcaacctcctcttcacatctgcccctcctgtcatttatggtgttttggagaaagatgtgtctgcagagaccctcatgcaactgcctgaactttacagaagtggtcagaaatcagaggcatacttaccccataccttctggatcaccttattggatgctttttatcaaagcctggtctgcttctttgtgccttattttacctaccagggctcagatactgacatctttgcatttggaaaccccctgaacacagccgctctgttcatcgttctcctccatctggtcattgaaagcaagagtttgacttggattcacttgctggtcatcattggtagcatcttgtcttattttttatttgccatagtttttggagccatgtgtgtaacttgcaacccaccatccaacccttactggattatgcaggagcacatgctggatccagtattctacttagtttgtatcctcacgacgtccattgctcttctgcccaggtttgtatacagagttcttcagggatccctgtttccatctccaattctgagagctaagcactttgacagactaactccagaggagaggactaaagctctcaagaagtggagaggggctggaaagatgaatcaagtgacatcaaagtatgctaaccaatcagctggcaagtcaggaagaagacccatgcctggcccttctgctgtatttgcaatgaagtcagcaagttcctgtgctattgagcaaggaaacttatctctgtgtgaaactgctttagatcaaggctactctgaaactaaggcctttgagatggctggaccctccaaaggtaaagaaagctagataccctccttggagttgcaagtattctttcaaggttggaagagggattttgaagaggtatctctccaagcaagaatgacttgtttttccataagggacatgagcattttactaggcttggaagagctgacatgatgagcattattgtatgtttgtatatacatttgtgatagagggctagagtttgacctagagagagtttaaggaagtgaaatatttaattcagaaccaaatgcttttgtaaaactttttggattttgtaaaagcattttcattctcttagaaattcaagtattttcaaggggagtcatttgagatatatttattttactaggagatcttatattctagggaaatgctttaaatggtcaggctccagtcggaatttttttaagaaaaaagtagtttttaatacattggttaggactcagaggaaatacggaaaaaacattgtagatggttaatttacagataaaatcccaagagccttttaaacaacaaggtacctaaaatagggtataattatactgcttaaaatacagttagtgcctattaatagctttttatttcctatgggaagatgcttttggtcttctggctgaagatgtaggcatacctctcactcatttcaatgttttcctgaggtggagccttcattggaaaggggaaagagggattctagggtttcatcagggaccaggaatgcattcctctgtcaggttccaatcaagagaagaccttttatgagatctgcctctgtatagatgttgtcagttaggaaactgaagccataggtcaggcagacatcagctcagcctgtggcccattgggtgatttcctgtattttaaaactgacagtagcctgatcaaagtgatacaatcaatttcaaaacaatcttccagagaccacttgaaggttcatagtttttacaataccctgagacttttcaggtgttggagcctctaaaatatgagatataaacagaaactaatacaagttgttctctggaggtttctatgaggttcttagaaaaatttggttttaaaatcatttgaggacaggaatgtctatagcaagtttactcctattgcgaatcatgtatgctggctttagttgtaacaaacgattttattctaagtaaggccaggtgctactataaaatcatatattcctgttgaagttcttttgaagtcctatctctatttattatatttgaaagttgtcagccaccagtcatccagaatttccttcctgaatctccatgctcatatgcaatgtctacatcaaggtcttcttaatgactattattctcagggtttagttttctaccttctgcctactattttggtctgacatttttgtagccttctgttattattggaaatagtctcttacataagctgatttcgagaactttcaaaatctcacatagctaatggaagttgctttctgctttcttatgactgtttttataaataaactgtttcataaataatgtatactggaaaattgtcatcactcttgtaaacatttgccaaatccaactgtaattagtaccagaacttagaaggaaagtcacaaagcatgccttttaccagaatattgctttgccttttcttatatggaaaatcactgatgtcatatcatttattatcctcacagcagctggcattcattccctgaaatcgtcgtctcctgataaacaataatttagagatatgttcacttgtaaataaaaaggttagaatctaaggacaaagaatgatccaaaaatactaaggaaaaagaacaattttcaattttcagaaatgaattatctgtacatatgaatagaggaaaatactgagtgctaatgttacagggccacaatctcatatccacaattccaaaatctccaaacctctgaaaactgaaatatttttcataaattaggcgtaaattctatgccctgaacaaatgtaaagctatttatgtactttgcttaatgtaatcattcatatactttgctacaaaaatattaatatatttcattactgaatgctaaactgtatttctttttaaaatttggaaaatttttaattctgaaacacaatctagaccttag

SEQ ID NO: 204494 - protein, 1221 aa, Artificial Sequence
  derived and/or modified sequence
MMFRSDRMWSCHWKWKPSPLLFLFALYIMCVPHSVWGCANCRVVLSNPSGTFTSPCYPNDYPNSQACMWTLRAPTGYIIQITFNDFDIEEAPNCIYDSLSLDNGESQTKFCGATAKGLSFNSSANEMHVSFSSDFSIQKKGFNASYIRVAVSLRNQKVILPQTSDAYQVSVAKSISIPELSAFTLCFEATKVGHEDSDWTAFSYSNASFTQLLSFGKAKSGYFLSISDSKCLLNNALPVKEKEDIFAESFEQLCLVWNNSLGSIGVNFKRNYETVPCDSTISKVIPGNGKLLLGSNQNEIVSLKGDIYNFRLWNFTMNAKILSNLSCNVKGNVVDWQNDFWNIPNLALKAESNLSCGSYLIPLPAAELASCADLGTLCQATVNSPSTTPPTVTTNMPVTNRIDKQRNDGIIYRISVVIQNILRHPEVKVQSKVAEWLNSTFQNWNYTVYVVNISFHLSAGEDKIKVKRSLEDEPRLVLWALLVYNATNNTNLEGKIIQQKLLKNNESLDEGLRLHTVNVRQLGHCLAMEEPKGYYWPSIQPSEYVLPCPDKPGFSASRICFYNATNPLVTYWGPVDISNCLKEANEVANQILNLTADGQNLTSANITNIVEQVKRIVNKEENIDITLGSTLMNIFSNILSSSDSDLLESSSEALKTIDELAFKIDLNSTSHVNITTRNLALSVSSLLPGTNAISNFSIGLPSNNESYFQMDFESGQVDPLASVILPPNLLENLSPEDSVLVRRAQFTFFNKTGLFQDVGPQRKTLVSYVMACSIGNITIQNLKDPVQIKIKHTRTQEVHHPICAFWDLNKNKSFGGWNTSGCVAHRDSDASETVCLCNHFTHFGVLMDLPRSASQLDARNTKVLTFISYIGCGISAIFSAATLLTYVAFEKLRRDYPSKILMNLSTALLFLNLLFLLDGWITSFNVDGLCIAVAVLLHFFLLATFTWMGLEAIHMYIALVKVFNTYIRRYILKFCIIGWGLPALVVSVVLASRNNNEVYGKESYGKEKGDEFCWIQDPVIFYVTCAGYFGVMFFLNIAMFIVVMVQICGRNGKRSNRTLREEVLRNLRSVVSLTFLLGMTWGFAFFAWGPLNIPFMYLFSIFNSLQGLFIFIFHCAMKENVQKQWRQHLCCGRFRLADNSDWSKTATNIIKKSSDNLGKSLSSSSIGSNSTYLTSKSKSSSTTYFKRNSHTDNVSYEHSFNKSGSLRQCFHGQVLVKTGPC

SEQ ID NO: 204495 - DNA, 3666 bp, Artificial Sequence
  derived and/or modified sequence
atgatgttcagaagcgacagaatgtggagctgccactggaagtggaagcccagccccctgctgttcctgttcgccctgtacatcatgtgcgtgccccacagcgtgtggggctgcgccaactgcagagtggtgctgagcaaccccagcggcaccttcaccagcccctgctaccccaacgactaccccaacagccaggcctgcatgtggaccctgagagcccccaccggctacatcatccagatcaccttcaacgacttcgacatcgaggaggcccccaactgcatctacgacagcctgagcctggacaacggcgagagccagaccaagttctgcggcgccaccgccaagggcctgagcttcaacagcagcgccaacgagatgcacgtgagcttcagcagcgacttcagcatccagaagaagggcttcaacgccagctacatcagagtggccgtgagcctgagaaaccagaaggtgatcctgccccagaccagcgacgcctaccaggtgagcgtggccaagagcatcagcatccccgagctgagcgccttcaccctgtgcttcgaggccaccaaggtgggccacgaggacagcgactggaccgccttcagctacagcaacgccagcttcacccagctgctgagcttcggcaaggccaagagcggctacttcctgagcatcagcgacagcaagtgcctgctgaacaacgccctgcccgtgaaggagaaggaggacatcttcgccgagagcttcgagcagctgtgcctggtgtggaacaacagcctgggcagcatcggcgtgaacttcaagagaaactacgagaccgtgccctgcgacagcaccatcagcaaggtgatccccggcaacggcaagctgctgctgggcagcaaccagaacgagatcgtgagcctgaagggcgacatctacaacttcagactgtggaacttcaccatgaacgccaagatcctgagcaacctgagctgcaacgtgaagggcaacgtggtggactggcagaacgacttctggaacatccccaacctggccctgaaggccgagagcaacctgagctgcggcagctacctgatccccctgcccgccgccgagctggccagctgcgccgacctgggcaccctgtgccaggccaccgtgaacagccccagcaccaccccccccaccgtgaccaccaacatgcccgtgaccaacagaatcgacaagcagagaaacgacggcatcatctacagaatcagcgtggtgatccagaacatcctgagacaccccgaggtgaaggtgcagagcaaggtggccgagtggctgaacagcaccttccagaactggaactacaccgtgtacgtggtgaacatcagcttccacctgagcgccggcgaggacaagatcaaggtgaagagaagcctggaggacgagcccagactggtgctgtgggccctgctggtgtacaacgccaccaacaacaccaacctggagggcaagatcatccagcagaagctgctgaagaacaacgagagcctggacgagggcctgagactgcacaccgtgaacgtgagacagctgggccactgcctggccatggaggagcccaagggctactactggcccagcatccagcccagcgagtacgtgctgccctgccccgacaagcccggcttcagcgccagcagaatctgcttctacaacgccaccaaccccctggtgacctactggggccccgtggacatcagcaactgcctgaaggaggccaacgaggtggccaaccagatcctgaacctgaccgccgacggccagaacctgaccagcgccaacatcaccaacatcgtggagcaggtgaagagaatcgtgaacaaggaggagaacatcgacatcaccctgggcagcaccctgatgaacatcttcagcaacatcctgagcagcagcgacagcgacctgctggagagcagcagcgaggccctgaagaccatcgacgagctggccttcaagatcgacctgaacagcaccagccacgtgaacatcaccaccagaaacctggccctgagcgtgagcagcctgctgcccggcaccaacgccatcagcaacttcagcatcggcctgcccagcaacaacgagagctacttccagatggacttcgagagcggccaggtggaccccctggccagcgtgatcctgccccccaacctgctggagaacctgagccccgaggacagcgtgctggtgagaagagcccagttcaccttcttcaacaagaccggcctgttccaggacgtgggcccccagagaaagaccctggtgagctacgtgatggcctgcagcatcggcaacatcaccatccagaacctgaaggaccccgtgcagatcaagatcaagcacaccagaacccaggaggtgcaccaccccatctgcgccttctgggacctgaacaagaacaagagcttcggcggctggaacaccagcggctgcgtggcccacagagacagcgacgccagcgagaccgtgtgcctgtgcaaccacttcacccacttcggcgtgctgatggacctgcccagaagcgccagccagctggacgccagaaacaccaaggtgctgaccttcatcagctacatcggctgcggcatcagcgccatcttcagcgccgccaccctgctgacctacgtggccttcgagaagctgagaagagactaccccagcaagatcctgatgaacctgagcaccgccctgctgttcctgaacctgctgttcctgctggacggctggatcaccagcttcaacgtggacggcctgtgcatcgccgtggccgtgctgctgcacttcttcctgctggccaccttcacctggatgggcctggaggccatccacatgtacatcgccctggtgaaggtgttcaacacctacatcagaagatacatcctgaagttctgcatcatcggctggggcctgcccgccctggtggtgagcgtggtgctggccagcagaaacaacaacgaggtgtacggcaaggagagctacggcaaggagaagggcgacgagttctgctggatccaggaccccgtgatcttctacgtgacctgcgccggctacttcggcgtgatgttcttcctgaacatcgccatgttcatcgtggtgatggtgcagatctgcggcagaaacggcaagagaagcaacagaaccctgagagaggaggtgctgagaaacctgagaagcgtggtgagcctgaccttcctgctgggcatgacctggggcttcgccttcttcgcctggggccccctgaacatccccttcatgtacctgttcagcatcttcaacagcctgcagggcctgttcatcttcatcttccactgcgccatgaaggagaacgtgcagaagcagtggagacagcacctgtgctgcggcagattcagactggccgacaacagcgactggagcaagaccgccaccaacatcatcaagaagagcagcgacaacctgggcaagagcctgagcagcagcagcatcggcagcaacagcacctacctgaccagcaagagcaagagcagcagcaccacctacttcaagagaaacagccacaccgacaacgtgagctacgagcacagcttcaacaagagcggcagcctgagacagtgcttccacggccaggtgctggtgaagaccggcccctgctag

SEQ ID NO: 204496 - DNA, 3666 bp, Artificial Sequence
  derived and/or modified sequence
atgatgttcagatcagaccgaatgtggtcttgccattggaagtggaaaccaagtcctctcctgttcctgtttgctttgtatattatgtgtgtaccgcacagtgtgtggggctgcgccaactgtcgtgtcgtgctgagcaatccatccggcacttttacttctccgtgctatcccaacgattaccctaactcacaggcatgcatgtggacgctgagagcccctaccgggtacataatccaaatcacattcaatgacttcgacatcgaagaggctcctaactgcatatacgactctcttagtctcgacaatggcgagtcccagacaaagttttgcggagccaccgccaaagggttgtccttcaatagttcagccaatgagatgcacgtgtcatttagctctgattttagcattcagaaaaaggggttcaatgcctcctatatcagagtcgctgtgtcattgagaaatcagaaggtgattctacctcagactagcgatgcctaccaggtgtctgtggctaaatccatatcaatccctgaactcagtgcgtttactctgtgttttgaggccacaaaggttggacatgaggattccgattggacagctttcagctacagcaatgcctcatttactcagctgctgagtttcgggaaagccaagtctggctacttcctgtccatttccgactccaagtgcctcctgaacaatgccctcccagttaaagagaaggaggatatcttcgccgaaagcttcgaacagctttgcctggtgtggaacaactcactgggctctattggtgtaaactttaagcgaaactatgaaaccgtcccttgtgattccacaatctccaaggtgatcccgggaaacggaaagctgctgctcggatccaatcagaacgagatagtgagcctgaaaggagatatctacaatttcaggctgtggaactttactatgaatgccaagatcttaagtaatcttagttgcaatgtgaaagggaatgtcgtggattggcaaaatgacttttggaacatcccaaacctggcccttaaagccgaatcaaacctgtcctgtggcagttacctcatccctctgccagccgcagagcttgcttcttgcgcggacctcggcactttgtgtcaagcgacagtgaattccccttcgaccaccccgcccacagtcacgacaaatatgccagtaacgaaccgaattgacaagcagaggaatgatggcatcatatacagaatttctgtcgtaatccagaatattttacgccatcccgaggtcaaggtccagagcaaagtggctgaatggctgaattccaccttccaaaattggaactataccgtctatgtggtgaacatctcttttcatctctctgccggggaggataagatcaaggtcaagagaagcttggaggatgagcctcgcctcgtgctctgggctttactcgtctataacgcaactaataacacaaatctggaaggaaagatcatccagcaaaaattgcttaagaataacgagtcactggatgaggggctgcgcctgcacaccgtgaacgtgcgtcagcttggacattgccttgccatggaggagcctaaaggttactattggcccagcatacaaccttctgagtatgtgctcccgtgtcctgataaaccaggtttctcagcaagccggatatgcttttacaacgccactaatcctcttgtcacgtattggggtccagtggatatatccaattgtctcaaagaggcaaatgaagtggccaaccaaatcctgaacctgaccgctgatggacagaatctgactagcgcaaacattactaacattgtggagcaagttaagcggatcgtcaataaagaagaaaacatcgacataactctgggatccactctcatgaacattttttctaacatactctcatcatctgatagcgatttattagagtcttcaagtgaggctcttaagactatcgacgaactggctttcaaaattgacctgaatagcacctcccacgtaaacattactactaggaaccttgctctgtcagtgtccagtctgctccccgggaccaacgcaatctccaacttctccataggcctgccttcaaacaatgagagctattttcaaatggacttcgagagcgggcaggtcgacccattagctagcgtgatcctacccccgaacctgcttgaaaacctgagccctgaggactccgtgctggtgcgccgcgcccagtttacttttttcaacaagaccggtctgtttcaggacgtcgggcctcaaaggaagacgctcgtctcatatgtgatggcctgctcaattggcaacataaccatccagaaccttaaggaccccgtgcaaattaagattaaacatactaggactcaggaagtccaccaccctatctgcgccttttgggacctgaacaagaataaatcgtttgggggatggaatacctctggctgcgtggcccacagggacagcgatgccagcgagacggtgtgcctgtgcaatcatttcactcattttggcgtgcttatggaccttccaaggtcagcctcccagcttgacgctcgtaataccaaagtcctcacgtttatcagctacatcggttgtggcatttccgcaatctttagcgctgcaacactgttgacctatgtggcctttgaaaagctgcgccgggactatccaagtaagattcttatgaacctctccaccgcactgctgttcctgaatctgctgttcctcttggacggctggatcacaagttttaacgtggacggcttgtgtatcgcagtagccgtgctgctgcacttcttcttgctggccacctttacctggatgggccttgaagctattcatatgtatatagctcttgtaaaagtctttaatacctacatccggcgatatatcctaaaattctgtattatcggctggggccttccagccctggtggtatctgttgtcctcgctagccggaataacaacgaggtctacggaaaagagtcttacggcaaggaaaagggcgatgaattctgttggattcaggacccagtcattttttacgtcacgtgcgccggctacttcggcgtcatgttctttctcaatatagccatgtttattgtcgttatggtgcaaatctgcgggaggaacggcaagcgatcaaacaggactctcagagaagaagtcttgcggaacctgcgtagcgtggtttcactaacattcctcctgggcatgacttggggattcgctttcttcgcatggggacccctcaacataccatttatgtacctgttcagcattttcaattcactccaaggcttatttatttttatcttccattgtgctatgaaagagaacgtgcagaaacagtggcggcagcacctgtgttgcgggaggtttcgcctggccgataacagtgactggtcgaagaccgcaaccaacattataaagaaatccagtgacaacctcgggaaatctctaagcagctccagcattgggtcaaattcgacctacttgacatctaagtctaagagttctagcacaacgtatttcaagaggaatagtcataccgacaatgtgagctatgagcacagcttcaacaaatccggcagcctacgacaatgctttcacggccaggtgctcgtgaagacgggcccctgttag

SEQ ID NO: 204497 - DNA, 3666 bp, Artificial Sequence
  derived and/or modified sequence
atgatgttcagaagtgacaggatgtggagctgccactggaagtggaagcccagccccctgctcttcctgtttgccctgtacatcatgtgtgtgccccacagcgtgtggggctgtgccaactgccgggtggtgctgagcaaccccagcggcaccttcaccagcccctgctacccaaatgactaccccaacagccaggcctgcatgtggaccctgcgggcccccaccggctacatcatccagatcaccttcaatgactttgacatcgaggaggcccccaactgcatctatgacagcctgagcctggacaatggagagagccagaccaagttctgtggggccacagccaagggcctgtccttcaacagcagcgccaatgagatgcacgtgtccttcagcagtgacttcagcatccagaagaagggcttcaatgccagctacatccgggtggccgtgtccctgaggaaccagaaggtgatcctgccccagaccagtgatgcctaccaggtgtctgtggccaagagcatcagcatccctgagctgagcgccttcaccctgtgctttgaggccaccaaggtgggccatgaagattctgactggacagccttctcctacagcaatgccagcttcacccagctgctgagctttgggaaggccaagagcggctacttcctgagcatcagtgacagcaagtgcctgctgaacaatgccctgcctgtgaaggagaaggaggacatctttgctgagagctttgagcagctgtgcctggtgtggaacaacagcctgggcagcattggagtgaacttcaagaggaactatgagaccgtgccctgtgacagcaccatcagcaaggtgattcctggaaatggcaagctgctgctgggcagcaaccagaatgagatcgtgtccctgaagggggacatctacaacttccggctgtggaacttcaccatgaatgccaagatcctgagcaacctgagctgcaatgtgaagggaaatgtggtggactggcagaatgacttctggaacatccccaacctggccctgaaggccgagagcaacctgagctgtggcagctacctgatccccctgcctgctgctgagctggccagctgtgccgacctgggcaccctgtgccaggccaccgtgaacagccccagcaccaccccacccaccgtgaccaccaacatgcctgtgaccaacagaattgacaagcagagaaatgatggcatcatctaccgcatctctgtggtgatccagaacatcctgcggcaccctgaggtgaaggtgcagagcaaggtggccgagtggctgaacagcaccttccagaactggaactacacagtgtatgtggtgaacatctccttccacctgtctgctggggaggacaagatcaaggtgaagaggagcctggaggatgagccccggctggtgctgtgggccctgctggtgtacaatgccaccaacaacaccaacctggagggcaagatcatccagcagaagctgctgaagaacaatgaaagcctggatgagggcctgcggctgcacacagtgaatgtgcggcagctgggccactgcctggccatggaggagcccaagggctactactggcccagcatccagcccagtgaatatgtgctgccctgcccagacaagccaggcttcagcgccagccgcatctgcttctacaatgccaccaaccccctggtgacctactggggccctgtggacatcagcaactgcctgaaggaggccaatgaggtggccaaccagatcctgaacctgacagcagatggccagaacctgaccagcgccaacatcaccaacatcgtggagcaggtgaagagaattgtgaacaaggaggagaacatcgacatcaccctgggcagcaccctgatgaacatcttcagcaacatcctgagcagcagtgacagcgacctgctggagagcagcagcgaggccctgaagaccattgatgagctggccttcaagattgacctgaacagcaccagccacgtgaacatcaccaccaggaacctggccctgtctgtgagcagcctgctgcccggcaccaatgccatcagcaacttcagcatcggcctgcccagcaacaatgaaagctacttccagatggactttgagagcggccaggtggaccccctggccagcgtcatcctgccccccaacctgctggagaacctgagccctgaggacagcgtgctggtgcggcgggcccagttcaccttcttcaacaagacaggcctcttccaggatgtgggcccccagaggaagaccctggtgtcctatgtgatggcctgcagcatcggcaacatcaccatccagaacctgaaggaccctgtgcagatcaagatcaagcacaccaggacccaggaggtgcaccaccccatctgtgccttctgggacctgaacaagaacaagagctttggaggctggaacaccagcggctgtgtggcccaccgggacagtgatgccagcgagaccgtgtgcctgtgcaaccacttcacccactttggagtgctgatggacctgcccaggtctgccagccagctggatgccaggaacaccaaggtgctgaccttcatctcctacatcggctgcggcatcagcgccatcttctctgctgccaccctgctgacctacgtggcctttgagaagctgcggcgggactaccccagcaagatcctgatgaacctgagcacagccctgctcttcctgaacctgctcttcctgctggatggctggatcaccagcttcaacgtggatggcctgtgcatcgctgtggccgtgctgctgcacttcttcctgctggccaccttcacctggatgggcctggaggccatccacatgtacatcgccctggtgaaggtgttcaacacctacatccgccgctacatcctgaagttctgcatcatcggctggggcctgcctgccctggtggtgtctgtggtgctggccagcaggaacaacaatgaggtgtatggcaaggagagctatggcaaggagaagggagatgagttctgctggatccaggaccccgtcatcttctacgtgacctgtgccggctactttggagtgatgttcttcctgaacatcgccatgtttattgtggtgatggtgcagatctgtggcagaaatggcaagaggagcaacagaaccctgcgggaggaggtgctgaggaacctgcggtctgtggtgtccctgaccttcctgctgggcatgacctggggctttgccttctttgcctggggccccctgaacatccccttcatgtacctgttcagcatcttcaacagcctgcagggcctcttcatcttcatcttccactgtgccatgaaggaaaatgtgcagaagcagtggaggcagcacctgtgctgcggccgcttccggctggccgacaacagcgactggagcaagacagccaccaacatcatcaagaagagcagtgacaacctgggcaagagcctgagcagcagcagcatcggcagcaacagcacctacctgaccagcaagagcaagagcagcagcaccacctacttcaagaggaacagccacacagacaacgtgtcctatgagcacagcttcaacaagagcggcagcctgcggcagtgcttccacggccaggtgctggtgaagacaggcccctgctag

SEQ ID NO: 204498 - DNA, 3666 bp, Artificial Sequence
  derived and/or modified sequence
atgatgttccggagcgaccggatgtggagctgccactggaagtggaaaccttctcccttattgtttctctttgctttgtacattatgtgtgttccgcactcagtttggggctgtgcaaattgccgtgtcgtcctgagtaatccctccggcacattcacctcgccatgttatcctaatgactatcctaactctcaggcttgcatgtggacgctgcgggcccctacaggctatatcatccaaatcacctttaatgacttcgatatcgaggaagccccaaactgtatttacgacagtctgagtctggataacggagagtctcagactaagttttgtggcgcaactgcgaaagggctgtctttcaattccagcgccaacgagatgcacgttagtttttcgtcagacttcagtatacagaaaaagggcttcaatgcgtcgtacattcgggtggccgtgagcctccgcaaccaaaaggtgatcctgccccagacatcagatgcttaccaagtgtcagtggcgaaaagcatctccattcctgagttatccgcgtttaccctgtgtttcgaagccacaaaggttggtcacgaggattccgactggaccgccttctcatattccaacgccagcttcacccagctgttgagttttggtaaggccaaaagcgggtactttctctctatatcagattccaaatgtctactcaacaacgctctgccggtcaaggaaaaagaggacatctttgcggaaagcttcgagcagctgtgtctcgtgtggaacaactctcttggctccatcggtgtgaattttaagagaaattacgagacagtgccctgcgattcaaccatctccaaagtaatacccggtaacggcaaactgctgctcggctctaaccagaatgagatcgtctccctgaaaggcgacatttacaatttccgcctgtggaacttcaccatgaacgccaaaattctcagtaatttaagctgcaacgtcaagggaaatgtcgtggattggcaaaatgacttctggaacatcccgaacttggctctcaaagcagaaagcaatctgtcatgtggcagctacctcatcccgctgcccgccgctgagctggctagttgcgctgatcttggaaccttatgtcaggctactgttaactcccccagcacgactcccccaactgtcacgaccaacatgccggtaacaaaccgaattgacaaacagcgcaacgatgggattatttacagaatcagcgtggtgattcagaatatattgcggcatcccgaggtaaaggtgcagtccaaggtcgctgagtggctgaactcaacttttcaaaattggaattatacagtgtatgttgtcaacatttcctttcatctctccgctggcgaggataaaataaaggtaaagcggtctctcgaggacgagccacgtctggtactttgggcattactggtgtataacgctacaaataacacaaatctggaagggaagatcattcagcagaagttgctcaagaataacgagagtttggatgaaggattgaggctgcacaccgtgaatgtgaggcagctagggcactgtctggccatggaggaacctaaaggatattattggccatcgattcagccttccgagtatgtgctgccatgcccagataagcctggcttctctgctagtagaatttgtttttataacgcgaccaaccctctggtcacctactggggccctgtggacattagcaactgcctgaaggaggccaacgaagtagccaatcagatcctgaacctcactgctgacgggcagaacctgacatcagccaacataacgaatattgtcgagcaggtcaagagaattgtcaataaggaggaaaatatcgacatcactctgggcagtactttgatgaatatcttttcgaacatcctgagctccagtgactccgatttgcttgaatcctcttctgaggccctcaagaccattgatgagctggcattcaagatagacctgaactcaacaagccatgtcaatattacaacaaggaatctggcgttgtcagtgtcgtccttgctccctgggaccaatgcaatttccaacttttctataggactgccttctaacaacgagagctacttccaaatggattttgagtccggacaagttgatcctctcgcaagtgtgattctgccaccaaatctgctggagaatcttagcccagaagactctgtgctggtgagacgggcacagtttacattttttaataaaacaggtttgtttcaggacgtaggtccccagcggaagacacttgtaagctatgtcatggcatgttctattgggaacatcaccatccaaaaccttaaggacccggtgcagatcaagataaaacatacaagaacacaagaggttcaccatcctatatgcgccttttgggatctgaataagaacaagtctttcggaggatggaataccagcggctgcgttgctcaccgagacagcgacgcatccgagacagtgtgcctgtgcaaccacttcactcacttcggtgtattaatggatctgcctagatctgcaagccagttggacgctcgcaacacaaaggtgctgacatttataagctacataggatgtggcatctcagcaattttctctgctgccaccctgcttacttacgtagctttcgagaagctcaggagggattatccctctaaaatccttatgaacctttctaccgccctgcttttcctgaatcttcttttcttgctcgacggttggatcactagctttaacgtagacggtttatgtatcgccgtcgctgttcttctgcacttctttctattggcaactttcacttggatgggcctagaagcaatccacatgtatatcgcactggtaaaagtgttcaacacttacatccgcaggtatatcttaaaattttgtattatcgggtgggggttacccgccttggtggtatctgtggtgcttgccagccgaaataataatgaagtgtacggcaaagagagctacggtaaggagaaaggcgacgagttctgctggatacaggatcccgtgatcttctatgtaacgtgcgctggatacttcggagtaatgttctttctaaacatcgctatgttcatagtagtgatggtgcagatctgcggcagaaacgggaaaagaagcaatcggacgctgcgcgaagaggtgctgcggaacctccgcagcgttgtaagtcttactttcctgcttggcatgacttggggattcgcttttttcgcctggggtcccctcaatatccctttcatgtacctgttttccatcttcaatagtctccaaggactcttcatttttatatttcactgcgctatgaaggagaatgtgcaaaaacaatggaggcagcacctttgctgtggacgctttcgcctggcagacaattccgattggtctaaaaccgctaccaacatcataaagaagtcaagcgataacctcggaaagtccctttcatcttcttctattgggtcaaattccacatatttgacatcaaagtctaagagcagttctacgacctacttcaagcggaacagtcacaccgacaacgtttcatacgagcatagttttaacaagagtggcagtctgcggcagtgctttcacgggcaggtccttgtcaagacaggaccttgctag

SEQ ID NO: 204499 - DNA, 3666 bp, Artificial Sequence
  derived and/or modified sequence
atgatgtttaggtcagaccgcatgtggagttgccactggaagtggaaaccatccccacttctgttccttttcgccttgtacatcatgtgcgttccccatagtgtgtggggatgcgccaactgtagagtggtgctcagtaatccgtccggaacgtttacatcaccgtgctacccaaatgactatcctaactcccaggcatgtatgtggactctgcgagcacccacagggtacattatccagataacattcaacgacttcgatatcgaagaggccccaaactgtatctacgacagcctgtccctggacaacggcgagagtcagaccaagttctgcggagccacagcaaagggcctcagcttcaacagttcagccaatgaaatgcacgtttccttctcctctgacttcagcatccagaagaaaggattcaacgcaagttacatccgtgtggctgtgtcattgcgaaatcagaaggtgatcctgccccagaccagtgacgcataccaggtttcagtggcaaagtcaatctctattccggagttgtctgccttcacactgtgctttgaagccacaaaagtgggccatgaagatagcgattggacggcctttagctatagcaacgcaagctttacacagctgttgtcatttggcaaggcgaagtccgggtactttctgtctatcagcgattctaagtgtctgttgaacaacgctctcccggtgaaggaaaaggaagacatttttgcggaatcattcgagcaattatgtttagtgtggaataatagtttaggttctattggcgttaatttcaagcggaactacgagacagtgccctgcgactcaactatttctaaagtgatccctggcaacgggaaactacttctggggtcgaaccagaatgaaatcgtgtctctgaagggagatatatataattttcggctttggaatttcaccatgaatgccaagatactatcgaacctgtcttgcaatgtaaaaggcaacgtggtggattggcagaacgatttctggaatatccctaacctcgcactgaaagccgaatctaacctgagctgcgggagttacctgatccccctgcctgcagctgagctcgcatcttgtgctgacctgggcactctgtgtcaggccaccgtcaactcacctagcacgaccccgccaactgtcacaacaaacatgcccgtcacaaaccgtattgacaagcagagaaacgatggcataatttaccgcatctcagttgttattcagaacatactaagacaccccgaagtgaaagtccagagcaaagtagccgagtggctgaattcaacatttcagaactggaattatacagtgtatgtggtgaacatatcatttcacctgtccgcaggggaggacaagattaaggtgaaacgatcactcgaggatgaaccacggctggtgctgtgggccctcctggtctataacgctacgaacaataccaacctggaaggaaagataatacagcagaaactgctgaagaataatgaatcactggatgaggggctccggttgcacactgtgaacgtgcgacagctgggtcactgcttagccatggaggaaccgaagggatattactggccatctatacagccctctgagtacgttctaccttgtcctgacaagccagggtttagtgccagcagaatatgcttctacaacgcaacaaaccctctcgtgacttactggggccctgtcgatattagcaattgcctcaaggaggcaaacgaagtggcaaaccagatactgaatctgaccgcggatggacagaacctgacatccgccaatataacaaacattgtggagcaagtgaagcgtatcgtgaacaaggaagagaatatagacattactctaggatccaccctgatgaacatcttttctaatatcttatcctcctccgattccgatctcctagagagttcctccgaggctctgaagaccatagatgaactggcgttcaaaatcgatctaaatagcaccagccacgtgaatatcacaacacgaaacctcgctctgtcagtttcctctctgctccccggaactaatgctattagcaactttagcattggtttaccgtcaaataacgagagctacttccagatggacttcgagtctggccaggtcgatccactggccagtgtcatcctccccccaaatttattggagaatctctcacctgaggacagcgtcctggtgcgtcgcgcacagtttacgttcttcaacaaaactggcctgttccaggatgttggaccacagcgcaagacactcgttagctacgtgatggcgtgctcaattggcaacatcacaatccaaaatctgaaagatcctgtgcaaatcaagatcaaacataccagaacccaggaagttcatcatcccatttgtgcattttgggacctaaacaaaaacaaaagttttggtggatggaataccagcggatgcgtggcccaccgggattcggacgcatcagagacggtatgcctgtgcaatcacttcactcactttggagtcctgatggaccttcccagatcagcctctcaactggacgccagaaatacgaaggtcctcacctttataagctatatcggatgtggcatcagtgccatcttttctgccgcaacactgctgacctatgtggcgtttgagaagctgcgcagggattatcccagcaaaattttaatgaatctgtctactgccttactgtttctgaacttgctgttccttcttgatggctggattactagctttaacgtggatggcctttgcatcgccgtggccgtgctccttcactttttcctgttggccacatttacgtggatgggcctcgaagcaattcatatgtacattgccttggtgaaagtttttaacacttatattcggaggtacatcctcaaattctgtataataggatggggcttacctgcattggtggtgtcagtggtcttggcctcccggaacaacaacgaggtgtacgggaaggaatcatatgggaaggagaaaggagacgaattttgctggatccaggatcctgtgattttctacgtgacgtgtgcaggatactttggagttatgttttttttgaacatagccatgttcatcgtggtgatggtacaaatttgtggacgcaatgggaaacggagtaacagaacccttcgagaagaggtgctgcgaaacctgcgctctgtggtgtcactgacgttcctgctagggatgacgtggggctttgccttctttgcctgggggcctctgaacataccttttatgtatctcttctccatctttaactcactccagggcctcttcatctttatcttccattgcgctatgaaggaaaatgtccagaagcagtggcggcaacatctgtgctgcggaaggtttaggctcgcggataattccgactggagcaaaactgccaccaatattattaagaagtcctccgacaatctgggcaagtctctttcttcctcttcaatcggttctaactcaacatatcttacgtctaagtctaaatcgtcttcaactacatatttcaagcggaacagtcatactgataatgtgagttacgagcactctttcaacaaatccggttccttacgacagtgcttccatggacaggtcttagtgaaaacagggccttgctag

SEQ ID NO: 204500 - DNA, 7026 bp, Artificial Sequence
  derived and/or modified sequence
ccagctccagtcacgccggaagcgcgggcggagcgcacgggtccggggagagtcgcctgcgcccgcgagggggacccaagtacctagggtggtggccgagtcccgcctcccgccagcgggggcgaggacctgcgacgcgcacccctgcctggcccggtctcctcagcaccagccccacgcacaccctacttcctcagcttctcgccctcaccctgccaacttccctgcgaggagggacctgccgccagcctgcttcctcgtccgcaggccctgcgctgaacgctgccgcgcccagggttcaccttgcgccgtcgggaaagcccatgaactctccagaaacggcgtaaaggagggtcccgccgcggcgcagggctggggcgcctgggttccccctgggtggagcagcggcagcagagcgggaaagtggtggaggatgatcttgcggccaaaggggacctcggcgcagtaatgtcaacatgatgtttcgctcagatcgaatgtggagctgccattggaaatggaagcccagtcctctcctgttcttatttgctttatatatcatgtgtgttcctcactcagtgtggggatgtgccaactgccgagtggttttgtccaacccttctgggacctttacttctccatgctaccctaacgactacccaaacagccaggcttgcatgtggacgctccgagcccccaccggttatatcattcagataacatttaacgactttgacattgaagaagctcccaattgcatttatgactcattatcccttgataatggagagagccagactaaattttgtggagcaactgccaaaggcctatcatttaactcaagtgcgaatgagatgcatgtgtccttttcaagtgactttagcatccagaagaaaggtttcaatgccagctacatcagagttgccgtgtccttaaggaatcaaaaggtcattttaccccagacatcagatgcttaccaggtatctgttgcaaaaagcatctctattccagagctcagtgctttcacactctgctttgaagcaaccaaagttggccatgaagacagtgattggacagctttctcctactcaaatgcatccttcacacaattgctcagttttggaaaggccaagagtggctactttctatccatttctgattcaaaatgtttgttgaataatgcattacctgtcaaagaaaaagaagacatttttgcagaaagctttgaacagctctgccttgtttggaataattctttgggctctattggtgtaaatttcaaaagaaactatgaaacagttccatgtgattctaccattagtaaagttattcctgggaatgggaaattgttgttgggctccaatcaaaatgaaattgtctctctaaaaggggacatttataactttcgactttggaattttaccatgaatgccaaaatcctctccaacctcagctgtaatgtgaaagggaatgtagtcgactggcaaaatgacttctggaatatcccaaacctagctctgaaagctgaaagcaacctaagctgtggttcctacctgatcccgctcccagcagcagaactggccagctgtgcagacctggggaccctctgtcaagctactgtaaactctcctagtactacaccacccactgtcaccactaacatgcctgttactaacagaatcgataaacaaaggaatgatggaattatctatagaatatccgtagtgattcagaacatccttcgtcaccctgaggtaaaagtacagagcaaggtggcagaatggctcaattcaaccttccaaaattggaactacacggtttatgtcgttaatatcagttttcacctgagtgctggagaggacaagattaaagtcaagagaagccttgaggatgagccaaggttggtgctttgggcccttctagtttacaatgctaccaacaatactaatttggaaggaaaaatcattcagcagaagctcctaaaaaataatgagtccttggatgaaggcttgaggctacatacagtgaatgtgagacaactgggtcattgtcttgccatggaggaacccaaaggctactactggccatctatccaaccttctgaatacgttcttccttgtccagacaagcctggcttttctgcttctcggatatgtttttacaatgctaccaacccattggtaacctactggggacctgttgatatctccaactgtttaaaagaagcaaatgaagttgctaaccagattttaaatttaactgctgatgggcagaacttaacctcagccaatattaccaacattgtggaacaggtcaaaagaattgtgaataaagaagaaaacattgatataacacttggctcaactctaatgaatatattttctaatatcttaagcagttcagacagtgacttgcttgagtcatcttctgaagctttaaaaacaattgatgaattggccttcaagatagacctaaatagcacatcacatgtgaatattacaactcggaacttggctctcagcgtatcatccctgttaccagggacaaatgcaatttcaaattttagcattggtcttccaagcaataatgaatcgtatttccagatggattttgagagtggacaagtggatccactggcatctgtaattttgcctccaaacttacttgagaatttaagtccagaagattctgtattagttagaagagcacagtttactttcttcaacaaaactggacttttccaggatgtaggaccccaaagaaaaactttagtgagttatgtgatggcgtgcagtattggaaacattactatccagaatctgaaggatcctgttcaaataaaaatcaaacatacaagaactcaggaagtgcatcatcccatctgtgccttctgggatctgaacaaaaacaaaagttttggaggatggaacacgtcaggatgtgttgcacacagagattcagatgcaagtgagacagtctgcctgtgtaaccacttcacacactttggagttctgatggaccttccaagaagtgcctcacagttagatgcaagaaacactaaagtcctcactttcatcagctatattgggtgtggaatatctgctattttttcagcagcaactctcctgacatatgttgcttttgagaaattgcgaagggattatccctccaaaatcttgatgaacctgagcacagccctgctgttcctgaatctcctcttcctcctagatggctggatcacctccttcaatgtggatggactttgcattgctgttgcagtcctgttgcatttcttccttctggcaacctttacctggatggggctagaagcaattcacatgtacattgctctagttaaagtatttaacacttacattcgccgatacattctaaaattctgcatcattggctggggtttgcctgccttagtggtgtcagttgttctagcgagcagaaacaacaatgaagtctatggaaaagaaagttatgggaaagaaaaaggtgatgaattctgttggattcaagatccagtcatattttatgtgacctgtgctgggtattttggagtcatgttttttctgaacattgccatgttcattgtggtaatggtgcagatctgtgggaggaatggcaagagaagcaaccggaccctgagagaagaagtgttaaggaacctgcgcagtgtggttagcttgacctttctgttgggcatgacatggggttttgcattctttgcctggggacccttaaatatccccttcatgtacctcttctccatcttcaattcattacaaggcttatttatattcatcttccactgtgctatgaaggagaatgttcagaaacagtggcggcagcatctctgctgtggtagatttcggttagcagataactcagattggagtaagacagctaccaatatcatcaagaaaagttctgataatctaggaaaatctttgtcttcaagctccattggttccaactcaacctatcttacatccaaatctaaatccagctctaccacctatttcaaaaggaatagccacacagataatgtctcctatgagcattccttcaacaaaagtggatcactcagacagtgcttccatggacaagtccttgtcaaaactggcccatgctgatggagatcaaacatcaatcatccctgtccatcaggtcattgataaggtcaagggttattgcaatgctcattcagacaacttctataaaaatattatcatgtcagacaccttcagccacagcacaaagttttaatgtctttaagaaaaagaaatcaatctgcagaaatgtgaagatttgcaagcagtgtaaactgcaactagtgatgtaaatgtgctattacctaggtaactgcatatatataaggaatgtattttgttaagaaggcttttgtgaaattcagaatttttctttttaatatatttcttccatggaagagttgtcatcactaaaacttcagtactgagagtaacatgactcagtagccacagaagctatgatttgtaaaatatataattgaatcagagtaatcataatgcaggggagacattcaaattagagacaagggagaagcaatgctgaggaagaccctagatagagctcattttactccacctaatcgttatatctggatatacccattttctgcatcttctttctcaacaataaaaaatgtaactattttgaatgcccacaaatcccattccagtgttactttctgtgaatgcagtaccatattctcattttcaatgacatttcaaccacaggcagaaaagactgtttactccttgacccaaagattaaaaaggattttttattattttaaatattacaccttcagaaccataacatgcttaagaaaactttcccaaaatgttgacctagttaaatgaggctatataaatttctaatattttacttattctattcaaggcatagggccaaagcattaagtataatttaatcccatacattcgagttaagtttagtgttgatgttccatcattctggacctcccaggagttgtttaagaatgaatctcttacacctctacttttgcccctctactgtatattaagcccataggcttgtgggaggaaggagaatttccattaggcaagctgtatgcagtggaattttccttttaggagacacacaattaagactctctggttctgtccttgctttggagactttaagacatttcctaaagcacaaataaaagcctcgtatttccccattgagagttttgttccaaggaatatgaagtgagacatatgggtgagtcataataatcaaaataatttatgaagagctgggtctgcaatagctagtctaaaaactacttgtgtgtcagtcctctggttatagtatataagagcctgaggaggtctggcaagatagatggtgtattatttatggatcaggctgctgcatacaaaccttgcatactattatgcagcttacctaactctcagactattctgagtaatgcttgcttgctaatgaatgtataggagaccacattgtaattgttcttagatgatggagtccatgcagtttcttagaaatcggtctcagtgcatgctgtgctttttcacatttgctctgggttatctgggaagtatcaggttctgggaggcaacagcattaagtgataagaaaaggagacattctggcaaagccaatctgcttaaaggcaaagtccagaacctggaacctagaggcctttctctctgcacgaaaaacaggtagtttgcagtctgagatatgggagagcttttaggctacacagcaacccaagggacctctcaccttttgctgagcttcaatcaggaagctatttgcctggctccagcagatgatgagataatgaggtagtgggttttttattactgttccattttgcaacatcctgcaacaccatcctgggagacaagagcattacccagcttggctttcacgggggagggttgtattcagtaaaaaagaatagtaaatataaggtcactgagattctaagtaagatagtaaatctaaggtcactgagccaaatccttttcaataggcatatattaacaggctgcttattttggcggaggttacatatggatgaaaatgaatcttagtcactgaatattcatatacatttcccccaaaaccttagacattcatagtagattttaattagttagctttctaactagtcagatttctgcccaaagtgcttagtcaatagtaattaagatatagcttcaaaaatggctttgcttttgatttctactcatattcgtatggctccagaaaaatatttttttcatatttgacaatgtcagctccactttagaaattttcaataaccagatgagaaaaaaattaagaaattgctcaagggaaacatttgtaaatggatttgaaagattgagccaaattctgttgtcagttctaagcatgcagttctcacctccatttagtcccccatcagaacagaggtcaggaatttagctggggagcctaaatttagttcagcttacctttgagaatagcatcaattcagactctcttttcattatgttttcttttctttttccctctttttaaactacattgtgttagagtcatagtctaggatcctgagagattttccattcttgtcaccattcacttgcattgtaaagattttctttgtctgttgttggcatagattcttttgtacatatttatttatttgtgtttatatatgtcaattggtttcctttcttagcttgatattgcctagctttgttgttttaattaactttctattagagagactgtatatattttttctaaatactttgtgaaatcatttttggtagcaatatctttgaatatgatgaataaaagtgactgtgagtgcaaatagaattagcagtaagaagctactctagctaatttgccattttacttaaatggaaaatgtttttcaaataaatacttatgttgttcatgttccaagttattcaa

SEQ ID NO: 204501 - protein, 196 aa, Artificial Sequence
  derived and/or modified sequence
MATSVLCCLRCCRDGGTGHIPLKEMPAVQLDTQHMGTDVVIVKNGRRICGTGGCLASAPLHQNKSYFEFKIQSTGIWGIGVATQKVNLNQIPLGRDMHSLVMRNDGALYHNNEEKNRLPANSLPQEGDVVGITYDHVELNVYLNGKNMHCPASGIRGTVYPVVYVDDSAILDCQFSEFYHTPPPGFEKILFEQQIF

SEQ ID NO: 204502 - DNA, 591 bp, Artificial Sequence
  derived and/or modified sequence
atggccaccagcgtgctgtgctgcctgagatgctgcagagacggcggcaccggccacatccccctgaaggagatgcccgccgtgcagctggacacccagcacatgggcaccgacgtggtgatcgtgaagaacggcagaagaatctgcggcaccggcggctgcctggccagcgcccccctgcaccagaacaagagctacttcgagttcaagatccagagcaccggcatctggggcatcggcgtggccacccagaaggtgaacctgaaccagatccccctgggcagagacatgcacagcctggtgatgagaaacgacggcgccctgtaccacaacaacgaggagaagaacagactgcccgccaacagcctgccccaggagggcgacgtggtgggcatcacctacgaccacgtggagctgaacgtgtacctgaacggcaagaacatgcactgccccgccagcggcatcagaggcaccgtgtaccccgtggtgtacgtggacgacagcgccatcctggactgccagttcagcgagttctaccacacccccccccccggcttcgagaagatcctgttcgagcagcagatcttctag

SEQ ID NO: 204503 - DNA, 591 bp, Artificial Sequence
  derived and/or modified sequence
atggccacttctgtgctgtgttgcttgaggtgttgtcgagacgggggaacaggccacattcctttgaaagagatgcccgcagtgcagttagacacacaacacatgggcactgacgtggtaatcgtgaaaaacgggcggcgtatctgcggaaccgggggttgtttggcaagcgcccccctccaccagaacaaatcttattttgaattcaaaatccaatctactggtatctggggaataggggtggccacgcagaaggtgaatctgaatcagatacccctgggccgggacatgcattcactggtgatgcggaacgatggtgccttgtaccacaataacgaagagaaaaacaggctgcccgcaaattcactgccccaggaaggagacgtggtgggtattacatacgaccatgtcgagttaaatgtctacctgaatggaaagaacatgcactgtcccgcctccggcatccgaggaaccgtctacccggtcgtgtacgtggatgactctgcaattttggattgccagttctctgagttttatcacacaccaccaccgggatttgagaagattctctttgagcagcaaattttctag

SEQ ID NO: 204504 - DNA, 591 bp, Artificial Sequence
  derived and/or modified sequence
atggccacctctgtgctgtgctgcctgcgctgctgcagagatggcggcaccggccacatccccctgaaggagatgcctgctgtgcagctggacacccagcacatgggcacagatgtggtgattgtgaagaatggccgccgcatctgtggcactggaggctgcctggccagcgcccccctgcaccagaacaagagctactttgagttcaagatccagagcacaggcatctggggcattggagtggccacccagaaggtgaacctgaaccagatccccctgggccgggacatgcacagcctggtgatgagaaatgatggagccctgtaccacaacaatgaggagaagaaccggctgcctgccaacagcctgccccaggagggagatgtggtgggcatcacctatgaccacgtggagctgaatgtgtacctgaatggcaagaacatgcactgcccagccagcggcatccggggcaccgtgtaccctgtggtgtatgtggatgacagcgccatcctggactgccagttcagcgagttctaccacaccccacctcctggctttgagaagatcctgtttgagcagcagatcttctag

SEQ ID NO: 204505 - DNA, 591 bp, Artificial Sequence
  derived and/or modified sequence
atggccaccagcgtgctgtgctgcctgcggtgctgccgggacggcggaaccggacatattccacttaaagagatgccagccgtacagctggatacacaacacatgggaacagacgttgtgatcgtgaaaaacggaaggcgaatctgtggcacgggcggctgtctggcctccgcaccactgcatcaaaacaaatcctattttgagttcaagattcagagcactggcatttggggaatcggggttgcgactcagaaggtgaacctcaaccagatccctctgggtagggacatgcactctttggtgatgcggaacgatggagctctctaccataataacgaggagaagaatagactgccagcgaactcgcttcctcaagaaggcgacgtggtgggcatcacctacgatcacgtcgagttgaatgtttatctgaacgggaagaatatgcactgccctgcctccggaatccggggaaccgtttatccagtagtttatgtagatgattccgccattttggattgtcaattttcagagttctatcacacccctccccccggattcgaaaagatcctgttcgagcagcaaatcttctag

SEQ ID NO: 204506 - DNA, 591 bp, Artificial Sequence
  derived and/or modified sequence
atggccacaagcgtgctgtgctgtcttcggtgctgtagggacggcggaacaggacatatacctctgaaggagatgcctgcagtacagctcgacacccagcacatgggaaccgatgtggtaatcgtaaagaacgggaggcgaatctgtgggacaggagggtgtctggcgtcagcacccctccaccagaataaatcctactttgaattcaagatccaatccacaggaatttgggggatcggcgtcgccacacagaaggtaaatctgaatcagatccctctgggacgtgacatgcactctctggtgatgcgtaacgacggggctctgtaccacaataatgaagaaaagaatagactccccgctaacagcctgcctcaggagggcgacgtggtcggaataacgtatgaccacgttgagctgaacgtttacctaaatggcaaaaacatgcattgccccgcatccggaatccggggtacggtatacccggtggtgtacgtggacgatagcgccatcttggattgtcagtttagcgagttttatcatactccgccacccggattcgagaaaatactgtttgagcagcagatcttttag

SEQ ID NO: 204507 - DNA, 3053 bp, Artificial Sequence
  derived and/or modified sequence
atagacaagtccggacctcgggcgggggcaggagacggagctgagcggcggggggcagtgtcgcctcggtctagggacggcggcggagtcggtggtccctgcgcgatggccacctcggtgttgtgctgcctgcggtgctgcagagacggggggactggccacatccctctgaaggagatgccggccgtgcagctggacacgcagcacatgggaacagatgttgttattgtaaagaatggaagaagaatatgtggaacaggaggttgtttagccagcgcacctttacatcaaaacaaaagctattttgaattcaaaatccagtccacaggaatctggggtattggtgttgcaactcagaaggttaacttgaatcagattcctcttggccgagatatgcacagtctggtgatgagaaatgatggagccctttaccacaacaatgaagagaaaaataggctgccagcaaacagtcttccgcaggaaggagatgtggtgggtattacttatgaccatgtcgaattaaatgtatacttgaatggaaaaaacatgcattgtccagcatcaggtatacgagggacagtgtatccagttgtttatgttgatgacagtgcaattttggattgccagttcagtgagttttatcatacgcctccacctggttttgaaaaaatattatttgaacagcaaatcttctgaatgtatttgtttttaaaacttgtatttctgcactgttaaaaaatgttcatcatttaataaaactttacctggcctatagatgaaaatatattcttaaaaatatgcttgttgatgctgtctaaggaaccaatgtattcagtataccaccctgaagttgtgatttaaaatactttatgttttgtgaaatgaaaataagcatttgggcagtttatttaattcttatttaaataaatagaattatgggtttaattaacagtataacatgactatatatacatatatatttaaagggaattctttcttacataatatatttgttttgatagagatgtagagttgggtgggtgtttttgtcactctgaagtttagacctcattaaatatttgacatctacagttggataattttgccgcttagtgtccttttttatatacaatataacaaagtgagagaaatttatattactggcaatttcatttttggcagtctatttctgtatcatgtaccgcttttcttaaaacttaaattgcttattttgttgtgtaatgtcattgcttttgatttgctttgtgaaaggagataaacgtttcagtaattgtcagagcattttgttgcctcaggctgtgttacctcaatttcagagtaagtagtggttgattagtaatgtagtatacactggcagacatctagaatagtatgatgctttacatttaaatgaggttattcttttaaggacttttatttgtatgttttctgtaaggaataataaaataattgtaattaaggaatataccatactatattaaacacattcttcctattttgttagttatacactaaattcacatcacccgtgattatttcagttcagagataagtgaatcctcttcatgaccctgagtctttgcctggttcttaagaatcactgtcctttagttaacgccctgtgacctgaaccaatcactctatacatctttagatacgttgtctgttttcaaatgagcatggcaaggatgcatacatttccctcctttatcaactagaaacagtacattgttcaggaaaacatgagtgttagaattagaaagagatccaaattgtagttttgctgctcatcctattttctcctctccaagtctcagattcccatttataaaaggagcaatcatactgacataagattctatgattaaataaggtaatacatatataacaccttaataatcataggcacttgcgccaggcgcggtggctcacacctgtaatcccagcactttgggaggctgaggcgggaggatcacaaggtcaggagatcgagaccatcgtggctaacatggtgaaaccctggctctactaaaaaaatacaaaaaaaattagccaggtgtggtggcgggcgcctgtagttctagctactctggaggctgaggcaggagaatggcttgaacccgggagacggcgcttgcagtgagccgagattgccccactgcactccagcctaggcaacagagtgagactctgtctcaaaaaaaattaaaataaaataaaataaaaatcataggcacttagtaagtgtagtttcctggatggtaaagtatcagggaaagtggttttctttctttttttttttttctcgttttttttttgagacagagtctcaccttgtcacccaggctagagtgcagtggcacgatcttggctcactgcaacctctgcttcccaggtttaagcgattctcttgcctcagcctcccgagtaggtgggactacaggtgcccgccaccacgcccgtgtaatttttgtatttttagtagagatggggtttcaccatgttgtccaggctggtctcaaactcctgacctcatgatccacctccctcagcctcccaaagtgctggaattataggcgtaagccaccacacccagccagaaagtggttctcatgatgcttctcagaccggcaacatcagcatcactggaacttgttaaaaatggacactctcagaacccacaccagacccaccaaatcagtttgagaactgccattcagtagagaattatttgcctactgtaaattttctaaggatttatgatgggctatttttgacccataggctcagagaatcctgcaaaatccttttttattgtttattctgcagacaaaaatgtgacaatatgctttgaaaacatagatatacttgagtaacatttatttacataaatcccaaattctacctctgaaggtatatgaaatttaactatgtatgtattatgcattttgtctggctttctatcataattttaatttgtaaagaatgtgcttacttgggaaagcaaattaaagtgactactgtttgctatc

SEQ ID NO: 204508 - protein, 314 aa, Artificial Sequence
  derived and/or modified sequence
MPGFTCCVPGCYNNSHRDKALHFYTFPKDAELRRLWLKNVSRAGVSGCFSTFQPTTGHRLCSVHFQGGRKTYTVRVPTIFPLRGVNERKVARRPAGAAAARRRQQQQQQQQQQQQQQQQQQQQQQQQQQQQQSSPSASTAQTAQLQPNLVSASAAVLLTLQATVDSSQAPGSVQPAPITPTGEDVKPIDLTVQVEFAAAEGAAAAAAASELQAATAGLEAAECPMGPQLVVVGEEGFPDTGSDHSYSLSSGTTEEELLRKLNEQRDILALMEVKMKEMKGSIRHLRLTEAKLREELREKDRLLAMAVIRKKHGM

SEQ ID NO: 204509 - DNA, 945 bp, Artificial Sequence
  derived and/or modified sequence
atgcctggcttcacctgctgcgtgcctggatgttacaataactcacacagagataaagccctgcacttctacacattcccaaaggatgctgagttgcgccgcctgtggttgaaaaatgtttcccgtgctggagtcagtggatgttttagcacattccaacccactaccggtcaccgcctctgttccgttcatttccagggtgggcgcaagacctacactgtgcgtgtgcccaccattttcccattgcggggcgtgaacgaaagaaaggtcgcgagaaggcccgccggagcagcagcggcgaggcgacgacagcagcaacagcaacagcagcagcaacaacagcagcaacaacagcagcagcaacagcagcagcagcaacagcagcagcagcaacaatcaagcccctctgcctcaaccgcacaaaccgctcagttacagcctaatctcgtgtcagcatccgccgcagttctactgactcttcaggctactgtggatagctcccaggcgccagggagcgttcagccagcccccattaccccgactggtgaagacgtgaagcctatcgatttgacggttcaggtggagttcgctgcagctgaaggtgccgccgccgccgccgccgcttcagaactgcaggccgcaacagctggtctggaggctgcagagtgcccaatggggccacagctcgtggtggtgggggaggaaggcttccccgacactggcagcgatcatagttactccctgagcagcgggactacagaagaagaactgctgagaaagctcaatgaacagcgcgacatcctagcacttatggaagtgaagatgaaggagatgaaaggcagcattaggcacctcaggctgacagaagctaagcttagagaggagttgagggagaaagacaggctgctggctatggcagtgatcaggaagaaacatgggatgtag

SEQ ID NO: 204510 - DNA, 945 bp, Artificial Sequence
  derived and/or modified sequence
atgcctggcttcacctgctgcgtgcccggctgctacaacaacagccaccgggacaaggccctgcacttctacaccttccccaaggatgctgagctgcggcggctgtggctgaagaatgtgtccagagctggggtgtctggctgcttcagcaccttccagcccaccaccggccaccggctgtgcagcgtgcacttccagggcggcaggaagacctacacagtgcgggtgcccaccatcttccccctgcggggcgtgaatgaaaggaaggtggcccggcggcctgctggagctgctgctgcccggcggcggcagcagcagcagcagcagcagcagcagcagcagcagcagcagcagcagcagcagcagcagcagcagcagcagcagcagcagcagcagagcagccccagcgccagcacagcccagacagcccagctgcagcccaacctggtgtctgccagcgctgctgtgctgctgaccctgcaggccaccgtggacagcagccaggcccctggctctgtgcagcctgcccccatcacccccactggagaagatgtgaagcccatcgacctgactgtgcaggtggagtttgctgctgctgagggcgctgctgctgctgctgctgccagcgagctgcaggccgccacagctggcctggaggccgctgagtgccccatgggcccccagctggtggtggtgggggaggagggcttcccagacaccggcagtgaccacagctacagcctgagcagcggcaccacagaggaggagctgctgaggaagctgaatgagcagagggacatcctggccctgatggaggtgaagatgaaggagatgaagggcagcatccgccacctgcggctgacagaggccaagctgcgggaggagctgcgggagaaggaccggctgctggccatggccgtcatcaggaagaagcacggcatgtag

SEQ ID NO: 204511 - DNA, 945 bp, Artificial Sequence
  derived and/or modified sequence
atgcccggcttcacctgctgcgtgcccggctgctacaacaacagccaccgggataaggccctccacttttatacgttccccaaagatgcagaactgaggcggctgtggttgaagaacgtgagcagggccggcgtgtctggctgtttttctacctttcagcctacgactgggcaccggctgtgttctgtgcacttccagggagggcgcaagacatacactgtgcgagtgccaaccatcttccctctgaggggagtcaatgagagaaaggtagctcgacgccccgctggcgctgccgctgcaagacgccgtcagcaacagcagcagcagcagcagcaacagcagcagcaacagcaacagcaacagcagcagcagcagcagcaacaacagcaacagcagtcttctcccagtgcctctaccgcccaaactgcacagttgcaacccaacttggtgtctgcctcagcagccgtactactgaccctccaagccaccgtggactcaagccaggcccccggatccgtacagccggcacccatcacaccaactggggaggatgtgaagcctatcgacttaactgtccaggtagaattcgctgccgccgagggagctgctgctgccgctgctgcatctgagcttcaggctgccacagccgggctagaagcagctgaatgcccaatgggccctcagctcgtggtggtgggcgaggaaggatttcccgatactggttcagatcacagctacagtctgagttcagggacgacagaggaggaactgctcaggaagttgaatgagcagcgcgatattctggccctgatggaggtaaagatgaaggagatgaagggctccatcagacatctccgtctgaccgaggccaaactacgggaggagttacgagagaaggatcggctgctagcaatggctgttataagaaaaaagcacggaatgtag

SEQ ID NO: 204512 - DNA, 945 bp, Artificial Sequence
  derived and/or modified sequence
atgcccggattcacttgctgtgttcccggatgttacaataatagccacagagataaagccctgcacttttatacctttcccaaggatgctgaactccggaggttgtggctgaagaacgttagccgcgcaggagtatcgggctgcttctcgacgttccagcccacaaccgggcatagactgtgtagcgtgcactttcagggcggacggaagacgtacaccgtgcgcgttcctaccattttccccctgcggggagttaacgaacgaaaggttgccagaaggccagcgggtgccgctgccgcacggaggcgccagcagcagcaacagcagcagcagcagcagcagcaacaacaacagcagcagcaacagcagcagcagcagcagcagcagcagcagcagtccagtccatcagcttctacggcccagactgctcaactgcagccgaacctcgtttctgcgtcagccgctgtcctgctcactctgcaggccactgtagactccagtcaggccccagggtctgttcagcctgccccaatcactccaaccggagaggacgtgaagcctatagaccttactgtacaggtggagtttgcagctgcagaaggcgctgcagcggcagccgcagctagcgagttgcaagccgctacagccggactcgaggctgccgagtgccctatgggcccacaactggtcgtcgtgggtgaggaaggattccctgacaccgggagtgatcattcttactcgctgagtagcggaactactgaagaggaactgctgcgcaagcttaacgaacagcgcgacatactggccctcatggaggttaagatgaaagagatgaagggaagcatcagacacctgcggctgactgaggcaaagctcagggaagagttgcgcgagaaggaccgactgctcgcaatggctgtgattcgaaaaaagcacggcatgtag

SEQ ID NO: 204513 - DNA, 1885 bp, Artificial Sequence
  derived and/or modified sequence
cggcgtccccggggcccactcccgagcgcaggcgggcagccaggcgggcggcgcggcgcgggccggcaggaagcgtattctgggcacggggcgccgggcgggccggctgcgccgagcggcagtggtgggataccacccaaggcctcgcgcggcgccgcccgtcgaggggcgggcggcggcgtagccactgggccgtcgaagagcgcaggaggccggtgggccgggccgggccgcgcggcgcagccatgcctggctttacgtgctgcgtgccaggctgctacaacaactcgcaccgggacaaggcgctgcacttctacacgtttccaaaggacgctgagttgcggcgcctctggctcaagaacgtgtcgcgtgccggcgtcagtgggtgcttctccaccttccagcccaccacaggccaccgtctctgcagcgttcacttccagggcggccgcaagacctacacggtacgcgtccccaccatcttcccgctgcgcggcgtcaatgagcgcaaagtagcgcgcagacccgctggggccgcggccgcccgccgcaggcagcagcagcaacagcagcagcagcagcaacagcagcaacagcagcagcagcagcaacagcagcagcagcagcagcagcagcagcagtcctcaccctctgcctccactgcccagactgcccagctgcagccgaacctggtatctgcttccgcggccgtgcttctcacccttcaggccactgtagacagcagtcaggctccgggatccgtacagccggcgcccatcactcccactggagaagacgtgaagcccatcgatctcacagtgcaagtggagtttgcagccgcagagggcgcagccgctgcggccgccgcgtcggagttacaggctgctaccgcagggctggaggctgccgagtgccctatgggcccccagttggtggtggtaggggaagagggcttccctgatactggctccgaccattcgtactccttgtcgtcaggcaccacggaggaggagctcctgcgcaagctgaatgagcagcgggacatcctggctctgatggaagtgaagatgaaagagatgaaaggcagcattcgccacctgcgtctcactgaggccaagctgcgcgaagaactgcgtgagaaggatcggctgcttgccatggctgtcatccgcaagaagcacggaatgtgaactggtgccccggcagcctgctggactcccagaccccatccagccaggggaccgcaggccattgttgaactcctctatactcctgggcactggttgacagtactgaggcttaaggcagctggactctcttgctggtgacctggcatcctcaattgtttcctcctgaagtggaagctggggccttagactctgccctggtgacaccagcaattatgactttgtctacccttcctccccagttattgttgcagattctggttaagcagaggcttcagaaccactgaacttgaaacttaccctctagggatgcaggtgggatgtccagggactataggtttgggaaaaccataccttaaggttggtcagcagtcagacaactctaatgtgtgtagtgataagagattcaagtaacatcagttctcctccttttcatgcttttccttcccaggtgcagcctgtgattctgatggggactggtaaatctgtgcctctgcctcctaggacttattttcccaggaggccatttacaaggggatctggatgacctgctgatggagatccagcttgccagggacttaggtttatcctgttttgtttgctactggttacaaattctattttctgtacaattagtcagactaaagttttcactgtgtttgtttggcaaaacaaattaaacaaaaagtaaggttttt

SEQ ID NO: 204514 - DNA, 945 bp, Artificial Sequence
  derived and/or modified sequence
atgcccggcttcacctgctgcgtgcccggctgctacaacaacagccacagagacaaggccctgcacttctacaccttccccaaggacgccgagctgagaagactgtggctgaagaacgtgagcagagccggcgtgagcggctgcttcagcaccttccagcccaccaccggccacagactgtgcagcgtgcacttccagggcggcagaaagacctacaccgtgagagtgcccaccatcttccccctgagaggcgtgaacgagagaaaggtggccagaagacccgccggcgccgccgccgccagaagaagacagcagcagcagcagcagcagcagcagcagcagcagcagcagcagcagcagcagcagcagcagcagcagcagcagcagcagcagcagagcagccccagcgccagcaccgcccagaccgcccagctgcagcccaacctggtgagcgccagcgccgccgtgctgctgaccctgcaggccaccgtggacagcagccaggcccccggcagcgtgcagcccgcccccatcacccccaccggcgaggacgtgaagcccatcgacctgaccgtgcaggtggagttcgccgccgccgagggcgccgccgccgccgccgccgccagcgagctgcaggccgccaccgccggcctggaggccgccgagtgccccatgggcccccagctggtggtggtgggcgaggagggcttccccgacaccggcagcgaccacagctacagcctgagcagcggcaccaccgaggaggagctgctgagaaagctgaacgagcagagagacatcctggccctgatggaggtgaagatgaaggagatgaagggcagcatcagacacctgagactgaccgaggccaagctgagagaggagctgagagagaaggacagactgctggccatggccgtgatcagaaagaagcacggcatgtag

SEQ ID NO: 204515 - protein, 858 aa, Artificial Sequence
  derived and/or modified sequence
MAAKGAHGSYLKVESELERCRAEGHWDRMPELVRQLQTLSMPGGGGNRRGSPSAAFTFPDTDDFGKLLLAEALLEQCLKENHAKIKDSMPLLEKNEPKMSEAKNYLSSILNHGRLSPQYMCEAMLILGKLHYVEGSYRDAISMYARAGIDDMSMENKPLYQMRLLSEAFVIKGLSLERLPNSIASRFRLTEREEEVITCFERASWIAQVFLQELEKTTNNSTSRHLKGCHPLDYELTYFLEAALQSAYVKNLKKGNIVKGMRELREVLRTVETKATQNFKVMAAKHLAGVLLHSLSEECYWSPLSHPLPEFMGKEESSFATQALRKPHLYEGDNLYCPKDNIEEALLLLLISESMATRDVVLSRVPEQEEDRTVSLQNAAAIYDLLSITLGRRGQYVMLSECLERAMKFAFGEFHLWYQVALSMVACGKSAYAVSLLRECVKLRPSDPTVPLMAAKVCIGSLRWLEEAEHFAMMVISLGEEAGEFLPKGYLALGLTYSLQATDATLKSKQDELHRKALQTLERAQQLAPSDPQVILYVSLQLALVRQISSAMEQLQEALKVRKDDAHALHLLALLFSAQKHHQHALDVVNMAITEHPENFNLMFTKVKLEQVLKGPEEALVTCRQVLRLWQTLYSFSQLGGLEKDGSFGEGLTMKKQSGMHLTLPDAHDADSGSRRASSIAASRLEEAMSELTMPSSVLKQGPMQLWTTLEQIWLQAAELFMEQQHLKEAGFCIQEAAGLFPTSHSVLYMRGRLAEVKGNLEEAKQLYKEALTVNPDGVRIMHSLGLMLSRLGHKSLAQKVLRDAVERQSTCHEAWQGLGEVLQAQGQNEAAVDCFLTALELEASSPVLPFSIIPREL

SEQ ID NO: 204516 - protein, 685 aa, Artificial Sequence
  derived and/or modified sequence
KKKINFFKKPHSLSLRKKREEEVITCFERASWIAQVFLQELEKTTNNSTSRHLKGCHPLDYELTYFLEAALQSAYVKNLKKGNIVKGMRELREVLRTVETKATQNFKVMAAKHLAGVLLHSLSEECYWSPLSHPLPEFMGKEESSFATQALRKPHLYEGDNLYCPKDNIEEALLLLLISESMATRDVVLSRVPEQEEDRTVSLQNAAAIYDLLSITLGRRGQYVMLSECLERAMKFAFGEFHLWYQVALSMVACGKSAYAVSLLRECVKLRPSDPTVPLMAAKVCIGSLRWLEEAEHFAMMVISLGEEAGEFLPKGYLALGLTYSLQATDATLKSKQDELHRKALQTLERAQQLAPSDPQVILYVSLQLALVRQISSAMEQLQEALKVRKDDAHALHLLALLFSAQKHHQHALDVVNMAITEHPENFNLMFTKVKLEQVLKGPEEALVTCRQVLRLWQTLYSFSQLGGLEKDGSFGEGLTMKKQSGMHLTLPDAHDADSGSRRASSIAASRLEEAMSELTMPSSVLKQGPMQLWTTLEQIWLQAAELFMEQQHLKEAGFCIQEAAGLFPTSHSVLYMRGRLAEVKGNLEEAKQLYKEALTVNPDGVRIMHSLGLMLSRLGHKSLAQKVLRDAVERQSTCHEAWQGLGEVLQAQGQNEAAVDCFLTALELEASSPVLPFSIIPREL

SEQ ID NO: 204517 - protein, 146 aa, Artificial Sequence
  derived and/or modified sequence
MAAKGAHGSYLKVESELERCRAEGHWDRMPELVRQLQTLSMPGGGGNRRGSPSAAFTFPDTDDFGKLLLAEALLEQCLKENHAKIKDSMPLLEKNEPKMSEAKNYLSSILNHGRLSGLAVLLRLVSNSWAQAILLLQPPEALGLQE

SEQ ID NO: 204518 - DNA, 2577 bp, Artificial Sequence
  derived and/or modified sequence
atggccgccaagggcgcccacggcagctacctgaaggtggagagcgagctggagagatgcagagccgagggccactgggacagaatgcccgagctggtgagacagctgcagaccctgagcatgcccggcggcggcggcaacagaagaggcagccccagcgccgccttcaccttccccgacaccgacgacttcggcaagctgctgctggccgaggccctgctggagcagtgcctgaaggagaaccacgccaagatcaaggacagcatgcccctgctggagaagaacgagcccaagatgagcgaggccaagaactacctgagcagcatcctgaaccacggcagactgagcccccagtacatgtgcgaggccatgctgatcctgggcaagctgcactacgtggagggcagctacagagacgccatcagcatgtacgccagagccggcatcgacgacatgagcatggagaacaagcccctgtaccagatgagactgctgagcgaggccttcgtgatcaagggcctgagcctggagagactgcccaacagcatcgccagcagattcagactgaccgagagagaggaggaggtgatcacctgcttcgagagagccagctggatcgcccaggtgttcctgcaggagctggagaagaccaccaacaacagcaccagcagacacctgaagggctgccaccccctggactacgagctgacctacttcctggaggccgccctgcagagcgcctacgtgaagaacctgaagaagggcaacatcgtgaagggcatgagagagctgagagaggtgctgagaaccgtggagaccaaggccacccagaacttcaaggtgatggccgccaagcacctggccggcgtgctgctgcacagcctgagcgaggagtgctactggagccccctgagccaccccctgcccgagttcatgggcaaggaggagagcagcttcgccacccaggccctgagaaagccccacctgtacgagggcgacaacctgtactgccccaaggacaacatcgaggaggccctgctgctgctgctgatcagcgagagcatggccaccagagacgtggtgctgagcagagtgcccgagcaggaggaggacagaaccgtgagcctgcagaacgccgccgccatctacgacctgctgagcatcaccctgggcagaagaggccagtacgtgatgctgagcgagtgcctggagagagccatgaagttcgccttcggcgagttccacctgtggtaccaggtggccctgagcatggtggcctgcggcaagagcgcctacgccgtgagcctgctgagagagtgcgtgaagctgagacccagcgaccccaccgtgcccctgatggccgccaaggtgtgcatcggcagcctgagatggctggaggaggccgagcacttcgccatgatggtgatcagcctgggcgaggaggccggcgagttcctgcccaagggctacctggccctgggcctgacctacagcctgcaggccaccgacgccaccctgaagagcaagcaggacgagctgcacagaaaggccctgcagaccctggagagagcccagcagctggcccccagcgacccccaggtgatcctgtacgtgagcctgcagctggccctggtgagacagatcagcagcgccatggagcagctgcaggaggccctgaaggtgagaaaggacgacgcccacgccctgcacctgctggccctgctgttcagcgcccagaagcaccaccagcacgccctggacgtggtgaacatggccatcaccgagcaccccgagaacttcaacctgatgttcaccaaggtgaagctggagcaggtgctgaagggccccgaggaggccctggtgacctgcagacaggtgctgagactgtggcagaccctgtacagcttcagccagctgggcggcctggagaaggacggcagcttcggcgagggcctgaccatgaagaagcagagcggcatgcacctgaccctgcccgacgcccacgacgccgacagcggcagcagaagagccagcagcatcgccgccagcagactggaggaggccatgagcgagctgaccatgcccagcagcgtgctgaagcagggccccatgcagctgtggaccaccctggagcagatctggctgcaggccgccgagctgttcatggagcagcagcacctgaaggaggccggcttctgcatccaggaggccgccggcctgttccccaccagccacagcgtgctgtacatgagaggcagactggccgaggtgaagggcaacctggaggaggccaagcagctgtacaaggaggccctgaccgtgaaccccgacggcgtgagaatcatgcacagcctgggcctgatgctgagcagactgggccacaagagcctggcccagaaggtgctgagagacgccgtggagagacagagcacctgccacgaggcctggcagggcctgggcgaggtgctgcaggcccagggccagaacgaggccgccgtggactgcttcctgaccgccctggagctggaggccagcagccccgtgctgcccttcagcatcatccccagagagctgtag

SEQ ID NO: 204519 - DNA, 2577 bp, Artificial Sequence
  derived and/or modified sequence
atggctgccaagggagctcacggttcctatctcaaggtggagtccgagttagagcgttgcagggccgagggccactgggaccggatgcccgagctagtaagacaactccagactctctccatgcccggcggtggcgggaacaggcgcggctcaccctcagccgcctttactttccctgataccgatgactttggcaagctgctactcgccgaggctctccttgaacagtgtttaaaggagaatcacgccaagatcaaggattctatgccccttctggaaaaaaacgagcccaaaatgtcagaggccaagaattatctgagttccatcttaaatcacggaaggctgtcacctcaatatatgtgcgaagctatgcttatcttgggcaaacttcactacgttgaaggctcttacagagatgctatctcaatgtacgctcgcgctgggatagacgacatgtctatggagaacaaacctctataccaaatgcggctcctcagcgaggcttttgtcattaagggcctgtctcttgagagactgcccaacagcattgctagtagattcaggctgaccgagcgagaagaagaagtcatcacctgttttgaacgcgccagctggatcgcacaggtctttctgcaggagttagaaaaaaccacaaataattctacatcgcgccacttaaaaggatgtcatccactcgattacgagctgacatatttcctggaggccgcacttcagtccgcttacgtgaagaatctgaagaaggggaatatagtgaagggtatgcgagagctgcgggaggtactcaggacggtggagaccaaggctacacagaactttaaggtgatggccgctaagcatctggccggcgttcttttacacagtctttccgaggagtgctactggagccccttatctcaccccctgcctgaattcatgggaaaagaggagtcatctttcgcgactcaggctctgcggaagcctcacctgtatgaaggagataacttatactgtcccaaagacaacatcgaggaggcattgctgctgctgctcatctctgaaagcatggccaccagagacgttgtcctgtctagagtgcccgaacaggaggaggatcgcacagtcagcctgcagaacgcggcagctatttatgatttgttgtcgattacacttgggcggaggggacagtatgtcatgctgtctgagtgcttggagcgtgcgatgaagtttgcattcggagagttccatttgtggtatcaggtggcattgtccatggtcgcatgtggaaagtctgcctatgcagtgagccttctgcgggaatgcgtgaaacttaggccgagcgaccccactgtgccactgatggctgcaaaggtttgtatcggtagcctgcgctggttggaggaagcggagcactttgctatgatggtcatttctctcggagaagaagcaggcgaattcctgcctaagggctaccttgcgctgggcctcacttacagcctgcaggccacagacgccacacttaagtctaaacaggacgaattgcacagaaaagcacttcagacactggagagggcccaacaactggcccctagtgatccgcaggtgattttgtacgtgtctttgcagctggctcttgttcgccaaatcagttcagctatggagcagctgcaagaggcgttgaaggtcagaaaggacgatgctcacgctctgcacttattagcactgctgttctctgctcagaagcatcaccagcacgcactggacgtggtgaacatggccatcaccgaacaccctgagaatttcaatctgatgttcaccaaggtcaaattggagcaggtcctgaaaggtccagaggaagccctggtgacctgccgccaggtcctgcgcctgtggcagaccctgtactcattctcccagctcggaggcttggaaaaagatgggtccttcggcgaaggcctgaccatgaaaaagcagtccggtatgcaccttaccctgccagacgcccacgatgctgactccggcagtcgcagggcctcttcgatcgctgccagccgtctggaggaggctatgagcgagctgaccatgccctcctccgtgcttaaacaggggcccatgcagctctggaccactttagagcaaatctggctccaggccgccgaactgtttatggagcaacagcacttgaaggaagctggtttctgcatccaagaagcagctggcctgtttccaacgtcacacagcgtcctctacatgcgaggtcggttggccgaggttaaaggaaatctcgaagaggccaagcaactgtacaaagaggccctgaccgtgaaccctgatggcgttagaattatgcatagcctgggactgatgttgtctagacttgggcataaatctctcgcacagaaggtgctgcgggatgccgttgagagacagagcacttgtcatgaggcttggcagggcctcggcgaggtccttcaggctcagggtcagaatgaggctgctgtggactgttttctaactgcgcttgaactggaggcttccagcccagtgctgcctttttcaatcatcccgcgagaactctag

SEQ ID NO: 204520 - DNA, 2577 bp, Artificial Sequence
  derived and/or modified sequence
atggccgccaagggggcccacggcagctacctgaaggtggagagcgagctggagcgctgcagagctgagggccactgggacaggatgcctgagctggtgcggcagctgcagaccctgtccatgcctgggggcggcggcaacagaagaggcagccccagcgctgccttcaccttcccagacacagatgactttgggaagctgctgctggccgaggccctgctggagcagtgcctgaaggagaaccacgccaagatcaaggacagcatgcccctgctggagaagaatgagcccaagatgtctgaggccaagaactacctgagcagcatcctgaaccacggccgcctgagcccccagtacatgtgtgaggccatgctgatcctgggcaagctgcactacgtggagggcagctacagagatgccatctccatgtatgcccgggccggcattgatgacatgtccatggagaacaagcccctgtaccagatgaggctgctgtctgaggcctttgtgatcaagggcctgagcctggagcggctgcccaacagcatcgccagccgcttccggctgacagagcgggaggaggaggtgatcacctgctttgagcgggcctcctggatcgcccaggtgttcctgcaggagctggagaagaccaccaacaacagcaccagccgccacctgaagggctgccaccccctggactatgagctgacctacttcctggaggccgccctgcagagcgcctacgtgaagaacctgaagaagggcaacatcgtgaagggcatgagggagctgcgggaggtgctgaggacagtggagaccaaggccacccagaacttcaaggtgatggccgccaagcacctggccggcgtgctgctgcacagcctgtctgaggagtgctactggagccccctgagccaccccctgcctgagttcatgggcaaggaggagagcagctttgccacccaggccctgaggaagccccacctgtatgaaggagacaacctgtactgccccaaggacaacatcgaggaggccctgctgctgctgctgatcagcgagagcatggccaccagagatgtggtgctgagccgggtgcctgagcaggaggaggacagaacagtgtccctgcagaatgctgctgccatctatgacctgctgagcatcaccctgggccggcggggccagtatgtgatgctgtctgaatgtctggagcgggccatgaagtttgcctttggagagttccacctgtggtaccaggtggccctgtccatggtggcctgtgggaagagcgcctatgctgtgtccctgctgagagaatgtgtgaagctgcggcccagcgaccccaccgtgcccctgatggccgccaaggtgtgcatcggcagcctgcgctggctggaggaggccgagcactttgccatgatggtgatcagcctgggggaggaggccggggagttcctgcccaagggctacctggccctgggcctgacctacagcctgcaggccacagatgccaccctgaagagcaagcaggatgagctgcacaggaaggccctgcagaccctggagcgggcccagcagctggcccccagcgacccccaggtgatcctgtatgtgtccctgcagctggccctggtgcggcagatcagcagcgccatggagcagctgcaggaggccctgaaggtgaggaaggatgatgcccacgccctgcacctgctggccctgctcttcagcgcccagaagcaccaccagcacgccctggatgtggtgaacatggccatcacagagcaccctgagaacttcaacctgatgttcaccaaggtgaagctggagcaggtgctgaagggccctgaggaggccctggtgacctgccggcaggtgctgcggctgtggcagaccctgtacagcttcagccagctgggcggcctggagaaggatggcagctttggagagggcctgaccatgaagaagcagagcggcatgcacctgaccctgcctgatgcccatgatgctgacagcggcagcagaagagccagcagcattgctgccagccggctggaggaggccatgtctgagctgaccatgcccagctctgtgctgaagcagggccccatgcagctgtggaccaccctggagcagatctggctgcaggccgctgagctgttcatggagcagcagcacctgaaggaggccggcttctgcatccaggaggccgccggcctcttccccaccagccacagcgtgctgtacatgaggggccgcctggccgaggtgaagggcaacctggaggaggccaagcagctgtacaaggaggccctgactgtgaacccagatggagtgcgcatcatgcacagcctgggcctgatgctgagccggctgggccacaagagcctggcccagaaggtgctgagagatgctgtggagcggcagagcacctgccacgaggcctggcagggcctgggggaggtgctgcaggcccagggccagaatgaagctgctgtggactgcttcctgacagccctggagctggaggccagcagccctgtgctgcccttcagcatcatcccccgggagctgtag

SEQ ID NO: 204521 - DNA, 2577 bp, Artificial Sequence
  derived and/or modified sequence
atggccgccaagggcgcccacggcagctacctgaaggtggagagcgagctggagcgatgtagagccgagggccactgggataggatgccagagctggtaaggcaattacagaccctctctatgcccggcggtggagggaataggagaggttccccttccgccgcctttactttcccagataccgatgatttcggaaagctactgctggccgaggccctgctggagcagtgcctcaaagaaaaccacgccaagattaaagactcaatgcctttgctcgaaaagaacgagcccaaaatgtcggaagctaagaactatctgtccagcattctcaatcacgggcgcctgtctccgcaatacatgtgcgaggctatgctgattttagggaagctccattatgtggaaggaagttaccgcgatgcgatttcaatgtatgcaagggcagggatcgatgacatgtcaatggagaataagcctctataccagatgcgcttgctgtcggaggctttcgtaataaagggactctctctcgaaagactcccaaattccatcgccagccgcttcagactgactgaaagggaggaagaggtaatcacatgctttgagagagcttcctggatagcccaagtatttctgcaggaattggagaagaccactaacaattcaaccagcaggcaccttaaggggtgccacccattggactacgaactgacctactttttggaggcggcgctacagagcgcttacgtcaaaaacttaaagaaaggcaatatagttaagggcatgagagagctccgcgaggtgctaaggactgtagagacaaaggccacccagaatttcaaagttatggctgctaaacaccttgctggagtgttgctgcatagcctaagcgaggagtgctattggtcgcccctgtcccacccacttccggaattcatgggaaaggaggaaagtagttttgctacccaggccctgcgcaagccacacttgtacgagggggacaacctgtattgccctaaggataacatagaagaagccctgttactactcctgataagtgagagcatggctacccgagacgttgtcttgtcgcgagtgcctgagcaggaggaggaccggacagtgtcgctgcagaacgctgctgcgatctatgatctgctgagcatcacactaggacggcggggccagtacgttatgctctccgaatgtttggagcgcgccatgaagttcgcctttggtgagttccacttatggtaccaggtggcactctccatggtggcttgcggtaaaagtgcctacgctgtgtccctgctgcgggagtgtgttaagctacgaccttccgaccctacggtgcccctgatggctgctaaggtgtgcattgggtccttgagatggctcgaagaggccgagcattttgccatgatggtgatttctctgggggaagaagctggggaattccttcccaaagggtacttggccttgggattaacctatagtctgcaggccacagacgccaccctcaagtctaagcaggatgagcttcacaggaaggctctgcaaactttagagagagcccagcagctggccccctcagatccacaggtgatactttacgtttcattgcaacttgcattggtgcgtcagataagttcagccatggaacagttacaggaagcacttaaagttcgcaaggacgacgcacacgctctccatcttttggctctgcttttttcagctcagaaacatcaccagcatgccctggatgtcgttaacatggctattactgagcaccccgagaactttaaccttatgttcaccaaggttaaactggagcaggttctgaaggggcctgaggaagctttagttacctgccggcaagtgctccgcctttggcagactctgtacagctttagccagcttgggggtctggaaaaggacgggagctttggcgaagggcttaccatgaagaaacagagcggtatgcatcttactctaccagacgcccatgatgccgactccgggtccaggagggccagttccatagccgcaagcaggctcgaggaggccatgtccgaactgacgatgccttcctctgtgctgaagcaaggccccatgcagctgtggacaacactcgagcagatctggctgcaggctgccgagctgttcatggagcaacagcaccttaaggaggccggattctgcatccaggaggccgccggtctgtttcccacaagccattcagtgctctacatgagaggacgcttagctgaagtgaaggggaatcttgaagaagctaaacagctgtataaggaagctttgaccgtgaatcccgatggcgtgaggatcatgcactccctgggcctgatgctctcaaggctgggccataagagcctggcacagaaagtcctgcgcgacgccgttgaacgtcagtctacttgccacgaagcctggcaaggtttgggagaagtgctgcaggcgcaggggcagaatgaagccgcggtagattgcttcctaacagcacttgagctggaagcctcttcccccgtgcttcccttttcaataatcccgagagagctgtag

SEQ ID NO: 204522 - DNA, 2577 bp, Artificial Sequence
  derived and/or modified sequence
atggctgccaaaggagctcacggttcatatctcaaagtggagtcagaactggagagatgtagagcagagggtcactgggaccgcatgccagaacttgtgcgccagttgcagactcttagcatgcccggtggcggtgggaacaggagaggcagcccgagcgctgcattcactttccctgacaccgacgattttggcaaactcttacttgccgaggccctgctagagcagtgtctgaaggagaatcatgccaagataaaagattctatgccgttgctcgaaaaaaacgagccgaagatgtccgaggcgaaaaactaccttagctccatcttgaatcatggcagactaagcccacagtacatgtgtgaagccatgttgattctcggtaagttgcattatgtggagggatcgtaccgggacgcgataagtatgtatgctagagcagggattgacgatatgtcaatggagaataagccgctgtatcagatgcggttgctttccgaggcctttgtgatcaagggactgtcacttgaacgacttccaaacagcattgcctccagattccgtctgacggagcgggaggaggaagtgattacctgcttcgagcgcgcatcctggatcgcgcaggtttttctccaggaattggagaagaccacaaataactctaccagcaggcacctgaagggatgtcaccctcttgactacgaactgacatacttcctcgaggcagcgttgcagtccgcctacgtgaagaacctgaaaaagggaaacattgtaaagggcatgcgagaactccgggaagtactgaggacagtcgagacgaaagcaacccagaacttcaaggtgatggccgctaagcacctggccggagttttgctgcatagcctctccgaggagtgttactggagcccgctatctcatccccttccagagtttatgggaaaggaagagtcttcctttgccacccaggcactacgcaaacctcacctgtatgaaggggacaacctctattgcccaaaagacaacattgaggaggcactgcttctcctcctgatttccgaatctatggccacgcgcgacgtagttctgagtcgagttcccgaacaggaggaggatagaacagtcagcctccagaacgcggctgctatttatgacctgctgagtataacgctcgggaggcggggtcagtacgtgatgctctccgagtgtctagagagagccatgaagttcgcatttggagagttccatctgtggtatcaggttgctcttagcatggtggcatgcggcaagtcagcttatgcagtgtctctactccgcgagtgcgtgaaactgcggcctagcgaccccacagtgcccttgatggcagccaaggtgtgcataggttcccttcgttggttggaggaagctgagcacttcgcaatgatggttatctcactgggggaagaagctggcgaattcctgcctaaaggctaccttgccctggggctcacatatagcttgcaggcgacagatgcaacccttaagtcaaaacaggatgaactccatcgcaaagctctccagacacttgagagggcccagcagctggccccatccgatccccaagtgatcctctatgtaagtcttcagctcgctctcgttagacagattagctcggccatggagcagcttcaggaggcactcaaagtccggaaagacgacgcacacgccctccacctcctggcgctgctcttttccgctcagaaacaccaccagcatgctctcgatgtggttaacatggccatcaccgagcaccctgagaacttcaatctgatgtttacaaaagtaaagctcgagcaagtgttgaaagggccagaggaagcgctggttacatgcagacaggtattgcgcctctggcagacgctttactcattctcacagctgggcggactcgagaaagacggttcgtttggcgagggcctcaccatgaagaagcagtccggcatgcatttaactttgcctgacgcccatgatgccgatagcggttctcgccgagcttcctcaatcgccgctagccgcctggaagaggctatgagcgagctcaccatgccctcctccgtactcaagcagggcccaatgcagctgtggactaccctggaacagatctggctgcaagccgctgagctgtttatggagcagcaacacctcaaagaggcgggattttgcattcaggaagcggcaggccttttcccaacaagccactccgtgctgtatatgaggggacgccttgccgaagtaaaagggaatctggaagaggccaaacaactctataaagaagcattgactgttaacccagacggggtgaggataatgcatagcctcggcctaatgctgtccaggttaggccacaagagtcttgcacagaaggtgctgcgagatgccgtggaacgccagagtacatgccatgaagcttggcagggtttgggggaggtgctccaggcccaaggacagaacgaggctgccgtcgactgcttcctaaccgccctcgagctggaagcctctagccctgtgctcccattctccattatcccccgagaactgtag

SEQ ID NO: 204523 - DNA, 5157 bp, Artificial Sequence
  derived and/or modified sequence
ggccaggggcgggtccgcagctggcggcgccggggcccggggcggaggctgtggcagcagctgcagcggcggcggcggcggcagcgccaggagctgctacagcagaggcggaggttgctcctgtacgcgtacgggccgctcggccggagccgcagcccggaggcgccgggcggtgcgctgggagctgctggtgctgctgctgctgctgctgcccaccctccgccgcccgggcccccgctgccgcccgggccccggctgccgtctgcgcccccgtcgaccccgcccgcgagtgcgccccagccaggacgccgcccccggccgggtctccacttcttggccgcaccttccatgacagcgcccgcgagaagatggctgcgaagggcgcgcacggctcctacctgaaggtggagagcgagctggagcgctgccgcgccgagggccactgggaccgcatgccggagctggtccggcagctgcagacgctgagcatgcccggcggcggaggtaacaggcgaggcagcccgagcgcagcgttcacctttccggacaccgatgactttgggaaattgctgctggctgaggccctcctggagcagtgtttgaaggagaaccatgccaaaataaaagactccatgcctttgctggagaagaatgagccgaagatgagcgaagccaaaaattatctaagcagtatccttaaccatgggaggctctcgccacagtacatgtgtgaggccatgctgatcctgggcaaactgcattacgtggagggctcataccgagatgccatcagcatgtacgcacgggccgggattgatgacatgtccatggagaacaagcccctgtatcagatgcggctgctgtcggaggcttttgtcatcaaaggcctctctctggaacgcctacccaactccatcgcctcccgcttccgcctgacagagagggaggaggaagtgatcacctgttttgagagggcctcctggatcgctcaggtgttcctgcaggaattggagaagaccacaaataacagcacgtcgaggcatctgaaaggctgtcacccgcttgactatgagctcacctacttcctggaagctgccctccagagcgcctatgtgaaaaacctgaagaaggggaacatcgtgaagggcatgagagagctccgggaggtgctgcggactgtggagaccaaagcaactcagaacttcaaagtgatggcggccaagcacctggcgggggtcctgctgcactccctgagtgaggagtgctactggagccccctgtcccaccctctgcctgagttcatgggcaaggaggagagttctttcgccactcaggccctgcggaaacctcacctctatgaaggagacaacctctactgccccaaggacaacatcgaggaagccctcctgctcctcctcatcagcgaatccatggcaactcgagatgtggtgctgagccgggtgccggagcaggaggaggaccggacagtgagcttgcagaatgccgcagccatctatgacctcctgagcatcacgttgggcagaaggggacagtacgtcatgctctcggagtgcctggagcgagccatgaagtttgcgtttggagaatttcacctttggtaccaggtggccctctccatggtggcttgtgggaagtcagcctacgctgtgtccctgctgcgggagtgtgtgaagttgcggccctcggaccccaccgtgcccctgatggccgcgaaggtctgcatcgggtcccttcgctggctagaggaagcagagcactttgccatgatggtgatcagcctcggagaggaagccggggagttcctccccaagggctacctggctctgggtctcacctatagcctgcaggccaccgacgccaccctgaagtccaagcaagatgaattgcaccggaaggcactgcagacgctggagagggctcagcagctggcgcccagtgacccccaggtcatcctctatgtctcgctgcagctggccctcgtccgacagatctccagtgccatggagcagctgcaggaggccctgaaggtacgcaaggatgatgcccacgccctccacctgctggcactgctcttctctgcccagaagcaccaccagcatgccctggatgttgtcaacatggccatcaccgagcaccctgagaacttcaacctgatgttcaccaaggtgaagctggagcaggtgctgaaaggcccagaggaagccctcgtgacctgcagacaagtgctgaggctgtggcagaccctgtacagcttctcccagctgggaggcctagaaaaggatggcagcttcggtgagggcctcaccatgaagaagcagagtggcatgcacctgactttgcctgatgcccatgatgcagactctggctcccggcgggcttcgtccatcgccgcctcccggctggaggaggccatgtcagagctgactatgccctcttcggtcctgaagcagggccccatgcagctgtggaccacgctggaacagatctggctgcaggctgctgagctgttcatggagcagcagcacctcaaggaagcaggtttctgcatccaggaggcggcgggcctcttccccacttctcactcagtactctatatgcggggccggctggctgaggtgaagggcaacctggaggaggccaagcagctgtacaaggaggcgctcacggtgaacccagatggcgtgcgcatcatgcatagcctgggtctgatgctgagtcggctgggccacaagagcttggcccagaaggtgcttcgtgatgccgtggagaggcagagtacgtgccacgaggcgtggcagggcctgggcgaggtgctgcaggcccagggccagaacgaggctgccgttgactgcttcctcaccgcccttgagctggaggccagcagccctgtactgcccttctccatcatccccagagagctctgacgacgctgcagccgcagggagggaggggctggccagagggagaggcagcagggaacgtgggtcagggtggggcaacagtggcatcaggtgcggggcctcagggaaatacatctttagtgaacgcctctgcagctgcagccctcgttctcttggctgggccaagagggccttcctggatttctttgttggtgccttgggaaacagtctgacttgaaccctaagtgcctttggagagttttgtggtgaccagacttgctccccaagagctgggcagcggggagcctcacagctgtccttcaccctcacccatgcctctggcttggagtctgggtggggggttctcactccccactctcagcacagtacagacttctggatctctctcaggtcttgcccagggcggtcacaatgtgaagaaactgcgggcaagtgggaagactatgagatttctgggttcccttctcagacttggagttagtagatgattcctgcattgcccctgcttgccctctgagaccagctgggccccaccttgctctttccccctgctaccaagtgcctttggggtctgaccaggggtactgagcaccggccctaacacttccatctccacccaccccatctccctggcgatgtgctccagcccaagcagcctccgtaggctttagatcctgtggttgctagatccagtcctttctaataccctgagtcaacacattactcctgcaggtcttaggctacaatgcaggtcccttgagggccaccaacatggaggtaggcagtttctaggactgtccccagtacatctcaccacccacagccctttttttgccttgattcgagcctcaccctggccttttggcttcccctgcctgagagagacctgaggaggggacagagcccagcccctctcctgtggctgagcaggcctctgtgtccatgacacctgtcttccgggcctgggggctgtgggtgtatgtcctccctactggcttccccggcccctgctgcatgatgctcttggaactcttctccaaggagtcagtcccccaggcctatcaggggatccttttgtatctgcactttgggttttagtttcaaagctccatcaggtacagcttgcatttcaggatgtgtggaaagctcgggtgagggctgccctggttcatcatagctccaccttcctcggaaggagtgggctgttggagaccccccatccatggcacactagctcagcactgcatttcccgagatgattcccaagacagctggtgcctcctggctttcctgtgccaggccaaggggcaccacagaggaccctggatcctttgcctcttcttggttgaaggatctctatgtatgtgtgtatataaatatagttttttatctatatatataaaatagagatctattttttttctggaattctgttagaaaagtaaagaaaaagcaaatgctgttggtttatctcagggtgcccaaagtggttatagtcaatttttggtactaggaaaggcacccaatgcatttcctgacttttaagcatttccttgttggaagcagcagagggccaggccaagttgctgacagtgactttgcaggttgaataaagaaacccttggaggggaagcaggcttgtctgaagcagcatgtatattcactgggcatgtagctcccacaccagccttgagccaggccctggacaggaggggctgttgcaggatgagggaggccagagaaggcatcgaagccaagacctgggcccacctggggagggatgtgggaaaggaaggatgggagggaggaccctctgggaaaatgtggatttgagctggtgagagtgttgctaaggctgggctaaagcctggagagggtaggaggaggcaagaggggtccaggcagggctgatcctggcctctgacctgtccagggcgacccctgaagcccctgctgcctctgggcattgctgggagaggccaaggcaggactcacgtctgaacagagatcccctcgggcattgctgatgggccaccttcagctgcagggaagaagcctaggagaggaggcatgggagggacctgggccttgttcagattggccacctctgctgagaagtccataccagtacacccctaataagttatgccacataccaacgtactgtggatattataacctgcattaaaacaactctaaagaacgctgctcattt

SEQ ID NO: 204524 - protein, 1819 aa, Artificial Sequence
  derived and/or modified sequence
MASITQLFDDLCEALLPAAKTHLGQRSVNRKRAKRSLKKVAYNALFTNLFQDETQQLQPDMSKLPARNKILMLSFDLRVGGLGPKADRLEELVEELEAAPCCPLLEVGSVLDLLVQLAGSGPPQVLPRKRDYFLNNKHVGRNVPYSGYDCDDLSVFEMDVQSLISREECLCHSMIQETLQVMEAAPGTGLPTVGLFSFGDPCGDRFERDTRVSLFGALVHSRTYDMDVRLGLPPVPDNADLSGLAIKVPPSVDQWEDEGFQSASNLTPDSQSEPSVTPDVDLWEAALTYEASKRRCWERVGCPPGHREEPYLTEAGRDAFDKFCRLHQGELQLLAGGVLQAPQPVLVKECELVKDVLNVLIGVVSATFSLCQPAQAFVVKRGVHVSGASPESISSLLSEVAEYGTCYTRLSHFSLQPVLDSLYSKGLVFQAFTSGLRRYLQYYRACVLSTPPTLSLLTIGFLFKKLGRQLRYLAELCGVGAVLPGTCGGGPRAAFPTGVKLLSYLYQEALHNCSNEHYPVLLSLLKTSCEPYTRFIHDWVYSGVFRDAYGEFMIQVNHEYLSFRDKLYWTHGYVLISKEVEDCVPVFLKHIAHDIYVCGKTINLLKLCCPRHYLCWSDVPVPRISVIFSLEELKEIEKDCAVYVGRMERVARHSSVSKEEKELRMEIAKQELIAHAREAASRVLSALSDRQMSERMALDARKREQFQRLKEQFVKDQERRQAARQEELDDDFSYARELRDRERRLKSLEEELERKARQALVDHYSKLSAEAARREQKALWRIQRHRLESARLRFLLEDEKHIQEMLKAVSEAHQPQEPPDVLLSVHPQVTSPGPEHPEGGQGCDSGSAEQHSPAWDGWNRPGLLTPQPLKPLAVGAGGRGLQQAEGARPFSDSLSIGDFLPVGPGAEPSVQTGMVPLLEVALQTINLDLPPSAPGEAPAAASTQPSRPQEYDFSTVLRPAVATSPAPGPLQAAECSLGSSGLQLWEDSCGKMDACGSASRETLLPSHPPRRAALEEGSSQPTERLFGQVSGGGLPTGDYASEIAPTRPRWNTHGHVSDASIRVGENVSDVAPTQPRWNTHGHVSNASISLGESVSDVAPTRPRWNIHGHVSNASIRVGENVSDVAPTRPRWNTHGHVSNASIRVGENVSDVAPTRPRWNTHGHVSDASISLGESVSDMAPARPRWNTHGHVSDASISLGESVSDMAPTRPRWNTHGHVSDTSIRVGENVSDVAPIRSRCNTHGHVSDASISLGEPVSDVVSTRPRWNTHVPIPPPHMVLGALSPEAEPNTPRPQQSPPGHTSQSALSLGAQSTVLDCGPRLPVEVGPSLSSPSSGCGEGSISVGENVSDVAPTQPWWPNTPGDSVSEELGPGRSGDTEDLSPNWPLNSQEDTAAQSSPGRGEEAEASAAEAQGGEQAYLAGLAGQYHLERYPDSYESMSEPPIAHLLRPVLPRAFAFPVDPQVQSAADETAVQLSELLTLPVLMKRSITAPLAAHISLVNKAAVDYFFVELHLEAHYEALRHFLLMEDGEFAQSLSDLLFEKLGAGQTPGELLNPLVLNSVLSKALQCSLHGDTPHASNLSLALKYLPEVFAPNAPDVLSCLELRYKVDWPLNIVITEGCVSKYSGVFSFLLQLKLMMWALKDVCFHLKRTALLSHMAGSVQFRQLQLFKHEMQHFVKVIQGYIANQILHVTWCEFRARLATVGDLEEIQRAHAEYLHKAVFRGLLTEKAAPVMNVIHSIFSLVLKFRSQLISQAWGPPGGPRGAEHPNFALMQQSYNTFKYYSHFLFKVVTKLVNRGYQPHLEDFLLRINFNNYYQDA

SEQ ID NO: 204525 - protein, 488 aa, Artificial Sequence
  derived and/or modified sequence
LDCGPRLPVEVGPSLSSPSSGCGEGSISVGENVSDVAPTQPWWPNTPGDSVSEELGPGRSGDTEDLSPNWPLNSQEDTAAQSSPGRGEEAEASAAEAQGGEQAYLAGLAGQYHLERYPDSYESMSEPPIAHLLRPVLPRAFAFPVDPQVQSAADETAVQLSELLTLPVLMKRSITAPLAAHISLVNKAAVDYFFVELHLEAHYEALRHFLLMEDGEFAQSLSDLLFEKLGAGQTPGELLNPLVLNSVLSKALQCSLHGDTPHASNLSLALKYLPEVFAPNAPDVLSCLELRYKVDWPLNIVITEGCVSKYSGVFSFLLQLKLMMWALKDVCFHLKRTVPSAAAVQARDAAFREGHPGLHRQPDPARHLVRVQGQVGHRGRPGGDPACARRVPAQGRLQAAPVMNVIHSIFSLVLKFRSQLISQAWGPPGGPRGAEHPNFALMQQSYNTFKYYSHFLFKVVTKLVNRGYQPHLEDFLLRINFNNYYQDA

SEQ ID NO: 204526 - protein, 1493 aa, Artificial Sequence
  derived and/or modified sequence
MASITQLFDDLCEALLPAAKTHLGQRSVNRKRAKRSLKKVAYNALFTNLFQDETQQLQPDMSKLPARNKILMLSFDLRVGGLGPKADRLEELVEELEAAPCCPLLEVGSVLDLLVQLAGSGPPQVLPRKRDYFLNNKHVGRNVPYSGYDCDDLSVFEMDVQSLISREECLCHSMIQETLQVMEAAPGTGLPTVGLFSFGDPCGDRFERDTRVSLFGALVHSRTYDMDVRLGLPPVPDNADLSGLAIKVPPSVDQWEDEGFQSASNLTPDSQSEPSVTPDVDLWEAALTYEASKRRCWERVGCPPGHREEPYLTEAGRDAFDKFCRLHQGELQLLAGGVLQAPQPVLVKECELVKDVLNVLIGVVSATFSLCQPAQAFVVKRGVHVSGASPESISSLLSEVAEYGTCYTRLSHFSLQPVLDSLYSKGLVFQAFTSGLRRYLQYYRACVLSTPPTLSLLTIGFLFKKLGRQLRYLAELCGVGAVLPGTCGGGPRAAFPTGVKLLSYLYQEALHNCSNEHYPVLLSLLKTSCEPYTRFIHDWVYSGVFRDAYGEFMIQVNHEYLSFRDKLYWTHGYVLISKEVEDCVPVFLKHIAHDIYVCGKTINLLKLCCPRHYLCWSDVPVPRISVIFSLEELKEIEKDCAVYVGRMERVARHSSVSKEEKELRMEIAKQELIAHAREAASRVLSALSDRQMSERMALDARKREQFQRLKEQFVKDQERRQAARQEELDDDFSYARELRDRERRLKSLEEELERKARQALVDHYSKLSAEAARREQKALWRIQRHRLESARLRFLLEDEKHIQEMLKAVSEAHQPQEPPDVLLSVHPQVTSPGPEHPEGGQGCDSGSAEQHSPAWDGWNRPGLLTPQPLKPLAVGAGGRGLQQAEGARPFSDSLSIGDFLPVGPGAEPSVQTGMVPLLEVALQTINLDLPPSAPGEAPAAASTQPSRPQEYDFSTVLRPAVATSPAPGPLQAAECSLGSSGLQLWEDSCGKMDACGSASRETLLPSHPPRRAALEEGSSQPTERLFGQVSGGGLPTGDYASEIAPTRPRWNTHGHVSDASIRVGENVSDVAPTQPRWNTHGHVSNASISLGESVSDVAPTRPRWNIHGHVSNASIRVGENVSDVAPTRPRWNTHGHVSNASIRVGENVSDVAPTRPRWNTHGHVSDASISLGESVSDMAPARPRWNTHGHVSDASISLGESVSDMAPTRPRWNTHGHVSDTSIRVGENVSDVAPIRSRCNTHGHVSDASISLGEPVSDVVSTRPRWNTHVPIPPPHMVLGALSPEAEPNTPRPQQSPPGHTSQSALSLGAQSTVLDCGPRLPVEVGPSLSSPSSGCGEGSISVGENVSDVAPTQPWWPNTPGDSVSEELGQSRVAGGQEWDCGTHRAWEALGGAGTLRTSLQIGLSTHRKTQLPRAAQAVVRRRRHRRRRLRVGSRPTWQAWQGSTTWSGTRTVTSPCPSRPLLIFCAPCFPGPSPSPWTPRSSLPLMRLLCS

SEQ ID NO: 204527 - DNA, 1467 bp, Artificial Sequence
  derived and/or modified sequence
ctggactgcggccccagactgcccgtggaggtgggccccagcctgagcagccccagcagcggctgcggcgagggcagcatcagcgtgggcgagaacgtgagcgacgtggcccccacccagccctggtggcccaacacccccggcgacagcgtgagcgaggagctgggccccggcagaagcggcgacaccgaggacctgagccccaactggcccctgaacagccaggaggacaccgccgcccagagcagccccggcagaggcgaggaggccgaggccagcgccgccgaggcccagggcggcgagcaggcctacctggccggcctggccggccagtaccacctggagagataccccgacagctacgagagcatgagcgagccccccatcgcccacctgctgagacccgtgctgcccagagccttcgccttccccgtggacccccaggtgcagagcgccgccgacgagaccgccgtgcagctgagcgagctgctgaccctgcccgtgctgatgaagagaagcatcaccgcccccctggccgcccacatcagcctggtgaacaaggccgccgtggactacttcttcgtggagctgcacctggaggcccactacgaggccctgagacacttcctgctgatggaggacggcgagttcgcccagagcctgagcgacctgctgttcgagaagctgggcgccggccagacccccggcgagctgctgaaccccctggtgctgaacagcgtgctgagcaaggccctgcagtgcagcctgcacggcgacaccccccacgccagcaacctgagcctggccctgaagtacctgcccgaggtgttcgcccccaacgcccccgacgtgctgagctgcctggagctgagatacaaggtggactggcccctgaacatcgtgatcaccgagggctgcgtgagcaagtacagcggcgtgttcagcttcctgctgcagctgaagctgatgatgtgggccctgaaggacgtgtgcttccacctgaagagaaccgtgcccagcgccgccgccgtgcaggccagagacgccgccttcagagagggccaccccggcctgcacagacagcccgaccccgccagacacctggtgagagtgcagggccaggtgggccacagaggcagacccggcggcgaccccgcctgcgccagaagagtgcccgcccagggcagactgcaggccgcccccgtgatgaacgtgatccacagcatcttcagcctggtgctgaagttcagaagccagctgatcagccaggcctggggcccccccggcggccccagaggcgccgagcaccccaacttcgccctgatgcagcagagctacaacaccttcaagtactacagccacttcctgttcaaggtggtgaccaagctggtgaacagaggctaccagccccacctggaggacttcctgctgagaatcaacttcaacaactactaccaggacgcctag

SEQ ID NO: 204528 - DNA, 4482 bp, Artificial Sequence
  derived and/or modified sequence
atggccagcatcacccagctgttcgacgacctgtgcgaggccctgctgcccgccgccaagacccacctgggccagagaagcgtgaacagaaagagagccaagagaagcctgaagaaggtggcctacaacgccctgttcaccaacctgttccaggacgagacccagcagctgcagcccgacatgagcaagctgcccgccagaaacaagatcctgatgctgagcttcgacctgagagtgggcggcctgggccccaaggccgacagactggaggagctggtggaggagctggaggccgccccctgctgccccctgctggaggtgggcagcgtgctggacctgctggtgcagctggccggcagcggccccccccaggtgctgcccagaaagagagactacttcctgaacaacaagcacgtgggcagaaacgtgccctacagcggctacgactgcgacgacctgagcgtgttcgagatggacgtgcagagcctgatcagcagagaggagtgcctgtgccacagcatgatccaggagaccctgcaggtgatggaggccgcccccggcaccggcctgcccaccgtgggcctgttcagcttcggcgacccctgcggcgacagattcgagagagacaccagagtgagcctgttcggcgccctggtgcacagcagaacctacgacatggacgtgagactgggcctgccccccgtgcccgacaacgccgacctgagcggcctggccatcaaggtgccccccagcgtggaccagtgggaggacgagggcttccagagcgccagcaacctgacccccgacagccagagcgagcccagcgtgacccccgacgtggacctgtgggaggccgccctgacctacgaggccagcaagagaagatgctgggagagagtgggctgcccccccggccacagagaggagccctacctgaccgaggccggcagagacgccttcgacaagttctgcagactgcaccagggcgagctgcagctgctggccggcggcgtgctgcaggccccccagcccgtgctggtgaaggagtgcgagctggtgaaggacgtgctgaacgtgctgatcggcgtggtgagcgccaccttcagcctgtgccagcccgcccaggccttcgtggtgaagagaggcgtgcacgtgagcggcgccagccccgagagcatcagcagcctgctgagcgaggtggccgagtacggcacctgctacaccagactgagccacttcagcctgcagcccgtgctggacagcctgtacagcaagggcctggtgttccaggccttcaccagcggcctgagaagatacctgcagtactacagagcctgcgtgctgagcaccccccccaccctgagcctgctgaccatcggcttcctgttcaagaagctgggcagacagctgagatacctggccgagctgtgcggcgtgggcgccgtgctgcccggcacctgcggcggcggccccagagccgccttccccaccggcgtgaagctgctgagctacctgtaccaggaggccctgcacaactgcagcaacgagcactaccccgtgctgctgagcctgctgaagaccagctgcgagccctacaccagattcatccacgactgggtgtacagcggcgtgttcagagacgcctacggcgagttcatgatccaggtgaaccacgagtacctgagcttcagagacaagctgtactggacccacggctacgtgctgatcagcaaggaggtggaggactgcgtgcccgtgttcctgaagcacatcgcccacgacatctacgtgtgcggcaagaccatcaacctgctgaagctgtgctgccccagacactacctgtgctggagcgacgtgcccgtgcccagaatcagcgtgatcttcagcctggaggagctgaaggagatcgagaaggactgcgccgtgtacgtgggcagaatggagagagtggccagacacagcagcgtgagcaaggaggagaaggagctgagaatggagatcgccaagcaggagctgatcgcccacgccagagaggccgccagcagagtgctgagcgccctgagcgacagacagatgagcgagagaatggccctggacgccagaaagagagagcagttccagagactgaaggagcagttcgtgaaggaccaggagagaagacaggccgccagacaggaggagctggacgacgacttcagctacgccagagagctgagagacagagagagaagactgaagagcctggaggaggagctggagagaaaggccagacaggccctggtggaccactacagcaagctgagcgccgaggccgccagaagagagcagaaggccctgtggagaatccagagacacagactggagagcgccagactgagattcctgctggaggacgagaagcacatccaggagatgctgaaggccgtgagcgaggcccaccagccccaggagccccccgacgtgctgctgagcgtgcacccccaggtgaccagccccggccccgagcaccccgagggcggccagggctgcgacagcggcagcgccgagcagcacagccccgcctgggacggctggaacagacccggcctgctgaccccccagcccctgaagcccctggccgtgggcgccggcggcagaggcctgcagcaggccgagggcgccagacccttcagcgacagcctgagcatcggcgacttcctgcccgtgggccccggcgccgagcccagcgtgcagaccggcatggtgcccctgctggaggtggccctgcagaccatcaacctggacctgccccccagcgcccccggcgaggcccccgccgccgccagcacccagcccagcagaccccaggagtacgacttcagcaccgtgctgagacccgccgtggccaccagccccgcccccggccccctgcaggccgccgagtgcagcctgggcagcagcggcctgcagctgtgggaggacagctgcggcaagatggacgcctgcggcagcgccagcagagagaccctgctgcccagccacccccccagaagagccgccctggaggagggcagcagccagcccaccgagagactgttcggccaggtgagcggcggcggcctgcccaccggcgactacgccagcgagatcgcccccaccagacccagatggaacacccacggccacgtgagcgacgccagcatcagagtgggcgagaacgtgagcgacgtggcccccacccagcccagatggaacacccacggccacgtgagcaacgccagcatcagcctgggcgagagcgtgagcgacgtggcccccaccagacccagatggaacatccacggccacgtgagcaacgccagcatcagagtgggcgagaacgtgagcgacgtggcccccaccagacccagatggaacacccacggccacgtgagcaacgccagcatcagagtgggcgagaacgtgagcgacgtggcccccaccagacccagatggaacacccacggccacgtgagcgacgccagcatcagcctgggcgagagcgtgagcgacatggcccccgccagacccagatggaacacccacggccacgtgagcgacgccagcatcagcctgggcgagagcgtgagcgacatggcccccaccagacccagatggaacacccacggccacgtgagcgacaccagcatcagagtgggcgagaacgtgagcgacgtggcccccatcagaagcagatgcaacacccacggccacgtgagcgacgccagcatcagcctgggcgagcccgtgagcgacgtggtgagcaccagacccagatggaacacccacgtgcccatcccccccccccacatggtgctgggcgccctgagccccgaggccgagcccaacacccccagaccccagcagagcccccccggccacaccagccagagcgccctgagcctgggcgcccagagcaccgtgctggactgcggccccagactgcccgtggaggtgggccccagcctgagcagccccagcagcggctgcggcgagggcagcatcagcgtgggcgagaacgtgagcgacgtggcccccacccagccctggtggcccaacacccccggcgacagcgtgagcgaggagctgggccagagcagagtggccggcggccaggagtgggactgcggcacccacagagcctgggaggccctgggcggcgccggcaccctgagaaccagcctgcagatcggcctgagcacccacagaaagacccagctgcccagagccgcccaggccgtggtgagaagaagaagacacagaagaagaagactgagagtgggcagcagacccacctggcaggcctggcagggcagcaccacctggagcggcaccagaaccgtgaccagcccctgccccagcagacccctgctgatcttctgcgccccctgcttccccggccccagccccagcccctggacccccagaagcagcctgcccctgatgagactgctgtgcagctag

SEQ ID NO: 204529 - DNA, 5460 bp, Artificial Sequence
  derived and/or modified sequence
atggcaagcatcactcagctatttgatgacctttgtgaggcattgctaccggcagccaaaacccacctcggccaaaggagtgtgaaccgcaagcgagccaaaagaagtctgaagaaggtcgcctacaatgccctattcaccaatctgttccaggacgagactcaacagctgcaacccgatatgtcaaagctcccggcccgtaataagatactgatgttgagcttcgatctacgcgtaggcggtttaggaccaaaggccgatagactggaagagctggtggaagagctggaggccgctccttgttgcccactgctggaagtgggcagtgtcctggaccttctggtccagctcgctggatcgggcccacctcaggtgttgcctcggaagcgggattactttttgaacaataagcatgtaggtaggaacgtcccatactccgggtatgattgcgatgatttgagcgtcttcgagatggatgtgcaaagcctgatctccagagaagagtgcctctgccacagtatgattcaggaaacattgcaagtgatggaggcagcccctgggacgggcctgccgactgttggactcttcagctttggagacccatgcggcgacagattcgaacgcgacactcgcgtgtcactcttcggggcgctagttcattcaagaacctacgatatggatgttaggctgggacttccccctgttcctgataacgcggacttgtcaggcctggccattaaggtacccccctcagtagaccagtgggaggacgagggtttccaatccgccagtaatctcactcctgattcccagtccgaaccctcagtgaccccagatgtggatctgtgggaggcagccttgacatacgaagcttccaaacgtaggtgttgggagagggtgggatgtccaccaggtcatagggaagagccgtaccttacagaagccgggagggacgcattcgacaagttttgtcgcctgcaccagggagaattacaactgctggcaggcggggtgctccaggcacctcagcctgtactagtcaaagagtgcgagttggtaaaggacgtgctcaatgtcctgatcggagtggtgtcagcgacattttcgttgtgtcagcctgctcaagccttcgtcgtgaaacgcggagttcacgtatccggcgctagccctgagtcaatttcgtccctgctgagcgaagttgctgaatatgggacctgctacacacgtctgagtcactttagcctgcagccagtccttgattccctgtatagcaaagggcttgtatttcaggcctttacctctggactgaggagatacctccaatactatagggcctgtgtcttgtctacaccacccacccttagcctgctgacaatcggattcctgttcaaaaagctgggaaggcagctgcgctatttggccgaactctgcggagtgggtgcagtgctgcccggcacttgtggtggaggtcccagggcagcatttccaaccggcgtcaaactgctttcctacctataccaggaggctctgcacaattgcagcaacgagcactatccagtactgctgagtttgttaaaaacctcctgtgaaccctatacacgatttattcatgattgggtctactccggagtatttagagacgcatacggcgagtttatgatacaggtgaatcacgagtatttgagctttcgagataagctgtactggactcacggttatgttctcatatccaaggaagtcgaagattgcgtaccagttttcctgaaacacatcgcccatgacatttatgtttgcggaaagaccatcaacctacttaagctgtgctgccctaggcactatctttgctggtccgatgtccctgttcccagaatatcagtgattttcagtttggaagaactgaaagagatagagaaagattgcgccgtgtatgtgggaagaatggagcgagtggccaggcacagctccgtctctaaggaagagaaagaactcaggatggagatcgccaaacaggaactaatcgctcacgcacgtgaggccgcaagcagggtcctgtccgccttatcagatcgccagatgtcagaacggatggcattggacgctaggaagagggagcagtttcagcggctcaaggaacagtttgtgaaggaccaggaacgcagacaagctgcaagacaggaagagcttgacgatgatttttcctacgctcgggagcttcgtgaccgggagcggaggctgaagtctctggaagaagaacttgaaaggaaggccagacaggccctcgttgatcattacagtaagttaagcgccgaggccgcaaggagagaacaaaaagctctgtggcgcatccagcgacacagactcgaaagcgcacggctcagatttctgctggaggatgagaagcacatccaagagatgttaaaggcagtgtcggaggctcaccagccgcaggagccgccggatgtcctgctctcagtgcatcctcaggtaacgtcccctgggccagaacacccagagggaggtcaaggctgcgattcaggttcagctgaacagcactcacctgcgtgggatggttggaatcgacctgggttgctgactcctcagccgctgaagccccttgcagtaggtgccgggggcagaggactccagcaagccgagggcgccagacctttcagtgactccttgagcattggagatttcttacccgttggccccggcgcggaacctagcgtccagacgggcatggttccactgctcgaggtcgcactccagactatcaatcttgacctcccaccctctgctcctggcgaagcccctgctgcagcttccactcagccttcccgccctcaggagtatgacttctctacggttctgcgtccggccgtggcaacgtcccctgctcctggaccccttcaggcagcagagtgtagtcttggcagctctgggctgcagttgtgggaggatagttgtgggaagatggacgcctgtggtagcgcatcaagggagaccctactgccctcccacccaccacgacgagccgccctggaagaaggctcttcccagccgacggaaaggctgtttgggcaggtgagtgggggcggcctgcccaccggcgattatgcttcagaaattgctcctacaaggcctagatggaacacccatggacatgtctccgatgcgtctatcagggttggagaaaacgtgtccgatgtggcccctacccagcctagatggaatacccacggtcatgtcagcaacgcttcaatttccctgggggaaagcgtttccgacgtagcgcccacgaggcccaggtggaatatacacggccacgtgtcaaacgcaagcatcagagtgggagagaatgtcagtgacgtcgcccccactcgccccaggtggaatacacatggccatgtgtcaaatgcgagcattcgcgtgggcgagaacgttagtgacgttgctccaactcggccaagatggaatacacatggtcacgtgagcgatgcctcaatctctcttggtgaatccgtctctgacatggcccccgccagacccagatggaacactcacggccatgtgagtgatgcaagtatcagcctgggcgaatcagtctcagacatggcccctacgagaccaagatggaacacccatggtcacgtgtctgatacgtctatcagggtgggggagaacgtctctgatgtagcccctatacggagccgctgtaatactcatggccatgtgtccgacgcatcaatttctctgggtgaacccgtatccgacgtggtgtccacacgccctagatggaacacacacgtacccatacctcccccccacatggttctgggggccctgtcaccagaggctgagccaaacacaccacgacctcaacaaagtccacccggccatacaagtcagtctgccctctcgctgggtgcccagtcaactgtgctggattgtggcccacgattaccagttgaggttgggccctccttgagctccccatcgtctggctgtggagagggttccatctccgtgggcgaaaacgtgtccgatgtggctccgactcaaccatggtggcctaacacacctggcgactccgtatctgaggaactcggtcctggacggtccggtgatacggaagacttgagccccaactggccgctgaacagtcaggaggatacggcggcacagtcttcaccggggcggggagaggaggccgaagccagtgcagcagaggcacaggggggcgaacaggcataccttgctgggctcgccggtcaataccatcttgagaggtaccccgactcctatgagagtatgagcgagccacccatcgcgcacttgttgagacctgtcctgcctagggcgttcgcattcccagtcgatccacaggtccaatcggcagccgacgaaactgccgtgcagctgagcgagttgcttacactcccagtgcttatgaagcgatcaatcacagcacccttagctgcccacatctccctggttaacaaggctgccgtggactatttcttcgtggagcttcaccttgaagcccactacgaagccctgagacacttcctgttgatggaagacggggagttcgcgcagtctttgtccgacctgttatttgagaaacttggcgccgggcagacccccggcgagctcctgaatccactggtacttaactccgttctgtcaaaggccctgcagtgctccttgcatggggataccccccatgcaagcaatctgtcactggcgttgaaataccttcctgaagtgttcgctcccaatgcccctgatgttttatcctgtctagaactcaggtacaaggttgactggcctctgaacatcgttattactgaaggttgcgttagcaaatatagcggggtgttctcctttctgctgcagttgaagctgatgatgtgggctctgaaagatgtgtgcttccacctcaaacggaccgcactactaagccacatggcaggcagcgtacagtttcgtcaactgcagttgttcaagcatgaaatgcagcattttgtcaaggtgatccaaggttacattgccaatcagattctgcacgtaacatggtgtgagttcagggctcgccttgcaaccgttggggacttagaggagatccagcgtgcgcacgcagagtacctgcataaggccgttttcagagggctcctgaccgagaaggctgcacctgtgatgaatgtgatccatagcatcttttcgttggttttgaaattccgctcacagctgatttctcaggcttggggacctcctggtggtccccgaggagccgaacacccaaatttcgcactgatgcagcagagctacaacactttcaagtactattcgcatttcctgttcaaagtagtgacaaaactggttaaccgggggtatcagccccatcttgaggattttcttctgaggattaactttaataactactaccaggatgcatag

SEQ ID NO: 204530 - DNA, 1467 bp, Artificial Sequence
  derived and/or modified sequence
ctagattgcggacctcggctgcctgtggaggtcggcccatcactttcctcaccatccagcggatgtggcgagggttccatttcagtaggagagaatgtctccgacgtagctcctacccaaccatggtggcctaacacccctggagatagcgtgagcgaggaactaggcccgggacggagcggggatacggaggatctgagcccgaactggccactcaatagccaggaggacacagctgcccagtcatctcccggtcgcggggaggaggccgaggcgtcagcagctgaagctcagggtggagaacaggcatacttggctggactagccgggcaataccatttagaacgttatcctgattcttatgagtctatgtcagagcctccaattgcacacctgctgaggccggttttgcctcgggcattcgcctttcctgtagacccacaggtgcaatccgcagctgacgaaactgccgttcagctctctgagttacttaccttgccagtcctcatgaaaagatccatcacagcacccctagccgcccatataagccttgtcaacaaggcggcagtggattatttcttcgtcgagctgcacctagaggcccactacgaagcacttcgacatttcctccttatggaggatggtgagtttgcccaatccttgtccgacctgttgtttgaaaagttaggggccggacaaaccccaggcgagttactaaatcccctcgtgctgaacagtgttctctctaaggccctgcagtgttccttacacggggatacaccacacgcctctaacctgagcttggcgctaaaataccttcctgaagtcttcgctcccaatgcacccgacgttctgagctgtctggaactgcgctataaggtcgattggccgttgaatatcgttatcactgagggctgcgtgtccaaatacagtggcgtgttttcgtttcttttgcagcttaagctgatgatgtgggcattgaaggatgtgtgcttccatttgaagcgcaccgtcccttctgccgcagccgtgcaggcccgagatgccgcattcagagaggggcatcctggcctccacaggcagccagacccagccaggcaccttgtcagggttcaaggacaggtgggacaccgtgggcggcccggcggggacccggcctgcgccaggcgcgtgccagcccaaggtcggctgcaagccgctccagtgatgaacgtgatacacagcatcttttctctggtgcttaaattcaggagccagctcatcagtcaggcgtggggccctcctggcggtccaaggggcgcggagcacccgaattttgcattgatgcagcagtcatataatacttttaagtattactcacactttcttttcaaggtcgtcactaaactagtgaacagagggtatcagccccacctggaagattttctgttgcgaattaatttcaataactactaccaagacgcatag

SEQ ID NO: 204531 - DNA, 4482 bp, Artificial Sequence
  derived and/or modified sequence
atggcttcgatcacgcagctcttcgacgatctttgcgaggccctgctgcccgccgctaaaacacacttgggccaacgatccgtcaaccgcaaacgcgctaagagatctctcaagaaagtggcatacaacgccttgttcaccaatctgttccaagacgagacacagcaactccagcctgacatgagcaagctgcctgcacgtaataagattctgatgctgagcttcgaccttcgcgtcggcggactgggccctaaagctgatcggcttgaagaactggtggaagagctcgaggcagccccttgctgccccttgctcgaagtcgggtccgttttggacttactagtgcagcttgccgggtccggcccaccccaagtcctgcctagaaaacgtgattatttcctgaacaataagcacgttggaagaaacgtgccctacagtgggtatgattgcgatgacttatccgtgttcgagatggacgttcagtcactcatatctagggaggagtgcctgtgccacagcatgattcaggagacgcttcaggttatggaagcagcccccggcaccggcctacccactgtggggcttttcagttttggggacccgtgtggcgaccgattcgagcgagacacaagagtctcactgttcggcgccctcgtccattccaggacatatgatatggacgtgcgcctgggtctcccaccagtcccggacaacgcggacctgtctggtttggcaatcaaggtacctccctcagttgaccaatgggaagatgaggggtttcaaagcgcaagcaatctgactcccgacagtcagagtgagccatctgtcacgccggacgtcgatttgtgggaagcagcgcttacctacgaggcctccaaacgacgatgctgggaacgcgtcggctgccccccgggacacagggaagaaccctacctaacagaggcgggacgagatgcatttgacaaattttgtcggctgcaccagggcgagctccaactcctggcgggcggggtgctgcaggctccccaacctgtactggtaaaggagtgtgagcttgtaaaggatgtgcttaatgtgctgatcggcgttgtgtctgctacattcagtctatgtcaacccgctcaagctttcgtcgtcaaacgtggggtgcacgtgagtggggcctcccccgagtctatatctagcctgctgtcagaagtggctgaatatggcacttgctacactcggttatcacatttttccctccagccagtacttgactcgctgtacagcaaaggtctggtgtttcaagctttcactagcgggctgcggcggtatctgcagtactatagggcttgcgtactgtcaacaccgcctaccctttccttgttaacaatcggatttctgttcaaaaagcttggccggcagttacgctatctcgcagagctttgcggcgtcggcgccgtgcttcctggaacctgcgggggcgggcctcgcgcagcatttcccaccggtgtgaaactgttgtcctacctctatcaagaggctctccacaactgtagtaacgaacactaccccgttctgctgagtctgcttaagacttcatgcgaaccctacacccgttttatccacgactgggtctactccggggtgtttcgggacgcttatggagagttcatgatccaggtgaaccacgagtacctttcattccgggacaagctgtactggacacatggctatgtactgataagtaaagaagttgaggattgtgtacctgtgttcctgaaacatatcgcccatgacatttacgtatgcggtaaaacaatcaatctactgaagctgtgttgtcctaggcactacctgtgttggtcggatgtcccagtgcccaggatttctgtgatttttagcctcgaggaattaaaggaaatcgagaaagactgcgctgtgtacgtgggcagaatggaacgggtcgctcgccacagcagcgtcagcaaggaagagaaagagctgcgtatggagatcgccaaacaagaactgatcgctcatgctcgcgaggcggcttcccgggtgttgtcagccctcagtgaccgccagatgtcggagcggatggccctcgatgccagaaaacgggaacagttccagagactgaaggagcagttcgtaaaagaccaagagcgccggcaagccgctcgacaggaggagctcgacgacgacttcagctatgctcgcgaactacgggacagagaacggcggcttaagagcctcgaggaggaacttgagagaaaggcccgtcaggccttggtggaccactactctaaactgtccgccgaggctgccaggagggagcagaaagccttgtggaggattcaacgccacagattagagtctgctcgcctgagatttctgcttgaggatgaaaaacatattcaggaaatgctgaaagctgtttccgaggcccatcagccacaggagcctcctgatgtgctgctatccgtgcacccccaagtcacctcgccggggcccgaacatcccgagggcggccagggatgcgacagcggatccgcggaacagcattctccggcatgggatggctggaacagacctggcctcttaactcctcagccattgaagccactagcggtgggagccggaggacggggcctgcagcaagcagaaggagcacgccctttctccgactccctgtcaatcggagattttctgccggttggcccgggagccgagccttcagtgcagaccggcatggtcccactgcttgaggtggcacttcagaccattaaccttgatcttcctcctagtgcaccaggagaagcaccggctgccgcttcgactcagcccagtagaccccaggagtatgacttctcgacggtgctcaggcctgctgtagcgacgagcccagcccccggccccctgcaggcagccgagtgctcacttggcagttccggacttcagctgtgggaggactcctgcgggaaaatggacgcttgtgggtccgcatcgcgcgagacacttctgcccagtcacccacccagaagggccgctctggaggaaggaagctcccagcctaccgagaggctgtttggtcaagtgagcggtggggggctacccacaggtgactacgcatccgaaattgcgcctacacgcccccgttggaatactcacgggcacgtctctgacgcatctatcagggtgggggagaacgtgtccgacgttgcgcccacgcagcctagatggaacacccatggccatgtgagcaatgcaagcatctctctgggtgagtcagtgtcggacgtggcccctacccgtccgcgctggaacatccacggccacgtaagtaacgctagcattcgagtgggcgagaatgtctctgacgtagctcctactcgcccaaggtggaatacccacggccacgtgtccaacgcgtccatcagagttggcgaaaatgtttccgatgttgctcccacccgccctaggtggaatacacacggacacgtcagtgacgccagcatctcactgggtgaatcagttagtgatatggctcctgcacgcccacgctggaacacccacggtcatgttagcgatgctagtatttctctgggggagagcgtatccgacatggctcccacgcggcctaggtggaatacacatggacatgttagcgacaccagtattagggtcggggagaatgtaagcgacgtcgctcccatcagatcgcgatgtaacactcacggccacgtcagtgacgcatcaattagtctgggcgagccagtgagcgacgtggtgtccactcgcccacgatggaacacccacgttcctatccccccaccccacatggtcctgggcgccctgtcgcctgaggcagagcccaatacgcctcgcccgcagcagagcccccctgggcatacatctcaatcagccttgagccttggcgctcaatcaaccgtcctggactgcggcccgcgcctccccgttgaagtcggaccgagtctatcttccccatcctctggatgtggcgagggatcaatttcagtcggagaaaatgtgtcagacgtggcgcctactcaaccctggtggcctaacactcctggcgactccgtgtccgaagagctgggccaatctcgtgtggcagggggccaggaatgggactgtggcacgcatcgggcgtgggaggccctgggcggggcaggtaccctacgaacttcactccagatcggcctgagcacacacaggaaaacccagctcccacgcgccgcacaagccgttgtgagacgcagacggcaccggcgcagacgtctgagggtgggatctagaccaacctggcaagcttggcaggggtctacaacctggtctggcacgcgtacagttacatccccatgtccaagccgtccattactcatcttctgcgctccctgctttccaggaccatctccctctccctggacaccgaggagttctctgccactaatgagactgctgtgttcatag

SEQ ID NO: 204532 - DNA, 5460 bp, Artificial Sequence
  derived and/or modified sequence
atggccagcatcacccagctgtttgatgacctgtgtgaggccctgctgcctgctgccaagacccacctgggccagaggtctgtgaacaggaagagggccaagaggagcctgaagaaggtggcctacaatgccctcttcaccaacctcttccaggatgagacccagcagctgcagcctgacatgagcaagctgcctgccaggaacaagatcctgatgctgagctttgacctgcgggtgggcggcctgggccccaaggctgaccggctggaggagctggtggaggagctggaggccgccccctgctgccccctgctggaggtgggctctgtgctggacctgctggtgcagctggccggcagcggccccccccaggtgctgcccaggaagagggactacttcctgaacaacaagcacgtgggcagaaatgtgccctacagcggctatgactgtgatgacctgtctgtgtttgagatggatgtgcagagcctcatcagccgggaggagtgcctgtgccacagcatgatccaggagaccctgcaggtgatggaggccgcccctggcaccggcctgcccaccgtgggcctcttctcctttggagacccctgtggggacagatttgagcgggacaccagggtgtccctgtttggagccctggtgcacagcaggacctatgacatggatgtgcggctgggcctgccccctgtgcctgacaatgctgacctgagcggcctggccatcaaggtgcccccatctgtggaccagtgggaggatgagggcttccagagcgccagcaacctgaccccagacagccagagcgagcccagcgtgaccccagatgtggacctgtgggaggccgccctgacctatgaggccagcaagaggcgctgctgggagcgggtgggctgccccccaggccaccgggaggagccctacctgacagaagctggaagagatgcctttgacaagttctgccgcctgcaccagggcgagctgcagctgctggccggcggcgtgctgcaggccccccagcctgtgctggtgaaggaatgtgagctggtgaaggatgtgctgaatgtgctgattggagtggtgtctgccaccttcagcctgtgccagcctgcccaggcctttgtggtgaagaggggcgtgcacgtgtctggggccagccctgagagcatcagcagcctgctgtctgaggtggccgagtatggcacctgctacacccggctgagccacttcagcctgcagcctgtgctggacagcctgtacagcaagggcctggtgttccaggccttcaccagcggcctgcggcgctacctgcagtactaccgggcctgtgtgctgagcaccccacccaccctgagcctgctgaccatcggcttcctgttcaagaagctgggccggcagctgcgctacctggccgagctgtgtggggtgggcgctgtgctgcccggcacctgtggcggcggccccagggctgccttccccactggagtgaagctgctgagctacctgtaccaggaggccctgcacaactgcagcaatgagcactaccctgtgctgctgagcctgctgaagaccagctgtgagccctacacccgcttcatccatgactgggtgtacagcggggtcttcagagatgcctatggagagttcatgatccaggtgaaccacgagtacctgtccttccgggacaagctgtactggacccacggctacgtgctgatcagcaaggaggtggaggactgtgtgcctgtgttcctgaagcacatcgcccatgacatctacgtgtgtgggaagaccatcaacctgctgaagctgtgctgccccaggcactacctgtgctggagcgatgtgcctgtgccccgcatcagcgtcatcttcagcctggaggagctgaaggagattgagaaggactgtgctgtgtatgtgggccgcatggagcgggtggcccggcacagctctgtgtccaaggaggagaaggagctgaggatggagatcgccaagcaggagctgattgcccacgcccgggaggccgccagccgggtgctgagcgccctgagtgaccggcagatgtctgagaggatggccctggatgccaggaagcgggagcagttccagaggctgaaggagcagtttgtgaaggaccaggagcggcggcaggccgcccggcaggaggagctggatgatgacttctcctatgcccgggagctgcgggaccgggagcggcggctgaagagcctggaggaggagctggagaggaaggcccggcaggccctggtggaccactacagcaagctgtctgctgaggccgcccggcgggagcagaaggccctgtggaggatccagaggcaccggctggagagcgcccggctgcgcttcctgctggaggatgagaagcacatccaggagatgctgaaggctgtgtctgaggcccaccagccccaggagcccccagatgtgctgctgtctgtgcacccccaggtgaccagccctggccctgagcaccctgagggcggccagggctgtgacagcggcagcgctgagcagcacagccctgcctgggatggctggaacagacctggcctgctgaccccccagcccctgaagcccctggccgtgggcgctgggggccggggcctgcagcaggccgagggcgcccggcccttcagtgacagcctgagcatcggggacttcctgcctgtgggccctggagctgagcccagcgtgcagacaggcatggtgcccctgctggaggtggccctgcagaccatcaacctggacctgccccccagcgcccctggagaggccccagctgctgccagcacccagcccagccggccccaggagtatgacttcagcacagtgctgcggcctgctgtggccaccagccctgcccctggccccctgcaggccgctgagtgcagcctgggcagcagcggcctgcagctgtgggaggacagctgtgggaagatggatgcctgtggcagcgccagccgggagaccctgctgcccagccaccccccccggcgggccgccctggaggagggcagcagccagcccacagagcggctgtttggccaggtgtctgggggcggcctgcccaccggggactatgccagcgagatcgcccccacccggccccgctggaacacccacggccacgtgtctgatgccagcatccgggtgggagaaaatgtgtctgatgtggcccccacccagccccgctggaacacccacggccacgtgtccaatgccagcatcagcctgggggagagcgtgtctgatgtggcccccacccggccccgctggaacatccacggccacgtgtccaatgccagcatccgggtgggagaaaatgtgtctgatgtggcccccacccggccccgctggaacacccacggccacgtgtccaatgccagcatccgggtgggggagaatgtgtctgatgtggcccccacccggccccgctggaacacccacggccacgtgtctgatgccagcatcagcctgggggagagcgtgtctgacatggccccagcccggccccgctggaacacccacggccacgtgtctgatgccagcatcagcctgggggagagcgtgtctgacatggcccccacccggccccgctggaacacccacggccacgtgtctgacaccagcatccgggtgggagaaaatgtgtctgatgtggcccccatccgcagccgctgcaacacccacggccacgtgtctgatgccagcatcagcctgggggagcctgtgtctgatgtggtgtccacccggccccgctggaacacccacgtgcccatccccccaccccacatggtgctgggcgccctgagccctgaggccgagcccaacaccccccggccccagcagagccccccaggccacaccagccagagcgccctgagcctgggcgcccagagcacagtgctggactgtggcccccggctgcctgtggaggtgggccccagcctgagcagccccagcagcggctgtggggagggcagcatctctgtgggagaaaatgtgtctgatgtggcccccacccagccctggtggcccaacacccctggggacagcgtgtctgaggagctgggccctggccgcagcggggacacagaggacctgagccccaactggcccctgaacagccaggaggacacagctgcccagagcagccctggccgcggggaggaggccgaggccagcgctgctgaggcccagggcggggagcaggcctacctggccggcctggccggccagtaccacctggagcgctacccagacagctatgaatccatgtctgagccccccatcgcccacctgctgcggcctgtgctgccccgggcctttgccttccctgtggacccccaggtgcagagcgctgctgatgaaacagctgtgcagctgtctgagctgctgaccctgcctgtgctgatgaagaggagcatcacagcccccctggccgcccacatcagcctggtgaacaaggctgctgtggactacttctttgtggagctgcacctggaggcccactatgaggccctgcggcacttcctgctgatggaggatggagaatttgcccagagcctgagtgacctgctgtttgagaagctgggcgccggccagaccccaggagagctgctgaaccccctggtgctgaacagcgtgctgagcaaggccctgcagtgcagcctgcatggagacaccccccacgccagcaacctgagcctggccctgaagtacctgcctgaggtgtttgccccaaatgccccagatgtgctgagctgcctggagctgcgctacaaggtggactggcccctgaacatcgtcatcacagagggctgtgtgtccaagtacagcggggtcttctccttcctgctgcagctgaagctgatgatgtgggccctgaaggatgtgtgcttccacctgaagaggacagccctgctgagccacatggccggctctgtgcagttccggcagctgcagctgttcaagcatgagatgcagcactttgtgaaggtgatccagggctacatcgccaaccagatcctgcacgtgacctggtgtgagttccgggcccggctggccaccgtgggggacctggaggagatccagagggcccacgccgagtacctgcacaaggctgtgttccggggcctgctgacagagaaggccgcccctgtgatgaatgtcatccacagcatcttcagcctggtgctgaagttccgcagccagctgatcagccaggcctggggccccccaggcggccccagaggagctgagcaccccaactttgccctgatgcagcagagctacaacaccttcaagtactacagccacttcctgttcaaggtggtgaccaagctggtgaacagaggctaccagccccacctggaggacttcctgctgcgcatcaacttcaacaactactaccaggatgcctag

SEQ ID NO: 204533 - DNA, 1467 bp, Artificial Sequence
  derived and/or modified sequence
ctggactgtggcccccggctgcctgtggaggtgggccccagcctgagcagccccagcagcggctgtggggagggcagcatctctgtgggagaaaatgtgtctgatgtggcccccacccagccctggtggcccaacacccctggggacagcgtgtctgaggagctgggccctggccgcagcggggacacagaggacctgagccccaactggcccctgaacagccaggaggacacagctgcccagagcagccctggccgcggggaggaggccgaggccagcgctgctgaggcccagggcggggagcaggcctacctggccggcctggccggccagtaccacctggagcgctacccagacagctatgaatccatgtctgagccccccatcgcccacctgctgcggcctgtgctgccccgggcctttgccttccctgtggacccccaggtgcagagcgctgctgatgaaacagctgtgcagctgtctgagctgctgaccctgcctgtgctgatgaagaggagcatcacagcccccctggccgcccacatcagcctggtgaacaaggctgctgtggactacttctttgtggagctgcacctggaggcccactatgaggccctgcggcacttcctgctgatggaggatggagaatttgcccagagcctgagtgacctgctgtttgagaagctgggcgccggccagaccccaggagagctgctgaaccccctggtgctgaacagcgtgctgagcaaggccctgcagtgcagcctgcatggagacaccccccacgccagcaacctgagcctggccctgaagtacctgcctgaggtgtttgccccaaatgccccagatgtgctgagctgcctggagctgcgctacaaggtggactggcccctgaacatcgtcatcacagagggctgtgtgtccaagtacagcggggtcttctccttcctgctgcagctgaagctgatgatgtgggccctgaaggatgtgtgcttccacctgaagaggacagtgcccagcgctgctgctgtgcaggccagagatgctgccttccgggagggccaccctggcctgcaccggcagcctgaccctgcccggcacctggtgcgggtgcagggccaggtgggccaccggggccggcctggaggagaccctgcctgtgccaggagagtgcctgcccagggccgcctgcaggccgcccctgtgatgaatgtcatccacagcatcttcagcctggtgctgaagttccgcagccagctgatcagccaggcctggggccccccaggcggccccagaggagctgagcaccccaactttgccctgatgcagcagagctacaacaccttcaagtactacagccacttcctgttcaaggtggtgaccaagctggtgaacagaggctaccagccccacctggaggacttcctgctgcgcatcaacttcaacaactactaccaggatgcctag

SEQ ID NO: 204534 - DNA, 4482 bp, Artificial Sequence
  derived and/or modified sequence
atggccagcatcacccagctgtttgatgacctgtgtgaggccctgctgcctgctgccaagacccacctgggccagaggtctgtgaacaggaagagggccaagaggagcctgaagaaggtggcctacaatgccctcttcaccaacctcttccaggatgagacccagcagctgcagcctgacatgagcaagctgcctgccaggaacaagatcctgatgctgagctttgacctgcgggtgggcggcctgggccccaaggctgaccggctggaggagctggtggaggagctggaggccgccccctgctgccccctgctggaggtgggctctgtgctggacctgctggtgcagctggccggcagcggccccccccaggtgctgcccaggaagagggactacttcctgaacaacaagcacgtgggcagaaatgtgccctacagcggctatgactgtgatgacctgtctgtgtttgagatggatgtgcagagcctcatcagccgggaggagtgcctgtgccacagcatgatccaggagaccctgcaggtgatggaggccgcccctggcaccggcctgcccaccgtgggcctcttctcctttggagacccctgtggggacagatttgagcgggacaccagggtgtccctgtttggagccctggtgcacagcaggacctatgacatggatgtgcggctgggcctgccccctgtgcctgacaatgctgacctgagcggcctggccatcaaggtgcccccatctgtggaccagtgggaggatgagggcttccagagcgccagcaacctgaccccagacagccagagcgagcccagcgtgaccccagatgtggacctgtgggaggccgccctgacctatgaggccagcaagaggcgctgctgggagcgggtgggctgccccccaggccaccgggaggagccctacctgacagaagctggaagagatgcctttgacaagttctgccgcctgcaccagggcgagctgcagctgctggccggcggcgtgctgcaggccccccagcctgtgctggtgaaggaatgtgagctggtgaaggatgtgctgaatgtgctgattggagtggtgtctgccaccttcagcctgtgccagcctgcccaggcctttgtggtgaagaggggcgtgcacgtgtctggggccagccctgagagcatcagcagcctgctgtctgaggtggccgagtatggcacctgctacacccggctgagccacttcagcctgcagcctgtgctggacagcctgtacagcaagggcctggtgttccaggccttcaccagcggcctgcggcgctacctgcagtactaccgggcctgtgtgctgagcaccccacccaccctgagcctgctgaccatcggcttcctgttcaagaagctgggccggcagctgcgctacctggccgagctgtgtggggtgggcgctgtgctgcccggcacctgtggcggcggccccagggctgccttccccactggagtgaagctgctgagctacctgtaccaggaggccctgcacaactgcagcaatgagcactaccctgtgctgctgagcctgctgaagaccagctgtgagccctacacccgcttcatccatgactgggtgtacagcggggtcttcagagatgcctatggagagttcatgatccaggtgaaccacgagtacctgtccttccgggacaagctgtactggacccacggctacgtgctgatcagcaaggaggtggaggactgtgtgcctgtgttcctgaagcacatcgcccatgacatctacgtgtgtgggaagaccatcaacctgctgaagctgtgctgccccaggcactacctgtgctggagcgatgtgcctgtgccccgcatcagcgtcatcttcagcctggaggagctgaaggagattgagaaggactgtgctgtgtatgtgggccgcatggagcgggtggcccggcacagctctgtgtccaaggaggagaaggagctgaggatggagatcgccaagcaggagctgattgcccacgcccgggaggccgccagccgggtgctgagcgccctgagtgaccggcagatgtctgagaggatggccctggatgccaggaagcgggagcagttccagaggctgaaggagcagtttgtgaaggaccaggagcggcggcaggccgcccggcaggaggagctggatgatgacttctcctatgcccgggagctgcgggaccgggagcggcggctgaagagcctggaggaggagctggagaggaaggcccggcaggccctggtggaccactacagcaagctgtctgctgaggccgcccggcgggagcagaaggccctgtggaggatccagaggcaccggctggagagcgcccggctgcgcttcctgctggaggatgagaagcacatccaggagatgctgaaggctgtgtctgaggcccaccagccccaggagcccccagatgtgctgctgtctgtgcacccccaggtgaccagccctggccctgagcaccctgagggcggccagggctgtgacagcggcagcgctgagcagcacagccctgcctgggatggctggaacagacctggcctgctgaccccccagcccctgaagcccctggccgtgggcgctgggggccggggcctgcagcaggccgagggcgcccggcccttcagtgacagcctgagcatcggggacttcctgcctgtgggccctggagctgagcccagcgtgcagacaggcatggtgcccctgctggaggtggccctgcagaccatcaacctggacctgccccccagcgcccctggagaggccccagctgctgccagcacccagcccagccggccccaggagtatgacttcagcacagtgctgcggcctgctgtggccaccagccctgcccctggccccctgcaggccgctgagtgcagcctgggcagcagcggcctgcagctgtgggaggacagctgtgggaagatggatgcctgtggcagcgccagccgggagaccctgctgcccagccaccccccccggcgggccgccctggaggagggcagcagccagcccacagagcggctgtttggccaggtgtctgggggcggcctgcccaccggggactatgccagcgagatcgcccccacccggccccgctggaacacccacggccacgtgtctgatgccagcatccgggtgggagaaaatgtgtctgatgtggcccccacccagccccgctggaacacccacggccacgtgtccaatgccagcatcagcctgggggagagcgtgtctgatgtggcccccacccggccccgctggaacatccacggccacgtgtccaatgccagcatccgggtgggagaaaatgtgtctgatgtggcccccacccggccccgctggaacacccacggccacgtgtccaatgccagcatccgggtgggggagaatgtgtctgatgtggcccccacccggccccgctggaacacccacggccacgtgtctgatgccagcatcagcctgggggagagcgtgtctgacatggccccagcccggccccgctggaacacccacggccacgtgtctgatgccagcatcagcctgggggagagcgtgtctgacatggcccccacccggccccgctggaacacccacggccacgtgtctgacaccagcatccgggtgggagaaaatgtgtctgatgtggcccccatccgcagccgctgcaacacccacggccacgtgtctgatgccagcatcagcctgggggagcctgtgtctgatgtggtgtccacccggccccgctggaacacccacgtgcccatccccccaccccacatggtgctgggcgccctgagccctgaggccgagcccaacaccccccggccccagcagagccccccaggccacaccagccagagcgccctgagcctgggcgcccagagcacagtgctggactgtggcccccggctgcctgtggaggtgggccccagcctgagcagccccagcagcggctgtggggagggcagcatctctgtgggagaaaatgtgtctgatgtggcccccacccagccctggtggcccaacacccctggggacagcgtgtctgaggagctgggccagagccgggtggccggcggccaggagtgggactgtggcacccaccgggcctgggaggccctgggcggggccggcaccctgcggaccagcctgcagatcggcctgagcacccacaggaagacccagctgccccgggccgcccaggccgtggtgagaagaagaagacacagaagaagaaggctgcgggtgggcagccggcccacctggcaggcctggcagggcagcaccacctggagcggcaccaggacagtgaccagcccctgccccagccggcccctgctgatcttctgtgccccctgcttccctggccccagccccagcccctggacccccaggagcagcctgcccctgatgaggctgctgtgcagctag

SEQ ID NO: 204535 - DNA, 5460 bp, Artificial Sequence
  derived and/or modified sequence
atggccagcatcacccagctgttcgacgacctgtgcgaggccctgctcccagccgccaagacccacctgggacaacggtcggtcaatcggaagagggctaagaggtctctcaagaaggtggcgtataatgctctttttaccaatctcttccaggacgagactcagcagcttcagcctgacatgagcaagttgcctgccagaaataaaatcctcatgctctcctttgacctccgtgtgggcggactggggccgaaagctgataggctagaggagctcgtggaggagctagaagcggccccatgctgcccattgttggaggtcggctccgttttagacttactcgttcagctagcgggtagcgggcctccccaggtgctgcccaggaagagggactactttctaaacaataagcacgtgggacggaacgtcccttattctggttacgattgcgatgacttaagcgtgtttgagatggatgtccagtccctgatctcgagggaggagtgcctgtgccattccatgatccaggagactctgcaggtgatggaagccgcccctggaacaggtctccccaccgtcggactgtttagttttggagatccatgtggcgaccgcttcgaaagggacactcgagttagcttgtttggagcccttgtccactcacgcacctacgatatggacgtgcgtttaggccttccacccgtacctgataatgcagacctgtctggactggctattaaggttccaccttcagtcgaccagtgggaagacgagggcttccaatcagcctccaacctgacacccgacagccagtccgagccgtcagtcactccagatgtggacttgtgggaggcggcactgacatacgaagcctcaaagagaagatgttgggaacgggtcggctgcccaccgggacaccgcgaggagccttatctgacagaggcgggcagagatgcattcgacaagttctgtagactccaccagggcgaactgcagcttcttgcgggaggggtgctgcaagcaccacagcctgtcctcgtcaaggagtgcgaacttgtcaaagacgttctaaatgtactcattggagtggtgtctgccacattcagcttatgtcagcccgcgcaggctttcgtggttaagcggggggtccacgtctcaggggcttcccccgagtccattagttccctcctgagcgaggtggcagagtacggcacgtgttatactcggctcagccacttcagcctgcaacctgtgctggactctctctattccaagggtctggttttccaagcctttacttccggactgaggaggtatttgcaatactacagagcctgcgtgttgagcacccctcctaccctttccctcttaaccataggttttctttttaaaaagcttggtcgccagctcagatatctggccgaactgtgtggcgtaggggccgtgctgcctggcacatgtggcggtggccctagggccgcattccccacgggcgtcaaactcttaagctatctttaccaggaggccttacacaactgcagcaacgagcactatcccgtgttactgtcccttctgaagacttcatgcgaaccctatactagattcattcacgattgggtgtacagcggggtgttcagagatgcttatggcgaattcatgatacaggtgaatcacgaatacttatcttttagggataaactctactggactcacggctatgtcctgatttccaaagaggtagaggactgcgtccctgtgttcctaaaacatattgcccatgacatctatgtgtgtggcaaaacaataaatctgctgaagctgtgttgcccacggcactacctgtgctggtcagacgtacctgtgcctagaatatctgtgatctttagcctggaagagttaaaagagattgagaaggactgcgccgtctatgtaggaagaatggaacgggtggcgagacactccagcgtctctaaagaagagaaagagctcagaatggagatcgcaaaacaggagctaattgcccatgctagggaagcagcttcaagagtactttcagccttgagtgatcgacagatgagcgaaaggatggcactagatgctcggaaaagggaacaattccaaagactcaaagagcagtttgtaaaggaccaggagagacggcaagctgctcggcaggaggaattggatgatgatttttcctatgccagagaattgcgcgatcgcgagcgccggcttaagtctctggaggaagagctggaacgcaaggcacggcaagctctcgtcgatcactattccaaactttctgccgaggccgcccgcagggagcagaaggccttgtggaggattcagcgacatcgtctggagagcgcacggcttagatttttactggaagacgagaagcatatccaggagatgctgaaggctgtgtccgaggcccaccagcctcaggagccacccgacgttctcttgtcagtgcacccgcaagtgactagcccaggacctgagcatcccgagggcggacaaggttgtgactctggcagtgcggaacaacattcaccggcttgggacggatggaaccgccctggccttcttacaccccagcccctcaagcccctggccgtgggagcgggcggacggggcctgcagcaggcagagggagccagacctttttccgatagtctgtcaattggggatttcctcccagtcggccccggcgcagaaccttccgtgcagaccggcatggtgcctttgcttgaggtggcactccagacgatcaatctggatctcccaccttccgcaccaggagaagcacccgcagcagcaagcactcagccttcacggcctcaggagtacgacttctcaacagttcttcgacccgctgtagcaacatcacccgcccctgggccactgcaagcagcagagtgcagcttgggaagctccggactacaattgtgggaggattcctgcggaaagatggacgcctgcggatccgctagcagggaaaccctcctgccttcacacccaccccgccgtgccgctctagaggagggatccagccaaccgacagaacggctcttcggccaggtctctgggggcggcctgccaactggggactatgcttccgagatcgccccaacccgccctagatggaatacacacggacacgtttctgatgccagcattcgcgtcggcgagaatgtgtcggacgtggcccccacgcagccccggtggaacacacacggacacgtgagtaacgcatccatcagcctcggcgagtccgtttctgatgttgcccctactcgcccccggtggaacatccatggacacgtgtctaacgcatctatccgagtgggcgaaaatgtgtctgacgtggctcctacgcggccccggtggaacacacacggccatgtctcaaacgcaagcatcagggttggtgagaacgtcagtgacgtagccccaacccggccccggtggaatactcatggacacgtttcagacgcttcaatctcacttggggagagtgtgagtgatatggcacctgccaggccacgctggaacacacatgggcatgtgtccgacgcctctatttccttgggggaatcagtgagcgatatggcccccactcggccgcgctggaacactcacggccacgtgtccgatactagtatccgcgtgggggagaacgtctccgatgtggcaccaattaggtccaggtgcaacactcacggccacgttagcgatgctagtattagtctgggtgagcctgtgagtgatgtcgtaagcacccggcccagatggaacacacatgttccaattccaccacctcatatggtgttaggcgctcttagcccagaggctgagccaaacaccccccgacctcagcagtcaccaccgggacacacatcccagagcgccctgagtctgggagctcagtccactgtgttggattgcgggcctaggttgcccgtggaggtgggaccctccctcagttcacctagctctggctgtggtgagggcagcatctcagtcggcgagaacgtgagcgacgttgcgccgacccagccatggtggcctaacactcccggtgactctgtgtccgaggagctcggacctgggcggtcaggggacacggaggacctttccccgaactggcctctgaactcccaagaagacacagctgcacaatctagcccgggtcggggggaggaagccgaagcctcagccgcagaagcccaggggggcgagcaagcgtatctagccggactcgccggccaatatcacctggaacgttatcccgatagttatgagagtatgtcagaacccccaatcgcacacctcctgcgcccagtgctacctcgtgccttcgcctttccagtggaccctcaagtccagtcagcagccgatgaaaccgcggttcagctttccgagctcctgaccctgccagtgcttatgaaacgctctatcacagccccattagctgcccatatttcactggtaaacaaggcagcagtggattatttcttcgtggaactccatctggaagcccattacgaggcactgagacacttcctgttgatggaagatggtgagttcgctcagtctctcagcgatctgctgttcgagaaactcggggcaggtcagacccctggtgaactgctaaatcctctggtgctgaactctgttctgagtaaggccttacagtgctctcttcatggagataccccgcacgcctccaatctttcactcgctctgaaatatctcccagaggtgttcgcccccaatgcaccagacgtgttgtcgtgtctggaactgagatataaagtcgattggcctctaaatatagtgataaccgagggctgcgtgagcaagtactccggggtcttcagttttctcctgcaactcaagctcatgatgtgggctctgaaggacgtctgctttcacctgaaacgcactgcgttgttatcccatatggcagggagtgtgcagtttcggcagctgcaactcttcaagcacgaaatgcagcatttcgtcaaagtgattcagggctatattgctaaccagatcctccatgtgacttggtgtgaattcagagccagactggccaccgtcggggatctcgaagagatccagcgcgcgcatgctgagtatctgcacaaggctgtattccgcggtctgctgactgaaaaagcagctccagttatgaacgtgattcactctatattctcactggttctcaagttccgcagtcagctgataagtcaagcttggggccctcctggaggcccacgcggcgccgagcaccctaacttcgcattgatgcagcagtcctataacacttttaagtactattcacatttcctgtttaaggtggtcactaagctggtaaaccggggctatcagcctcacctggaagattttcttctaaggatcaattttaacaattattatcaggacgcatag

SEQ ID NO: 204536 - DNA, 1467 bp, Artificial Sequence
  derived and/or modified sequence
ctggactgcggcccccggctgcccgtggaggtgggccccagcctgagctcaccttcatctggatgcggcgaagggtcgattagtgtcggcgagaatgtgagcgatgtcgctcctactcagccctggtggcctaatactccaggcgactcggtcagtgaagaattgggacccggaaggtccggcgacaccgaagacctttcccctaattggccattgaactcacaggaagataccgcagcccaaagctcccctggacggggcgaggaagcagaggcatctgcagctgaagcacagggtggcgaacaggcctatctggcaggcctggcggggcagtaccatttggagcgatacccggactcttatgagtctatgtcagaaccaccaatcgcacacttgctccgtccggtcctccctcgagcttttgccttcccggtggatccccaagtgcagagcgctgctgatgagaccgcagtgcaactctctgaacttctcaccttaccagtgctgatgaagcggtccataaccgcccctctcgcagcccatatttctttggtgaacaaagcagcggtcgactatttttttgtggagctgcacctggaggcacactacgaggcactgcgacattttcttctgatggaggacggcgagtttgcgcaatccctgtctgatcttctctttgagaaactgggggctggtcagactcctggcgaattgctcaaccctctggtacttaactccgtgctgtccaaggctctacagtgttcgttgcacggcgacactcctcacgccagcaatctgagcctcgccctgaagtatcttccggaggtgttcgcgccaaacgcccctgacgtactgtcttgcctggagctcagatacaaggtcgactggccgctgaatattgtgatcaccgagggttgcgtgagcaaatatagcggggtctttagtttcctactccagctcaaactaatgatgtgggcgttgaaggacgtctgttttcacctgaaaaggactgtcccctcggccgcggccgtgcaggctcgcgacgccgccttcagggaagggcaccctggtctccacagacagccggatcctgccaggcacttggtaagggtccagggccaggtgggacataggggaaggccagggggcgatccagcatgcgctaggcgggtcccagcccaaggccggcttcaggcagccccagtgatgaacgtgattcattccatatttagtttggtgctgaaattccggtctcagttgatctcgcaggcctggggccctcctggtgggcctcggggggctgagcaccccaattttgccctgatgcagcagtcttataacacgtttaaatactatagtcactttctgttcaaggtcgttactaagttggttaacaggggatatcagccgcatctggaagattttctgctgcgcatcaacttcaacaattactaccaggatgcctag

SEQ ID NO: 204537 - DNA, 4482 bp, Artificial Sequence
  derived and/or modified sequence
atggccagcatcacccagctgttcgacgacctgtgcgaggccctgctcccagctgcaaaaactcaccttgggcagcgctccgttaatcggaaaagagcgaaacggtctctcaagaaggttgcctacaatgccctatttaccaacctgtttcaggatgaaacacaacaactccagccggacatgtctaagcttcccgcccggaacaaaatcctgatgctgagcttcgacctgagagtgggcggcctgggacccaaggcagatagactcgaggaactcgttgaagaacttgaagccgcaccttgttgccctctcctggaggtgggttctgtcctcgatctgttagtacagctagctggaagcggaccccctcaggtccttccacggaaacgggattatttcctgaacaacaagcacgtcgggagaaacgtgccatacagcggctacgactgcgacgacctgtcggtgtttgagatggatgtgcagagtcttatctctagagaggaatgcctgtgccatagcatgattcaggagacactacaggttatggaagccgcccctggcaccgggctccccaccgttggcttgttttccttcggagacccctgtggggaccgatttgagagggacacccgggtgtccctcttcggggccctggttcactctcgcacttacgacatggacgtgagactcggactgccccctgtccctgataatgccgaccttagtggactcgctatcaaggtgcccccatccgtagaccagtgggaagacgagggttttcagagcgcttccaacctcactccagattcccaatctgagccctctgtgacacctgatgttgatctgtgggaagccgctctgacgtacgaagcctcgaaacgcagatgctgggaacgcgtcgggtgccccccggggcatcgagaggagccttacctcactgaagccggacgggacgcgtttgataagttctgtaggttacatcagggcgagttgcagctgttagcagggggcgtgctacaagccccccagcctgtcctcgtgaaggaatgcgagcttgttaaggacgtcctcaacgttctgatcggggtcgtgagtgccactttcagcctttgtcagccagcccaggcgtttgtggtcaaacgtggggttcacgtctctggggcctcaccagagagcatcagtagtctgctttcagaagtggcggaatacggcacatgttatactcggctgtcccacttttctttgcagcccgtgctggattctttatatagcaaaggactggtctttcaagcatttacgtctggcctgcggcggtatctgcaatattacagggcttgcgtgttaagtaccccacccacactgtccctgctgacaattggattcctgtttaagaaactcggtcgccagctccgctacctggccgagctgtgcggagttggcgccgttcttcctggcacatgtgggggaggcccgcgtgctgcatttccgacgggtgttaaactcctctcatatttgtatcaggaggctctgcataattgttctaacgagcactacccagtgcttttgtcacttttaaagacttcatgtgagccttatacaagatttatccatgattgggtgtactctggggtcttcagagatgcatatggggaatttatgatacaggttaaccatgaatacctttcttttcgagacaaactttattggacccacggctacgttttgattagtaaggaggtcgaggattgcgttcccgtgtttctcaagcacatcgcgcatgatatctatgtttgcggcaagaccatcaacctgctgaagctctgttgcccccgtcattatctgtgttggtctgacgtgccagttcctcgcatctctgtcatcttttcattagaagagcttaaagaaatcgagaaagattgtgccgtgtacgtcgggaggatggagcgagttgcacggcactcttcagtcagcaaggaagagaaggaactacggatggaaatcgccaaacaagaactcatcgcccatgcacgcgaagccgcatcacgggtgctcagcgccctttcagaccgtcagatgtccgaacgcatggctctggatgcgcgaaagcgggaacagtttcagcgactcaaagagcaattcgttaaggaccaagaaaggagacaggcagccaggcaggaagagctagatgacgatttcagttatgcccgggaactgagggacagagaacgccggctaaaaagtttggaagaggagcttgaacgtaaagctagacaggctctcgtggaccactattctaagctctcagccgaagctgctcggagagaacagaaggccctttggaggatccaacggcatcggttagaatctgcccgcctgcgattcctgctcgaggacgagaaacacatccaagagatgctgaaagccgtttccgaagctcatcaaccacaagagccccccgatgtccttctttcagtacaccctcaggtaacgtcccctggcccagagcacccagaaggcggacaaggttgcgacagcggttccgctgagcagcacagccctgcctgggacggatggaatcggcccggattgctcacaccgcaacccctgaagccacttgctgtcggagctggcggacgggggctgcagcaagctgaaggggccagaccattttcggacagtctgagcattggggactttctccccgtgggccccggcgccgaacccagcgtgcagactggcatggtacctctgttggaagtggcgctgcagacaattaatctcgacctccctccatctgcacctggagaggctcccgccgccgcttccacgcagcccagccggcctcaggagtacgactttagtaccgtgctgcgccctgctgtagcaactagtccagccccagggcctctccaggccgctgagtgctccctgggctcatcaggcctgcagctgtgggaagactcttgcggaaagatggacgcttgtggaagcgccagtagggagacactgttgccaagtcaccctccacggcgggcggctctggaggagggctccagtcaacccacagaacgcctgttcggccaggtctccggtggtggactgcctacgggagattatgcctcggaaatagcacctacccgccctagatggaacacccacggtcacgtgagcgatgctagcattagggtcggagagaacgtgtctgacgtggccccaactcagcctaggtggaatacacatggccacgtgtcaaatgcatccatttccctgggcgagtccgtgtctgacgtggcccccaccagacctaggtggaacatccatggtcacgtgtccaacgccagcattcgcgttggcgagaacgtttccgatgttgcgcctacccgcccgcgttggaacactcacggccatgtaagtaacgcctccattagggtaggggaaaacgtctccgacgtagcccccacccgtccaaggtggaacacccacgggcacgtgagcgacgcatcgatttcactgggcgagagtgtctcagacatggcccccgctcggccccgatggaacactcatggacacgttagcgatgccagtatttctttaggagaatcagtttctgacatggccccaactagacctcgatggaatactcatggacacgtctccgacactagtatccgcgtgggcgagaatgtcagtgatgtggcccccatccgctctagatgtaatacgcacggacacgtgagcgatgcgagcatatcgctgggcgagccagtctctgatgtagtgagcacccgaccaagatggaacacacatgtgccaattccaccaccacacatggttttaggcgcattaagccctgaggccgagcccaacacccccaggccccagcagtccccaccaggtcacacaagtcagtctgcccttagtctgggggctcagtcaaccgtcttggactgcggacctcggctaccagtggaggtgggtccatctttaagtagtccatcaagtgggtgtggcgagggtagtattagcgttggggaaaatgtatcagacgttgctcccacacaaccatggtggccaaacacacccggcgattctgtgagcgaggagttagggcaatctagggttgccggagggcaagaatgggactgcgggacccaccgcgcctgggaggccttggggggggcgggcaccctccggacttctcttcagatcggcctgagcacacaccgcaagacacaattgcccagagcggcccaggcagtggtcagaaggagacggcaccgacggcggcggcttagagtaggctcccgtcctacatggcaagcctggcaggggtccaccacatggagcgggacccgcaccgttaccagtccctgtccatccaggcctcttttgatattttgtgccccctgctttcctggccccagcccatccccatggacgccccggtcttcactgcccctcatgcgccttctctgtagctag

SEQ ID NO: 204538 - DNA, 5460 bp, Artificial Sequence
  derived and/or modified sequence
atggcctccattacacaactcttcgacgatctgtgtgaagcactgttgccggctgcaaagacgcacttgggacaacggtctgtgaataggaaaagagcaaagaggtcactgaagaaagtggcgtataacgctctttttacaaacctctttcaggacgagacacagcagctgcaaccagacatgtccaagctgcctgcccgaaacaagatcctgatgctgagcttcgatcttcgcgtgggaggtcttggacctaaggctgacagattagaagagctggtcgaggagctggaagcggctccatgttgtcctctcttggaggtcggctctgtgttggatctgctggtgcagttggccggttctggacctccgcaagtgctccccagaaagagggattacttcctgaataataaacacgtgggaaggaatgtgccatatagtgggtatgactgcgacgatctgtcagtgtttgaaatggacgtgcaatccctgatcagtcgggaggagtgtctctgtcactcaatgatccaggagaccctgcaggttatggaagccgcaccaggtaccggactgcctaccgtcgggctgtttagctttggcgatccttgtggagatcggtttgagagggacacaagggtttcactatttggagccctagtacattctcggacatacgatatggatgtcagactggggctacccccagtgcccgacaatgcagacctaagcggattggctattaaggtcccaccaagcgtggatcaatgggaagacgaggggtttcaatcggcttcaaatctgactccggattctcaatccgagccatctgttacccccgatgtggatctttgggaggcagccctcacatatgaggcatctaagcggaggtgttgggaacgggtgggttgtcctcctggacatcgggaggagccctatctgacagaggctgggcgagatgccttcgacaaattctgccggctgcaccaaggagaattgcagctgttagctggcggagtgctacaggcacctcagcctgtgctggttaaggagtgcgaattagtgaaagatgtgctaaacgtccttatcggcgtggtaagcgcgaccttttcactgtgtcagccagcacaggcttttgtcgttaagcgaggcgtgcatgtgtctggggctagcccagagtctatcagctccttgctgtctgaggttgccgagtacggaacatgctacacccggctgagtcactttagtcttcagcctgtgctggattcgctctacagcaagggcctggtctttcaggcctttacaagcgggctgagaagataccttcagtattacagggcatgtgtgctgtctactcccccaactcttagcctccttaccatcgggtttctgtttaaaaaactgggaagacagctgaggtatctggccgaactctgcggtgtgggggctgtgttgcctggcacctgtggcggaggtccgagggcagcctttcctaccggggttaaattgctgtcctacctgtaccaagaggcactgcacaactgctccaatgagcactaccccgttcttctaagtctgctgaagacttcgtgtgagccttataccagatttattcacgattgggtgtatagtggcgtctttcgagatgcttacggagagtttatgattcaggttaaccacgaatacctttcttttcgagataaactgtactggacccatggctacgtactgatttccaaggaggtcgaggattgtgtgccagtcttcctgaagcacattgcccacgacatttacgtttgtgggaagacgattaacctgttgaagttgtgctgcccacggcactatctttgttggtccgatgtgccagttccacgcatctctgtcattttttctttagaggagctgaaagagatcgagaaagattgtgccgtatatgtagggaggatggagcgcgtcgcccgacactcttccgtgtccaaggaggagaaagagctgaggatggagattgcgaagcaggagctgattgcacacgctcgagaagccgcttccagagtcctcagtgccctctcggatcgccaaatgagtgaaaggatggcactggacgcccgaaagcgagagcagttccagcgcctgaaagagcaattcgttaaagaccaggagagaagacaggctgctaggcaggaagagttagatgacgacttctcttatgcccgtgagttaagagaccgagagaggagactgaagtctctggaggaagagctagaacgcaaggctcgccaagctctggtggaccactatagcaaactcagcgcagaagccgcacgcagggaacagaaagctctgtggagaattcaacggcatcgactagagtccgcacgcctgcgcttcctcctggaggatgagaagcacatacaggaaatgctgaaggcagttagtgaagcccaccaacctcaggaacctcctgatgttctgctgagcgtgcaccctcaggtgaccagcccgggtcccgagcaccccgagggcggtcaaggctgtgacagtggatcagcagagcagcactcgcccgcttgggatgggtggaacaggccgggattactaactcctcagcccctgaagcccctggctgtaggagctgggggaaggggactgcagcaggccgagggggctagaccttttagcgactccttatctataggcgattttctccccgtggggccaggcgctgaaccatctgtccagactggcatggtccccctgcttgaagtcgccctccagaccataaacttagacctgccacccagcgccccaggtgaagcgcctgccgcagctagcacccagccttctcggcctcaagaatatgacttttcaactgtcctgaggcctgcagttgccacttccccagccccaggcccactccaagcagctgaatgttctctgggcagtagcgggctacagctgtgggaggacagctgcgggaagatggacgcctgtggaagcgcctctcgagagactctacttccctcccatccacctagaagagccgctctcgaggaagggtcaagtcagcccactgaaagattgtttggccaagtgtccggaggtggcctgcctactggtgattatgccagcgaaatcgcaccgaccaggcctaggtggaacacccacggccacgtgagtgatgcaagtatcagggtgggcgaaaacgtctctgatgtggccccaacccagcctcgctggaacacacatggacacgtaagtaacgcttccatatccttgggcgagtccgtcagcgacgtagctcctactcgccctcggtggaatatccacggtcatgtgtcaaacgccagcataagggttggcgagaatgtgtccgatgttgcccctacaaggcccaggtggaacacccatgggcacgtgagtaatgcatcaatccgagttggcgagaatgtctctgacgtcgcaccaaccaggccacgatggaacacacatggacatgtaagcgacgcctccatctccctcggggagtcagttagcgatatggcacctgctaggccaagatggaacacacacggccacgttagcgatgctagcatctcattgggtgagagtgtgagcgacatggctcctacacggcctcgttggaacactcacgggcacgtctcagatacatcaatacgcgtcggggagaacgttagcgatgtggctccaatccgatcccggtgcaatacccatggccatgtttccgacgcaagcataagccttggtgagccagtgtcagatgtggtcagtacccggcctagatggaatacgcacgtgccaattccaccaccccacatggtgttgggagccctgtcaccagaagccgagccaaacacccccaggcctcagcagtctccaccagggcatacatcacagtccgccttgagtttaggcgctcagagcacagtgcttgattgtggccctaggcttcctgtcgaggtgggtccatctctttcctccccctcttctggctgtggagaggggtcaatatctgtgggcgagaatgtgagcgatgtggctcccacccagccctggtggcccaatactcctggcgattcagtcagcgaagaactgggcccaggcaggtcaggcgataccgaggacctttcccctaattggccactgaattcccaggaagatacagccgctcaaagtagtccaggcagaggagaggaagccgaagcttcggccgcagaagctcagggtggcgaacaggcgtatcttgctggccttgctggacagtaccacctcgaacgatatcccgatagctacgaatccatgtcagagcctcccatcgcccacctgttgcgccctgttctgcccagagcattcgccttccccgtggatccccaggtgcagtcagccgctgacgaaaccgcagtgcaattaagtgaactgctcaccctgcctgtcttgatgaagcgcagcattaccgctcccctggcagctcacatctcgctggtcaacaaagccgcagttgattacttcttcgtggagctgcatctagaagcacattacgaagcactcagacactttctgctcatggaagatggcgagttcgctcaatccctgagcgatctgctgttcgagaaactgggggctgggcagacacctggagaactgcttaacccacttgtcttgaattccgtactctccaaagccctccagtgctcactccacggtgatacaccccatgcatctaatctctctcttgctctcaaatatctgcctgaagttttcgcacccaatgccccagacgtgctatcctgtctggaactcagatataaggttgactggcccctgaatatcgttatcaccgaggggtgcgtctccaagtactctggtgtattctcattcctgcttcagctgaagttgatgatgtgggccctgaaggatgtgtgtttccacctgaaacgcaccgcactcctatctcacatggccggaagcgtgcagtttcgacagctccagctgttcaagcacgagatgcaacatttcgtgaaggtcatacagggatacatcgcgaatcaaatcttgcatgttacttggtgtgaattcagagcacgtcttgctactgtaggtgacttggaggaaatccagcgggcacacgcggagtatttacacaaggctgtttttcggggacttttgacagagaaagctgccccagtgatgaacgtaatacactctattttctcactcgtgcttaaattccggtcgcagttaatctcacaggcctgggggccacccggtggaccaagaggcgctgagcacccaaatttcgccctgatgcagcaatcttataacaccttcaagtattattcccacttcctctttaaagtagtgacgaaactggtaaaccgaggataccaaccacacctggaggattttctcctgcgaataaacttcaataattactaccaggatgcttag

SEQ ID NO: 204539 - DNA, 5612 bp, Artificial Sequence
  derived and/or modified sequence
attcagcctcttcggaccctctctcactccctgtcttccggagcgtgagtgaagcccgggtgaggtgttttcccacacgccgggggcccggagctgagaaggggcatggccagcatcacgcagctgttcgacgacctgtgtgaggccctcctgccggctgccaagactcacctgggccagcgcagtgtgaaccggaagagggcaaagcggagcctcaagaaggtggcctacaatgctcttttcacaaatctttttcaagatgagactcaacagctgcagcctgacatgtcaaaactaccagcgagaaacaagatcctcatgttgtcctttgacttgagagtgggtggcctgggccccaaggccgaccgtttggaggagcttgtggaggagctggaagcagccccttgctgtccgcttttggaggtggggtctgttttggacctcctggttcagctggcagggagtggtccccctcaagttctgccgagaaaacgagactacttccttaacaacaagcatgtggggagaaacgttccgtacagcggctatgattgcgacgacctgagtgtgtttgagatggacgttcagtctctgatctccagagaagagtgtttgtgtcacagcatgatccaggaaacacttcaggttatggaggctgctccaggcactggcctgcccaccgtcgggctcttctcatttggtgacccttgtggtgacaggttcgagagagacacccgggtctcgctcttcggggcccttgtgcacagccgcacttatgacatggacgtccgactgggcctgccccccgtgccagacaatgcggacctctctgggctggctattaaggtcccaccgagtgtggatcagtgggaagacgaaggattccagtcagcgtccaacttgactcctgattcccagtctgagcccagcgtgaccccagacgtggacctgtgggaagccgcacttacctatgaggccagcaagcggaggtgctgggagcgagttggctgcccccctggccacagagaggagccttacctgacggaggcgggaagggacgctttcgacaagttctgcaggctccaccaaggggagctccagctgcttgctgggggcgtcctacaggccccgcagcccgtgctggtgaaggagtgcgagctggtgaaagacgtgctgaacgtcttgattggggtcgtgtctgccacgttttcgctctgccagccggcccaggcctttgtggtgaagcggggcgtccacgtgtcaggagcgtctcccgagagcatcagcagcctgctctcggaagtggccgagtatgggacctgctacacgcgcctgagtcatttctctctgcagcccgtcctggactctttgtacagcaagggcctcgtgttccaggccttcaccagtggcctgaggaggtacctgcagtattaccgggcctgcgtcctttccactccgcccaccctgagcctcctcaccattggttttctcttcaagaaacttggccggcagctcaggtacctggccgagctctgtggcgttggcgctgtgctcccgggcacctgtggaggaggccccagggccgcgtttcccaccggcgtgaagctgctgtcctacctctaccaggaggctctgcacaactgcagcaacgagcactaccctgtactgctgtccctgctgaagaccagctgcgagccctacacccggttcatccacgactgggtgtacagcggggtgttcagagacgcttatggcgagttcatgattcaggtgaaccacgagtacctcagcttccgagataagttgtactggacacatggctacgtgctcatctccaaagaggtggaggactgtgttcccgtgtttctgaagcacattgcccacgacatatacgtctgcggaaagaccattaacctgctgaagctctgctgcccccggcattacctctgttggtccgacgtccctgtcccccggatctcggtgattttctcccttgaggagttgaaggagattgagaaggactgtgccgtctacgttgggcgcatggagagggtggcccgccacagctctgtcagcaaggaggagaaggaattacgtatggaaattgcaaaacaagaattaatcgctcatgcccgggaagcagcatccagggtcctgagtgcactgagtgaccggcagatgtcagaacggatggccttggatgcccggaagcgtgagcagtttcagaggctgaaagaacaatttgtgaaggaccaggagcgacgccaggcggccaggcaggaggagctggatgatgacttcagctacgcccgtgaactccgagacagggagagaaggctgaagtccctggaggaggagctggagaggaaggcgaggcaggcactggtcgaccactacagcaagctctctgcagaggcagctcgtcgggagcagaaggcactgtggagaatccagaggcaccgactggagagtgcacggcttcgttttctcttagaagatgagaaacacattcaggagatgctgaaagcagtgtctgaggctcaccagccccaggagccgccagacgtcctcttgagcgtgcacccccaggtcacgtctccgggccctgagcacccagagggaggccaaggctgtgattctgggtctgcagagcaacactcgcctgcctgggatggctggaacaggccaggcctgctgaccccacagccccttaagcctctagcagtgggggctggtggcagggggctgcagcaggcggagggggccagacccttctctgacagcctcagcattggagacttcctacctgtgggcccaggggctgagccgtccgtgcagactggcatggtccctctcctggaggtggcgctgcagaccattaacttggacctgcccccctcagctcctggggaggcacccgcagcagccagcactcagccctccaggccacaggagtacgactttagtactgtcctgaggccagctgtggccacctcacctgcaccagggcccctgcaggctgcagagtgcagcttgggcagctcagggctacagctgtgggaggacagttgtgggaagatggatgcctgtggctccgcctcgcgggagactctgctcccctcacacccacccaggcgtgctgctctggaggaggggagcagccagcccacagagcggctctttgggcaggtgtcagggggtggtcttcccacaggggactacgcttctgaaatagctcccacccggccacggtggaacacccacgggcacgtgtctgacgccagcatcagggtcggggagaatgtgtcagatgtggctcccacccagccacggtggaacacccacggacacgtatccaatgccagcatcagcttaggggagtctgtgtcagatgtggctcccactcggccacggtggaacatccatggacatgtgtccaacgccagcatcagggtcggggagaatgtgtcagatgtggctcccaccaggccacggtggaatacccacgggcacgtgtccaacgccagcatcagggttggggagaacgtgtcggacgtggctcccacccggccacggtggaacacccatggacacgtgtccgatgccagcatcagcttgggggagtctgtgtcagacatggctcccgcccggccacggtggaacacccatggacacgtgtctgatgccagcatcagcttgggggagtctgtgtcagacatggctcccacccggccacggtggaacacccacggacatgtgtctgacaccagcatcagggttggggagaacgtatcggacgtggctcccatccggtcacggtgcaacacccatggacacgtgtccgacgccagcatcagcttgggggagcctgtgtcggatgtggtttccacccggccacggtggaacacccatgtacccatccctccgccccacatggtgctgggggctctctcaccagaagctgagcccaacacacccaggccccaacagagcccccctggccacacgtcccagtcagcgctcagcctgggagcacagagcactgtgctggactgtgggccacggctgcctgtagaagtggggccatctctgtcctcccccagctcgggctgcggggaggggagcatcagcgtgggggagaacgtgtcagacgtggctcccacccaaccatggtggcccaacaccccgggagacagtgtctctgaagaactaggccctgggaggagcggggacactgaggacctctctccaaattggcctctcaactcacaggaagacacagctgcccagagcagcccaggccgtggtgaggaggcggaggcatcggcggcggaggctcagggtggggagcaggcctacctggcaggcctggcagggcagtaccacttggagcggtacccggacagttacgagtccatgtccgagccgcccattgctcatcttttgcgccccgtgcttccccgggccttcgccttccccgtggacccccaggtccagtctgccgctgatgagactgctgtgcagctgagcgagttgctgacgctgcccgtgctcatgaagcgctccatcacggcaccgctggccgcccacatctccttggtgaacaaggccgctgtcgactacttcttcgtggagctgcacctggaggcgcactatgaggcactgcggcacttcctgctgatggaggacggcgagttcgcccagtccctcagcgacctgctctttgagaagcttggagctgggcaaacgcccggagagctgctcaacccgctggtgctgaactctgtgctgagcaaggccctgcagtgcagcctgcatggggacaccccgcacgcctccaacctctccctcgctctcaagtacctgcccgaggtgtttgcccccaacgccccggatgtgctgagctgcctggagctcaggtacaaggtggactggcctctcaacattgtcatcaccgagggctgcgtgagcaagtacagcggcgtcttctccttcctgctgcagctgaagctcatgatgtgggcgctcaaggacgtctgcttccacctcaagcgcacagccctgctgagccacatggccggctctgtgcagttccgtcagctgcagctgttcaagcacgagatgcagcatttcgtgaaggtcatccagggctacatcgccaaccagatcctgcacgtcacctggtgcgagttcagggccaggttggccaccgtgggcgacctggaggagatccagcgtgcgcacgcagagtacctgcacaaggccgtcttcaggggcctgctcacggagaaggcggcgcccgtcatgaacgtcatccacagcatcttcagcctcgtgctcaagttccgcagccagctcatctcccaggcctgggggccccctgggggcccgcggggtgcagagcaccccaactttgcactcatgcagcagtcctacaacaccttcaagtactactcccactttctcttcaaagtggtgaccaagctggtgaaccgcggctaccagccccacctggaggactttctgctgcgcatcaacttcaacaactactaccaggacgcctgaggctgctctgcgggggacgtgcacaataaaggtgttctcggaccctg

SEQ ID NO: 204540 - DNA, 1509 bp, Artificial Sequence
  derived and/or modified sequence
ctggactgtgggccacggctgcctgtagaagtggggccatctctgtcctcccccagctcgggctgcggggaggggagcatcagcgtgggggagaacgtgtcagacgtggctcccacccaaccatggtggcccaacaccccgggagacagtgtctctgaagaactaggccctgggaggagcggggacactgaggacctctctccaaattggcctctcaactcacaggaagacacagctgcccagagcagcccaggccgtggtgaggaggcggaggcatcggcggcggaggctcagggtggggagcaggcctacctggcaggcctggcagggcagtaccacttggagcggtacccggacagttacgagtccatgtccgagccgcccattgctcatcttttgcgccccgtgcttccccgggccttcgccttccccgtggacccccaggtccagtctgccgctgatgagactgctgtgcagctgagcgagttgctgacgctgcccgtgctcatgaagcgctccatcacggcaccgctggccgcccacatctccttggtgaacaaggccgctgtcgactacttcttcgtggagctgcacctggaggcgcactatgaggcactgcggcacttcctgctgatggaggacggcgagttcgcccagtccctcagcgacctgctctttgagaagcttggagctgggcaaacgcccggagagctgctcaacccgctggtgctgaactctgtgctgagcaaggccctgcagtgcagcctgcatggggacaccccgcacgcctccaacctctccctcgctctcaagtacctgcccgaggtgtttgcccccaacgccccggatgtgctgagctgcctggagctcaggtacaaggtggactggcctctcaacattgtcatcaccgagggctgcgtgagcaagtacagcggcgtcttctccttcctgctgcagctgaagctcatgatgtgggcgctcaaggacgtctgcttccacctcaagcgcacagttccgtcagctgcagctgttcaagcacgagatgcagcatttcgtgaaggtcatccagggctacatcgccaaccagatcctgcacgtcacctggtgcgagttcagggccaggttggccaccgtgggcgacctggaggagatccagcgtgcgcacgcagagtacctgcacaaggccgtcttcaggcggcgcccgtcatgaacgtcatccacagcatcttcagcctcgtgctcaagttccgcagccagctcatctcccaggcctgggggccccctgggggcccgcggggtgcagagcaccccaactttgcactcatgcagcagtcctacaacaccttcaagtactactcccactttctcttcaaagtggtgaccaagctggtgaaccgcggctaccagccccacctggaggactttctgctgcgcatcaacttcaacaactactaccaggacgcctgaggctgctctgcgggggacgtgcacaataaaggtgttctcgga

SEQ ID NO: 204541 - DNA, 1467 bp, Artificial Sequence
  derived and/or modified sequence
cttgactgtggccctagactgcctgtggaggtgggaccaagccttagttccccatcgtctggctgcggcgaaggctcaatatctgtcggcgagaacgtgagcgacgtggctcccacacagccctggtggcccaatactcccggagacagcgtaagcgaggaactgggacccggacgtagtggagatacagaggatcttagcccgaattggcccttgaatagccaagaagacaccgctgcacagtcttccccaggtcgcggagaggaggctgaagcatctgcagctgaggcccaggggggagagcaagcatatctggcgggactcgccggacagtatcacctggaacgttatcctgatagctacgaatcaatgtcggagccaccgatagcccatttgttaagacccgtgctgccacgcgcttttgcattccccgttgacccccaagtgcaaagtgcggctgatgagactgctgtgcagctgtccgagttgctcacgctcccagtgctcatgaagcgctcaatcactgctcctctggctgcgcatataagccttgtaaataaggccgctgtggattacttcttcgtggagctgcatcttgaggctcattacgaagctttgcgtcactttctgcttatggaggacggagaatttgcccagtctctgtccgacctgctttttgagaagctcggcgctggacagactccaggcgagcttctaaacccgctggtgctgaatagcgtcctttccaaggcactgcaatgcagcctccatggagacactcctcacgcctcaaatctgtctttagcgctaaagtacctgccggaggtgttcgccccaaatgccccagatgtgctgtcttgcctcgagttgcggtataaggtagactggccacttaatatcgtcattaccgagggttgcgtgtctaagtactctggcgtcttcagttttttgctgcagctcaagctgatgatgtgggctctcaaagacgtttgtttccacctaaagcggaccgtcccttctgctgcagctgtgcaggctagggatgcagcctttagggagggtcaccctggcctccaccggcagcctgatcccgcaaggcatctggtgcgtgtgcagggacaggttggacataggggccgacccggtggggatcctgcatgcgctcgcagggtccctgctcagggacgactccaagcagctccagtgatgaacgtcattcactcaatcttttccctggttcttaagttcaggtcccaactgatttcgcaagcctgggggcctccagggggacccagaggtgctgaacacccaaacttcgccctgatgcagcagagctacaacaccttcaagtattacagccacttcctctttaaggtggtgacaaagctcgtcaatcggggttaccagcctcatctggaggactttctgctaagaattaacttcaacaattactatcaggatgcatag

SEQ ID NO: 204542 - DNA, 4482 bp, Artificial Sequence
  derived and/or modified sequence
atggcctccataacacagctattcgatgacctatgtgaggcgctgttacccgcagccaaaacccacctgggtcaacgctccgtgaatcgcaagcgggctaagcggagtctgaagaaagtagcgtataacgccctcttcactaacctgtttcaggacgagacccagcagctacaacccgacatgagcaaactcccggctagaaacaagatcctcatgctgtcattcgacctgagggtagggggactgggcccaaaggcagaccggctcgaagaactggttgaagaactggaggcagcaccctgctgtcctttacttgaggtaggctccgtccttgatctgttggtgcagctggcaggttctggtcctccccaggtcctgccccgaaagcgcgattactttctcaacaacaagcacgtgggacggaacgttccatatagtggatatgactgtgatgacctgtcagtatttgaaatggacgtgcagagcctcatcagtcgggaagaatgcctgtgccactccatgatccaagagacccttcaggtgatggaggccgctccagggacaggattacctacagtcggattgtttagctttggggatccatgtggtgatcggttcgagagagatactagagtttctttgttcggcgcactcgtgcactcaaggacctacgacatggatgtgcgcctcggtctcccacccgtcccagacaatgctgacctcagcggactcgccatcaaggtcccaccttctgtggaccaatgggaggatgagggttttcagagcgcctctaatttaacacctgactcacagtcagagcctagtgtcaccccagatgtggatctatgggaagcggcactcacctatgaggctagcaaaaggcgttgctgggaaagagtggggtgtcctccaggccacagagaggaaccatacctgacagaggctggcagagatgccttcgataaattctgtaggttgcaccagggcgagctgcagctcctcgcaggcggagtgctgcaggcaccccaacccgtactcgtgaaggagtgcgagctggtcaaggatgtgcttaatgtgctaattggtgtggtttccgctactttctccttgtgccagccagcacaggcctttgtagttaagagaggcgtgcacgtaagcggcgcttctcccgaaagcatcagcagccttcttagcgaagtagctgagtacggcacatgttatacacggttgtcccatttttctcttcagccggtgctggactcactatactctaagggactggtgtttcaggcctttacctcaggtctccggcgttatcttcagtattaccgcgcatgtgttctcagcacccctcccaccctgagcctgctgactatcggttttctttttaaaaagcttggaagacagctccgatacctcgccgagctgtgcggggtgggcgctgtgctacccggaacctgtggaggcggacccagagcagctttcccaactggtgtcaagctgctttcttacttataccaggaagcgctccataactgttcaaacgaacactaccctgtactgctcagcctgctgaagaccagctgcgagccctatactcgtttcattcatgactgggtgtatagcggagtatttagggacgcatatggtgagtttatgattcaggtgaaccatgagtatctgtccttccgcgataagctgtactggacccacggctacgttttgattagcaaggaagtggaggactgcgttcctgtgttcttgaagcacattgctcacgatatttacgtgtgtggcaaaacaatcaaccttctgaaattatgttgtccacgccattacctttgctggtctgacgtgcctgtgcccagaataagcgtcattttttctctcgaggaactcaaggagatcgagaaggattgcgcggtgtatgttggcaggatggaaagggttgccaggcacagcagcgtgagtaaggaggaaaaggagctgaggatggagatcgctaagcaagagttaattgcccacgctcgtgaggcggcaagccgcgtcctgtcagccctctccgaccgccagatgtctgaacgtatggccctggacgcaaggaagcgggagcaatttcagagactcaaagaacagtttgtaaaagaccaggaacgccgacaagcagctaggcaggaggagctcgacgatgactttagttatgccagagagttgagggacagagagcgtcgcctgaagagcctggaagaagagctcgaacggaaagctcgccaggctcttgtcgatcactattctaaattgtctgcagaagctgccaggcgtgagcagaaggcattgtggcgtatccagcggcatagattggagagtgccagactccgcttcttgttggaggacgagaagcatatccaagagatgctgaaggctgtttctgaggcccaccaaccccaggaaccacctgacgtcctgctctcagtccatccccaggtgacaagtcccggacccgaacacccagagggtggtcaaggctgtgattcgggatcagcagagcagcattccccagcatgggacggttggaaccggcctggcctcctgaccccgcagcctttgaaaccattggcagtcggtgccggaggtcggggactgcaacaagctgagggtgccagacccttctcagactccctgagtatcggagacttcttacctgtgggacctggcgcagagcccagcgtgcagaccggcatggtgccccttctggaagtggctcttcaaactatcaaccttgatctgccaccgagtgcccctggggaggcacccgctgccgcttctactcagccttcaagaccacaggagtacgacttttccacagtgctgaggcccgctgtggcaaccagcccagccccaggccctttgcaggcggctgagtgttccctgggaagctcaggcctccaactgtgggaggattcttgtggaaaaatggacgcatgtggctccgcatcccgggagacgctccttccctctcacccccctcgaagagccgcactcgaggagggttcatcgcaacccaccgagcgcttgttcggccaggtgtccggcggaggcctcccaaccggcgattatgcctccgagatcgcccctacccggccacgatggaatacccacggccacgtatcagacgcttctatcagagtcggcgagaatgtcagcgacgtcgctcctacccagcctagatggaacacacacggacacgtcagcaacgcatccattagcctgggcgagtctgtgtccgacgtcgcccctaccagacctcgctggaatattcacggtcatgtgagcaatgcgtccatcagggtcggtgaaaacgtatctgatgtggcgcctactcggccacgatggaatacgcacggacatgtttcaaacgcatctattagagtcggcgagaacgtgtccgacgtagccccaactcggccacggtggaatacccatggccacgtgagtgatgcttcgatctcccttggagagagtgtgagcgacatggctcccgctcgccctcgttggaacacgcacgggcatgtctctgacgcctccatcagcctcggcgagtctgtgtccgatatggcacccacaagaccaagatggaatacccacggccatgtgtcagacacttcaatccgagtgggggagaatgtatcagacgtcgctcccatccgcagtcgctgtaatacccacggccacgttagtgatgccagcatcagtttaggtgaacccgtatcggacgttgttagcacgagacctcggtggaatacccacgtgcccattcctccgcctcacatggtgttaggcgctctgtcccctgaggcagaaccaaacaccccacgtccacagcaatcaccccctggacatactagtcagtccgccctttctctgggtgctcaatcaaccgtgttggattgtggccctcgccttccagtcgaggtaggaccatccttgtcatccccttcttctgggtgcggcgagggttcgatctctgtcggggagaatgtttctgacgttgctcccacacagccttggtggcctaatacaccaggagatagcgtctcggaggaactgggtcagagtagagtcgctggcggacaggaatgggattgtggtacccaccgcgcttgggaagccctggggggagctgggacattaaggacctccttgcagatcggactgtccacacacaggaagacccagctccccagagctgcacaggctgtcgttagacggcgtcgccaccgacggagaaggctgcgggtcggttcccgccctacttggcaggcgtggcagggctcaactacctggtccggaactagaaccgtgacaagcccttgcccaagccgccctcttctgattttttgtgcgccttgcttccccggtccgagcccaagcccatggaccccaagatcgtccctccccctgatgcgactgctctgcagctag

SEQ ID NO: 204543 - DNA, 6053 bp, Artificial Sequence
  derived and/or modified sequence
tggagaacgggtggacgtgcaggccagaacccgggacccacccggctgagcccccagactctccgctgcccacgaccctcggagtggcaccctctcctggccgtctcctctcgtgggtcccgaagaacgggtgcaaagccgagttcgtccgctgtactgcgcgggcgcgcgtttcgttcttcggttttgccacggttctgtgactccctaaaggttgagggctactgaattagaagaaacgccgagctggcttctggtgggctgccgggcgccgggcagcgtgcttggactggggagggcagggcgtgtttactctgagtagagcaaccgcaagacctcctttaaaaaataccagttctgagcttcggcattggagaggccgcctgtcattcagcctcttcggaccctctctcactccctgtcttccggagcgtgagtgaagcccgggtgaggtgttttcccacacgccgggggcccggagctgagaaggggcatggccagcatcacgcagctgttcgacgacctgtgtgaggccctcctgccggctgccaagactcacctgggccagcgcagtgtgaaccggaagagggcaaagcggagcctcaagaaggtggcctacaatgctcttttcacaaatctttttcaagatgagactcaacagctgcagcctgacatgtcaaaactaccagcgagaaacaagatcctcatgttgtcctttgacttgagagtgggtggcctgggccccaaggccgaccgtttggaggagcttgtggaggagctggaagcagccccttgctgtccgcttttggaggtggggtctgttttggacctcctggttcagctggcagggagtggtccccctcaagttctgccgagaaaacgagactacttccttaacaacaagcatgtggggagaaacgttccgtacagcggctatgattgcgacgacctgagtgtgtttgagatggacgttcagtctctgatctccagagaagagtgtttgtgtcacagcatgatccaggaaacacttcaggttatggaggctgctccaggcactggcctgcccaccgtcgggctcttctcatttggtgacccttgtggtgacaggttcgagagagacacccgggtctcgctcttcggggcccttgtgcacagccgcacttatgacatggacgtccgactgggcctgccccccgtgccagacaatgcggacctctctgggctggctattaaggtcccaccgagtgtggatcagtgggaagacgaaggattccagtcagcgtccaacttgactcctgattcccagtctgagcccagcgtgaccccagacgtggacctgtgggaagccgcacttacctatgaggccagcaagcggaggtgctgggagcgagttggctgcccccctggccacagagaggagccttacctgacggaggcgggaagggacgctttcgacaagttctgcaggctccaccaaggggagctccagctgcttgctgggggcgtcctacaggccccgcagcccgtgctggtgaaggagtgcgagctggtgaaagacgtgctgaacgtcttgattggggtcgtgtctgccacgttttcgctctgccagccggcccaggcctttgtggtgaagcggggcgtccacgtgtcaggagcgtctcccgagagcatcagcagcctgctctcggaagtggccgagtatgggacctgctacacgcgcctgagtcatttctctctgcagcccgtcctggactctttgtacagcaagggcctcgtgttccaggccttcaccagtggcctgaggaggtacctgcagtattaccgggcctgcgtcctttccactccgcccaccctgagcctcctcaccattggttttctcttcaagaaacttggccggcagctcaggtacctggccgagctctgtggcgttggcgctgtgctcccgggcacctgtggaggaggccccagggccgcgtttcccaccggcgtgaagctgctgtcctacctctaccaggaggctctgcacaactgcagcaacgagcactaccctgtactgctgtccctgctgaagaccagctgcgagccctacacccggttcatccacgactgggtgtacagcggggtgttcagagacgcttatggcgagttcatgattcaggtgaaccacgagtacctcagcttccgagataagttgtactggacacatggctacgtgctcatctccaaagaggtggaggactgtgttcccgtgtttctgaagcacattgcccacgacatatacgtctgcggaaagaccattaacctgctgaagctctgctgcccccggcattacctctgttggtccgacgtccctgtcccccggatctcggtgattttctcccttgaggagttgaaggagattgagaaggactgtgccgtctacgttgggcgcatggagagggtggcccgccacagctctgtcagcaaggaggagaaggaattacgtatggaaattgcaaaacaagaattaatcgctcatgcccgggaagcagcatccagggtcctgagtgcactgagtgaccggcagatgtcagaacggatggccttggatgcccggaagcgtgagcagtttcagaggctgaaagaacaatttgtgaaggaccaggagcgacgccaggcggccaggcaggaggagctggatgatgacttcagctacgcccgtgaactccgagacagggagagaaggctgaagtccctggaggaggagctggagaggaaggcgaggcaggcactggtcgaccactacagcaagctctctgcagaggcagctcgtcgggagcagaaggcactgtggagaatccagaggcaccgactggagagtgcacggcttcgttttctcttagaagatgagaaacacattcaggagatgctgaaagcagtgtctgaggctcaccagccccaggagccgccagacgtcctcttgagcgtgcacccccaggtcacgtctccgggccctgagcacccagagggaggccaaggctgtgattctgggtctgcagagcaacactcgcctgcctgggatggctggaacaggccaggcctgctgaccccacagccccttaagcctctagcagtgggggctggtggcagggggctgcagcaggcggagggggccagacccttctctgacagcctcagcattggagacttcctacctgtgggcccaggggctgagccgtccgtgcagactggcatggtccctctcctggaggtggcgctgcagaccattaacttggacctgcccccctcagctcctggggaggcacccgcagcagccagcactcagccctccaggccacaggagtacgactttagtactgtcctgaggccagctgtggccacctcacctgcaccagggcccctgcaggctgcagagtgcagcttgggcagctcagggctacagctgtgggaggacagttgtgggaagatggatgcctgtggctccgcctcgcgggagactctgctcccctcacacccacccaggcgtgctgctctggaggaggggagcagccagcccacagagcggctctttgggcaggtgtcagggggtggtcttcccacaggggactacgcttctgaaatagctcccacccggccacggtggaacacccacgggcacgtgtctgacgccagcatcagggtcggggagaatgtgtcagatgtggctcccacccagccacggtggaacacccacggacacgtatccaatgccagcatcagcttaggggagtctgtgtcagatgtggctcccactcggccacggtggaacatccatggacatgtgtccaacgccagcatcagggtcggggagaatgtgtcagatgtggctcccaccaggccacggtggaatacccacgggcacgtgtccaacgccagcatcagggttggggagaacgtgtcggacgtggctcccacccggccacggtggaacacccatggacacgtgtccgatgccagcatcagcttgggggagtctgtgtcagacatggctcccgcccggccacggtggaacacccatggacacgtgtctgatgccagcatcagcttgggggagtctgtgtcagacatggctcccacccggccacggtggaacacccacggacatgtgtctgacaccagcatcagggttggggagaacgtatcggacgtggctcccatccggtcacggtgcaacacccatggacacgtgtccgacgccagcatcagcttgggggagcctgtgtcggatgtggtttccacccggccacggtggaacacccatgtacccatccctccgccccacatggtgctgggggctctctcaccagaagctgagcccaacacacccaggccccaacagagcccccctggccacacgtcccagtcagcgctcagcctgggagcacagagcactgtgctggactgtgggccacggctgcctgtagaagtggggccatctctgtcctcccccagctcgggctgcggggaggggagcatcagcgtgggggagaacgtgtcagacgtggctcccacccaaccatggtggcccaacaccccgggagacagtgtctctgaagaactaggtcagagtagggtggctggtggtcaggagtgggactgtgggacgcacagagcctgggaggccctgggaggagcggggacactgaggacctctctccaaattggcctctcaactcacaggaagacacagctgcccagagcagcccaggccgtggtgaggaggcggaggcatcggcggcggaggctcagggtggggagcaggcctacctggcaggcctggcagggcagtaccacttggagcggtacccggacagttacgagtccatgtccgagccgcccattgctcatcttttgcgccccgtgcttccccgggccttcgccttccccgtggacccccaggtccagtctgccgctgatgagactgctgtgcagctgagcgagttgctgacgctgcccgtgctcatgaagcgctccatcacggcaccgctggccgcccacatctccttggtgaacaaggccgctgtcgactacttcttcgtggagctgcacctggaggcgcactatgaggcactgcggcacttcctgctgatggaggacggcgagttcgcccagtccctcagcgacctgctctttgagaagcttggagctgggcaaacgcccggagagctgctcaacccgctggtgctgaactctgtgctgagcaaggccctgcagtgcagcctgcatggggacaccccgcacgcctccaacctctccctcgctctcaagtacctgcccgaggtgtttgcccccaacgccccggatgtgctgagctgcctggagctcaggtacaaggtggactggcctctcaacattgtcatcaccgagggctgcgtgagcaagtacagcggcgtcttctccttcctgctgcagctgaagctcatgatgtgggcgctcaaggacgtctgcttccacctcaagcgcacagccctgctgagccacatggccggctctgtgcagttccgtcagctgcagctgttcaagcacgagatgcagcatttcgtgaaggtcatccagggctacatcgccaaccagatcctgcacgtcacctggtgcgagttcagggccaggttggccaccgtgggcgacctggaggagatccagcgtgcgcacgcagagtacctgcacaaggccgtcttcaggggcctgctcacggagaaggcggcgcccgtcatgaacgtcatccacagcatcttcagcctcgtgctcaagttccgcagccagctcatctcccaggcctgggggccccctgggggcccgcggggtgcagagcaccccaactttgcactcatgcagcagtcctacaacaccttcaagtactactcccactttctcttcaaagtggtgaccaagctggtgaaccgcggctaccagccccacctggaggactttctgctgcgcatcaacttcaacaactactaccaggacgcctgaggctgctctgcgggggacgtgcacaataaaggtgttctcgg

SEQ ID NO: 204544 - DNA, 5460 bp, Artificial Sequence
  derived and/or modified sequence
atggccagcatcacccagctgttcgacgacctgtgcgaggccctgctgcccgccgccaagacccacctgggccagagaagcgtgaacagaaagagagccaagagaagcctgaagaaggtggcctacaacgccctgttcaccaacctgttccaggacgagacccagcagctgcagcccgacatgagcaagctgcccgccagaaacaagatcctgatgctgagcttcgacctgagagtgggcggcctgggccccaaggccgacagactggaggagctggtggaggagctggaggccgccccctgctgccccctgctggaggtgggcagcgtgctggacctgctggtgcagctggccggcagcggccccccccaggtgctgcccagaaagagagactacttcctgaacaacaagcacgtgggcagaaacgtgccctacagcggctacgactgcgacgacctgagcgtgttcgagatggacgtgcagagcctgatcagcagagaggagtgcctgtgccacagcatgatccaggagaccctgcaggtgatggaggccgcccccggcaccggcctgcccaccgtgggcctgttcagcttcggcgacccctgcggcgacagattcgagagagacaccagagtgagcctgttcggcgccctggtgcacagcagaacctacgacatggacgtgagactgggcctgccccccgtgcccgacaacgccgacctgagcggcctggccatcaaggtgccccccagcgtggaccagtgggaggacgagggcttccagagcgccagcaacctgacccccgacagccagagcgagcccagcgtgacccccgacgtggacctgtgggaggccgccctgacctacgaggccagcaagagaagatgctgggagagagtgggctgcccccccggccacagagaggagccctacctgaccgaggccggcagagacgccttcgacaagttctgcagactgcaccagggcgagctgcagctgctggccggcggcgtgctgcaggccccccagcccgtgctggtgaaggagtgcgagctggtgaaggacgtgctgaacgtgctgatcggcgtggtgagcgccaccttcagcctgtgccagcccgcccaggccttcgtggtgaagagaggcgtgcacgtgagcggcgccagccccgagagcatcagcagcctgctgagcgaggtggccgagtacggcacctgctacaccagactgagccacttcagcctgcagcccgtgctggacagcctgtacagcaagggcctggtgttccaggccttcaccagcggcctgagaagatacctgcagtactacagagcctgcgtgctgagcaccccccccaccctgagcctgctgaccatcggcttcctgttcaagaagctgggcagacagctgagatacctggccgagctgtgcggcgtgggcgccgtgctgcccggcacctgcggcggcggccccagagccgccttccccaccggcgtgaagctgctgagctacctgtaccaggaggccctgcacaactgcagcaacgagcactaccccgtgctgctgagcctgctgaagaccagctgcgagccctacaccagattcatccacgactgggtgtacagcggcgtgttcagagacgcctacggcgagttcatgatccaggtgaaccacgagtacctgagcttcagagacaagctgtactggacccacggctacgtgctgatcagcaaggaggtggaggactgcgtgcccgtgttcctgaagcacatcgcccacgacatctacgtgtgcggcaagaccatcaacctgctgaagctgtgctgccccagacactacctgtgctggagcgacgtgcccgtgcccagaatcagcgtgatcttcagcctggaggagctgaaggagatcgagaaggactgcgccgtgtacgtgggcagaatggagagagtggccagacacagcagcgtgagcaaggaggagaaggagctgagaatggagatcgccaagcaggagctgatcgcccacgccagagaggccgccagcagagtgctgagcgccctgagcgacagacagatgagcgagagaatggccctggacgccagaaagagagagcagttccagagactgaaggagcagttcgtgaaggaccaggagagaagacaggccgccagacaggaggagctggacgacgacttcagctacgccagagagctgagagacagagagagaagactgaagagcctggaggaggagctggagagaaaggccagacaggccctggtggaccactacagcaagctgagcgccgaggccgccagaagagagcagaaggccctgtggagaatccagagacacagactggagagcgccagactgagattcctgctggaggacgagaagcacatccaggagatgctgaaggccgtgagcgaggcccaccagccccaggagccccccgacgtgctgctgagcgtgcacccccaggtgaccagccccggccccgagcaccccgagggcggccagggctgcgacagcggcagcgccgagcagcacagccccgcctgggacggctggaacagacccggcctgctgaccccccagcccctgaagcccctggccgtgggcgccggcggcagaggcctgcagcaggccgagggcgccagacccttcagcgacagcctgagcatcggcgacttcctgcccgtgggccccggcgccgagcccagcgtgcagaccggcatggtgcccctgctggaggtggccctgcagaccatcaacctggacctgccccccagcgcccccggcgaggcccccgccgccgccagcacccagcccagcagaccccaggagtacgacttcagcaccgtgctgagacccgccgtggccaccagccccgcccccggccccctgcaggccgccgagtgcagcctgggcagcagcggcctgcagctgtgggaggacagctgcggcaagatggacgcctgcggcagcgccagcagagagaccctgctgcccagccacccccccagaagagccgccctggaggagggcagcagccagcccaccgagagactgttcggccaggtgagcggcggcggcctgcccaccggcgactacgccagcgagatcgcccccaccagacccagatggaacacccacggccacgtgagcgacgccagcatcagagtgggcgagaacgtgagcgacgtggcccccacccagcccagatggaacacccacggccacgtgagcaacgccagcatcagcctgggcgagagcgtgagcgacgtggcccccaccagacccagatggaacatccacggccacgtgagcaacgccagcatcagagtgggcgagaacgtgagcgacgtggcccccaccagacccagatggaacacccacggccacgtgagcaacgccagcatcagagtgggcgagaacgtgagcgacgtggcccccaccagacccagatggaacacccacggccacgtgagcgacgccagcatcagcctgggcgagagcgtgagcgacatggcccccgccagacccagatggaacacccacggccacgtgagcgacgccagcatcagcctgggcgagagcgtgagcgacatggcccccaccagacccagatggaacacccacggccacgtgagcgacaccagcatcagagtgggcgagaacgtgagcgacgtggcccccatcagaagcagatgcaacacccacggccacgtgagcgacgccagcatcagcctgggcgagcccgtgagcgacgtggtgagcaccagacccagatggaacacccacgtgcccatcccccccccccacatggtgctgggcgccctgagccccgaggccgagcccaacacccccagaccccagcagagcccccccggccacaccagccagagcgccctgagcctgggcgcccagagcaccgtgctggactgcggccccagactgcccgtggaggtgggccccagcctgagcagccccagcagcggctgcggcgagggcagcatcagcgtgggcgagaacgtgagcgacgtggcccccacccagccctggtggcccaacacccccggcgacagcgtgagcgaggagctgggccccggcagaagcggcgacaccgaggacctgagccccaactggcccctgaacagccaggaggacaccgccgcccagagcagccccggcagaggcgaggaggccgaggccagcgccgccgaggcccagggcggcgagcaggcctacctggccggcctggccggccagtaccacctggagagataccccgacagctacgagagcatgagcgagccccccatcgcccacctgctgagacccgtgctgcccagagccttcgccttccccgtggacccccaggtgcagagcgccgccgacgagaccgccgtgcagctgagcgagctgctgaccctgcccgtgctgatgaagagaagcatcaccgcccccctggccgcccacatcagcctggtgaacaaggccgccgtggactacttcttcgtggagctgcacctggaggcccactacgaggccctgagacacttcctgctgatggaggacggcgagttcgcccagagcctgagcgacctgctgttcgagaagctgggcgccggccagacccccggcgagctgctgaaccccctggtgctgaacagcgtgctgagcaaggccctgcagtgcagcctgcacggcgacaccccccacgccagcaacctgagcctggccctgaagtacctgcccgaggtgttcgcccccaacgcccccgacgtgctgagctgcctggagctgagatacaaggtggactggcccctgaacatcgtgatcaccgagggctgcgtgagcaagtacagcggcgtgttcagcttcctgctgcagctgaagctgatgatgtgggccctgaaggacgtgtgcttccacctgaagagaaccgccctgctgagccacatggccggcagcgtgcagttcagacagctgcagctgttcaagcacgagatgcagcacttcgtgaaggtgatccagggctacatcgccaaccagatcctgcacgtgacctggtgcgagttcagagccagactggccaccgtgggcgacctggaggagatccagagagcccacgccgagtacctgcacaaggccgtgttcagaggcctgctgaccgagaaggccgcccccgtgatgaacgtgatccacagcatcttcagcctggtgctgaagttcagaagccagctgatcagccaggcctggggcccccccggcggccccagaggcgccgagcaccccaacttcgccctgatgcagcagagctacaacaccttcaagtactacagccacttcctgttcaaggtggtgaccaagctggtgaacagaggctaccagccccacctggaggacttcctgctgagaatcaacttcaacaactactaccaggacgcctag

SEQ ID NO: 204545 - DNA, 372 bp, Artificial Sequence
  derived and/or modified sequence
atgccagacgccagcttgggatctctgggcattacctggtgtttcctcgaatcccccctggaggtctcaagcggcagatttggattggcgaggctgctgggcagccaggaccatggcgatgaccctgcagaacggggaaggactgctacagacgcctggggtccgagccggtggggacagagccctggaaacggcggaggttattgcgacgccagccctccttcggcccttgcacccggagatagagcctgggccctgccggctagccccagctccggagctcccgctagtcaacattgttgccttgagaaagctggcactcgcacaaaggcaagtccagtgtggggcagggacgggaacacctggaactag

SEQ ID NO: 204546 - DNA, 372 bp, Artificial Sequence
  derived and/or modified sequence
atgcagtccgaaaaaccccagggactgtttctgcagctgaatccaaatgcgtctagcacagaaactcagctgttagtgcctgccctcgaaagcagggacacactgccacctactcattgtttcatggcgggtacagagagtccgttgggcaacccatggccactaagtctaccccctccctgttggaccggctgtttgctccccgcacccagaggacagcgaaagcctggcccactgggcctctcaatattcatctcccttggaaacaagagacacagatcaggcaaccatgtagtgagagaatccgaacagcccttatctcagggcaatccccatcaagggtggggacccgataccaggaagggcaggtag

SEQ ID NO: 204547 - protein, 764 aa, Artificial Sequence
  derived and/or modified sequence
MSDTRRRVKVYTLNEDRQWDDRGTGHVSSTYVEELKGMSLLVRAESDGSLLLESKINPNTAYQKQQDTLIVWSEAENYDLALSFQEKAGCDEIWEKICQVQGKDPSVEVTQDLIDESEEERFEEMPETSHLIDLPTCELNKLEEIADLVTSVLSSPIRREKLALALENEGYIKKLLQLFQACENLENTEGLHHLYEIIRGILFLNKATLFEVMFSDECIMDVVGCLEYDPALAQPKRHREFLTKTAKFKEVIPITDSELRQKIHQTYRVQYIQDIILPTPSVFEENFLSTLTSFIFFNKVEIVSMLQEDEKFLSEVFAQLTDEATDDDKRRELVNFFKEFCAFSQTLQPQNRDAFFKTLAKLGILPALEIVMGMDDLQVRSAATDIFSYLVEFSPSMVREFVMQEAQQSDDDILLINVVIEQMICDTDPELGGAVQLMGLLRTLIDPENMLATTNKTEKSEFLNFFYNHCMHVLTAPLLTNTSEDKCEKDNIVGSNKNNTICPGALRFMRRIIGLKDEFYNRYITKGNLFEPVINALLDNGTRYNLLNSAVIELFEFIRVEDIKSLTAHIVENFYKALESIEYVQTFKGLKTKYEQEKDRQNQKLNSVPSILRSNRFRRDAKALEEDEEMWFNEDEEEEGKAVVAPVEKPKPEDDFPDNYEKFMETKKAKESEDKENLPKRTSPGGFKFTFSHSASAANGTNSKSVVAQIPPATSNGSSSKTTNLPTSVTATKGSLVGLVDYPDDEEEDEEEESSPRKRPRLGS

SEQ ID NO: 204548 - DNA, 2295 bp, Artificial Sequence
  derived and/or modified sequence
atgtctgacaccaggagacgggtcaaggtgtacactctcaacgaggacagacagtgggatgacaggggaacggggcatgtcagcagcacctatgtggaagagctgaaagggatgagcctgcttgtaagagccgaaagcgatggctcactacttttggaaagcaaaattaaccccaatacagcataccaaaaacagcaagatactctgatcgtctggagcgaggccgagaattacgacctggctctgtcatttcaggagaaagctggctgtgatgaaatctgggaaaaaatatgtcaagtgcagggtaaggacccttctgtggaagtcacccaggacctcattgacgaatcggaggaagagagatttgaagaaatgccagaaacttcccacctgatcgatctgccaacatgcgaacttaacaaacttgaagaaattgccgacttggttacgtcagtgctgtctagccctattagacgagagaaactcgccctcgccctcgaaaatgaaggatatatcaaaaagctcctccaactgtttcaggcctgcgaaaacctagagaacacagaggggctgcaccatctatacgagattattagagggatcctgtttctgaataaggctacactctttgaggtcatgttcagcgatgagtgtatcatggatgttgtcggatgtctggaatacgatcccgcgttggcacagccgaagagacatcgcgagttcttgacaaaaaccgccaagtttaaggaagtcatccctatcacggattccgagcttcgccagaagattcaccaaacctacagggttcagtacatacaggacatcatcttgccaaccccttccgttttcgaggaaaactttctgtccaccctgacttcattcatattttttaataaagttgagatagtaagtatgctccaggaagacgaaaagtttctgagcgaggtgttcgctcagttgacagatgaggccacagacgacgataagcgaagggaattagtgaatttcttcaaggagttctgtgcttttagccagacgctgcagcctcagaatcgtgacgccttttttaaaactctggcgaagctgggtatcctgcctgccctcgaaatcgttatgggaatggacgacctccaggttcggagcgccgctaccgatattttttcttacctagtcgagttctcccctagcatggttcgcgagtttgtgatgcaggaggcacagcagtctgacgatgatatcctgctcatcaatgttgttattgagcagatgatctgtgatactgatcctgagctgggtggcgccgttcagttgatggggcttttaaggaccctgatagaccctgagaacatgctggccaccaccaataagactgaaaagtcggaattcctaaacttcttctacaaccactgtatgcacgttctcactgctcctctgctgaccaatacgtcagaagataaatgcgagaaggacaacattgtgggctcaaataaaaataataccatttgccctggagcgctgcggttcatgcgcaggatcatcggcctgaaggatgaattctataatagatacataacaaaagggaatctatttgagccggtgattaacgcccttcttgacaacggcacccggtataacctactgaatagtgcagtgatagagttatttgagtttattcgggtggaggacattaaaagtctgactgcccatatcgtggagaatttctataaagctctcgagagtattgagtacgtgcagaccttcaaggggctcaaaaccaaatatgagcaagagaaggatcggcagaatcagaagctcaattcggtgccgtccattctgcggagcaaccgcttccgccgggatgctaaggccctggaggaagacgaagaaatgtggttcaatgaagacgaagaggaagaaggcaaagcggtcgtggcgcctgtggaaaagcccaagccggaagatgatttccctgacaactacgaaaaattcatggagaccaagaaggccaaagaaagcgaggacaaagaaaacctgcccaagaggacctccccaggcgggttcaagttcacattctcccatagcgcgtccgccgcaaatggcacgaatagcaagagcgtggttgctcaaattccccccgccactagtaatggcagtagctcaaagacaactaatctcccaacttctgtcaccgccaccaaggggagtcttgttggtttagtggactacccggacgacgaggaggaggacgaggaggaggagtccagccccaggaagcgccccagactggggtcttag

SEQ ID NO: 204549 - DNA, 2295 bp, Artificial Sequence
  derived and/or modified sequence
atgtctgacacccggcggcgggtgaaggtgtacaccctgaatgaagatcggcagtgggatgaccggggcaccggccacgtgagcagcacctacgtggaggagctgaagggcatgagcctgctggtgcgggcagagagtgatggcagcctgctgctggagagcaagatcaaccccaacacagcctaccagaagcagcaggacaccctcatcgtgtggagcgaggccgagaactatgacctggccctgtccttccaggagaaggccggctgtgatgagatctgggagaagatctgccaggtgcagggcaaggaccccagcgtggaggtgacccaggacctgattgatgaaagtgaggaggagagatttgaggagatgcctgagaccagccacctgattgacctgcccacctgtgagctgaacaagctggaggagattgctgacctggtgacctctgtgctgagcagccccatccggcgggagaagctggccctggccctggagaatgaaggctacatcaagaagctgctgcagctgttccaggcctgtgagaacctggagaacacagagggcctgcaccacctgtatgagatcatccggggcatcctcttcctgaacaaggccaccctgtttgaggtgatgttcagtgatgagtgcatcatggatgtggtgggctgcctggagtatgaccctgccctggcccagcccaagaggcaccgggagttcctgaccaagacagccaagttcaaggaggtgatccccatcacagattctgagctgcggcagaagatccaccagacctacagagtgcagtacatccaggacatcatcctgcccaccccatctgtgtttgaggagaacttcctgagcaccctgaccagcttcatcttcttcaacaaggtggagatcgtgtccatgctgcaggaggatgagaagttcctgtctgaggtgtttgcccagctgacagatgaggccacagatgatgacaagaggcgggagctggtgaacttcttcaaggagttctgtgccttcagccagaccctgcagccccagaacagagatgccttcttcaagaccctggccaagctgggcatcctgcctgccctggagatcgtgatgggcatggatgacctgcaggtgcgctctgctgccacagacatcttctcctacctggtggagttcagccccagcatggtgcgggagtttgtgatgcaggaggcccagcagagtgatgatgacatcctgctgatcaacgtggtgattgagcagatgatctgtgacacagatcctgagctgggcggcgctgtgcagctgatgggcctgctgcggaccctgattgatcctgagaacatgctggccaccaccaacaagacagagaagtctgagttcctgaacttcttctacaaccactgcatgcacgtgctgacagcccccctgctgaccaacaccagcgaggacaagtgtgagaaggacaacatcgtgggcagcaacaagaacaacaccatctgccctggggccctgcgcttcatgaggcgcatcatcggcctgaaggatgagttctacaaccgctacatcaccaagggcaacctgtttgagcccgtcatcaatgccctgctggacaatggcacccgctacaacctgctgaacagcgctgtgattgagctgtttgagttcatccgggtggaggacatcaagagcctgacagcccacatcgtggagaacttctacaaggccctggagagcattgaatatgtgcagaccttcaagggcctgaagaccaagtatgagcaggagaaggaccggcagaaccagaagctgaacagcgtgcccagcatcctgcggagcaaccgcttcagaagagatgccaaggccctggaggaggatgaggagatgtggttcaatgaagatgaggaggaggagggcaaggctgtggtggcccctgtggagaagcccaagccagaagatgacttcccagacaactatgagaagttcatggagaccaagaaggccaaggagagcgaggacaaggagaacctgcccaagaggaccagccctgggggcttcaagttcaccttcagccacagcgccagcgctgccaacggcaccaacagcaagtctgtggtggcccagatccccccagccaccagcaatggcagcagcagcaagaccaccaacctgcccacctctgtgacagccaccaagggcagcctggtgggcctggtggactacccagatgatgaggaggaggatgaggaggaggagagcagccccaggaagaggccccggctgggcagctag

SEQ ID NO: 204550 - DNA, 2295 bp, Artificial Sequence
  derived and/or modified sequence
atgagcgacacccggcggcgggtgaaggtgtacaccctgaacgaggacaggcaatgggatgatcgaggcaccggccacgtgtcaagcacttatgttgaagagctgaagggcatgtccctgctggtgagagctgaatccgatgggagtttactgctggaatcaaagattaatcccaacacagcataccagaagcagcaggatactcttattgtctggagcgaggcagaaaactacgacctggcactgtcctttcaggaaaaagctggttgcgacgagatctgggagaagatttgtcaggtgcaggggaaagacccttcagtggaggtgacgcaggacctcatcgacgagagtgaagaggagcggttcgaggaaatgcccgagacctctcacctgattgatttgccaacgtgtgagctcaacaaactcgaagagattgccgatctggtgacatccgttctttccagcccgatcaggcgcgagaagctggccctggcactcgagaacgaaggatacataaaaaagcttctgcagctttttcaagcatgcgagaatcttgagaacaccgagggcttgcatcacctgtatgagattatcagaggtattttgttcctcaataaggcgaccctttttgaggttatgtttagtgacgaatgcataatggatgtggtcggctgtcttgagtatgatcccgcccttgctcagcccaaaaggcatagagaattcctgaccaaaaccgcaaagttcaaggaggtcatccctattacagattcagagctgaggcagaagatacatcagacctatcgtgtccaatacatccaggacatcattctgccaacccccagtgtgtttgaagagaactttcttagtacattgacctccttcatcttttttaataaggttgaaatcgtgagcatgttgcaggaagatgagaaatttcttagcgaagtctttgcacagttgacagatgaagccaccgacgacgacaaaagaagagagctggtcaatttctttaaagagttttgtgctttttctcagactctgcaaccacaaaacagagatgcttttttcaagacgctggccaagctcggaatcttgccagctctcgagatcgtgatgggcatggatgatttgcaagttagaagtgccgccacagacattttttcctatctggtagaattttcaccatctatggtacgagaatttgtcatgcaggaggcccagcagtcagacgacgacattctcctgattaacgtagtgatcgaacagatgatttgtgataccgacccagaactgggcggcgccgtacagttaatgggactcctacgcaccttgatagaccctgagaatatgctggcaaccactaacaaaactgagaaaagcgagttcctcaactttttttacaatcactgcatgcacgttctgacggccccacttctcaccaacacgagtgaggacaaatgtgaaaaagacaatattgtgggctctaataaaaataacaccatatgtcccggtgctctccggtttatgagaaggattattggactcaaggacgaattttacaatagatacatcactaaaggcaatctcttcgagcccgttatcaacgcgctcctggataatgggacacgctacaatctgctgaactctgcagttatcgaactgtttgaatttatcagggtcgaggatatcaagtcacttactgctcacatcgtggagaacttttacaaagccctcgagtccattgagtacgtacagactttcaaaggtcttaagaccaagtatgagcaagagaaagacagacagaatcagaagcttaatagtgtgccaagcatactgcggtccaatcgattccgcagggacgccaaggcactcgaggaggatgaggaaatgtggttcaatgaagatgaagaggaagagggaaaggccgtggttgcccctgtggagaagcctaagccagaggacgacttcccggataattatgaaaagtttatggagaccaagaaggcaaaagagtcagaagacaaagaaaaccttccaaaaagaacctcacccggtggctttaaattcacattctcccactcagccagcgcagctaatggcacaaacagcaaatcagtggtggcccagattccacccgccacttctaatggctcttcctctaagacgacaaacttaccgacctccgtcaccgcaaccaagggcagtcttgtcggactggttgattatccggacgatgaggaagaggacgaggaggaagaaagctctcctaggaaacgaccacggttgggctcctag

SEQ ID NO: 204551 - DNA, 2295 bp, Artificial Sequence
  derived and/or modified sequence
atgtccgacacacgccgacgcgttaaggtttatacacttaacgaagatagacagtgggatgaccgtggaaccggacatgtctcttccacctacgtcgaagaattaaagggcatgagtcttctggtgagggccgagtcagatgggtccctgctactagagagcaaaatcaacccaaacacagcataccagaaacagcaggatacccttattgtctggtcagaagcggaaaactatgacttagcactcagctttcaagagaaggccggttgtgatgaaatctgggaaaagatctgtcaggtacaaggcaaagatccctccgttgaggtgacccaggacctcattgacgaatctgaggaagaacgatttgaggaaatgccggagacctcacacctgatcgacctccccacatgtgaattgaataagctagaggagattgctgatctggtgacatccgtcctctcatctccgatacgtcgggaaaagctagctctcgcattagaaaacgagggctatatcaaaaaacttctacagctgtttcaggcctgcgaaaacttagaaaatacagagggcctgcaccacttatacgagattattcgaggaatcctgtttctcaacaaagccactctgtttgaggtgatgttcagtgacgaatgtatcatggatgtggtggggtgcctggagtatgatcctgccctggcacagcccaagcgtcatagagaatttctgacgaagaccgcgaagtttaaggaagtcatacctattacagattcagagctgcggcagaagattcatcagacctaccgggtgcagtatattcaggatatcattctcccaactccaagcgtgttcgaagagaattttctcagcaccctgactagcttcatcttctttaataaggttgaaattgtgagtatgcttcaggaagatgagaagttcctgtccgaggtttttgctcaactgactgatgaggcgacagacgacgacaaacggagggaactcgtcaatttttttaaagagttctgtgcattcagccagaccctgcaaccacaaaatagggacgccttctttaaaactttggccaagctcggcatcctacccgctcttgagattgtaatgggaatggatgacctgcaggtgagatctgcagccaccgatatcttctcatacctggtggaattctcgcccagcatggttcgtgaatttgtgatgcaagaggcccagcagtcagacgatgacatcctcttaatcaatgtggttatcgaacagatgatctgtgacactgatccagagctgggcggagctgtgcagctcatggggctcctgcggaccttgattgatcccgagaatatgcttgctactaccaacaagaccgaaaagtctgaattcctgaacttcttttataaccattgtatgcatgtactgaccgcccctctccttaccaatacatctgaagataaatgcgaaaaagataatatcgtgggcagcaataagaataacaccatatgcccgggtgcattgagatttatgcgacggataatcgggctgaaagatgaattttacaatcgctatatcacaaaggggaacctgtttgaacctgtgatcaatgctcttcttgacaacggtactagatacaacttgcttaattccgcggtgatcgagttgtttgaatttatcagagtggaagacataaaaagtctgactgctcacattgtggaaaatttttataaggcactggagtctattgagtatgtacagaccttcaaagggcttaagaccaagtatgagcaggagaaggaccggcaaaaccagaaattgaatagcgtgccttcaatcttacggtctaatcgattccggcgagacgccaaggctctggaggaagacgaagaaatgtggtttaacgaagacgaagaagaagagggaaaggcagttgtggcgcctgtagaaaagccaaaaccagaagacgattttcctgataattacgagaagttcatggagactaaaaaagccaaagagagcgaggataaagaaaacttgccaaaaaggacctcaccaggcggattcaagtttacattttctcactctgcgtctgcagctaacggaacaaacagcaaatcagtcgttgctcaaatacccccagctacctcaaacggctctagtagtaagacaacaaacctgcccacctcagttacagcaacaaagggctctctggtcggtctagtggactatcccgacgacgaggaagaggatgaagaggaggaatcaagcccaaggaagcgaccaagactggggtcatag

SEQ ID NO: 204552 - DNA, 5242 bp, Artificial Sequence
  derived and/or modified sequence
aggcagagagagtcgggttacaagatggcggatctgtagtagttaccgcggcggcgggagagcaagcgagccctggggggcaaagagacgggagagtgggtgtatgcgcgggtgaagtgagaggtaacggggctccgggcggagaggcctcagtggctcttgtcaccccttctcgcggctgaacctttggagccatggtgaattcgggcctctccgaagccgccgccgccgccaccgccactactgcctttaccgtctcctaagagtgaggagcgcggacgaggtaagcgaggaggcggcggctagagcggtggagacagcagccaccatgtcggatacgcggcggcgagtgaaggtctataccctgaacgaagaccggcaatgggacgaccgaggcaccgggcacgtctcctccacttacgtggaggagctcaaggggatgtcgctgctggttcgggcagagtccgacggatcactactcttggaatcaaagataaatccaaatactgcatatcagaaacaacaggatacattaattgtttggtcagaagcagagaactatgatttggctctgagttttcaggagaaagctggctgtgatgagatctgggaaaaaatttgtcaggttcaaggtaaagacccatcagtggaagtcacacaggacctcattgatgaatctgaagaagaacgatttgaagaaatgcctgaaactagtcatctgattgacctgcccacatgtgaactcaataaacttgaagagattgctgacttagttacctcagtgctctcctcacctatccgtagggaaaagctggctctcgccttggaaaatgaaggctatattaaaaaactattgcagctgttccaagcttgcgagaacctagaaaacactgaaggcttacaccatttgtatgaaattattagaggaatcttattcctaaataaggcaactctttttgaggtaatgttttctgatgagtgtatcatggatgtcgtgggatgccttgaatatgaccctgctttggctcagccaaaaagacatagagaattcttgaccaaaactgcaaagttcaaggaagttataccaataacagactctgaactaaggcaaaaaatacatcagacttacagggtacagtacattcaggacatcattttgcccacaccatctgtttttgaagagaattttctttctactcttacgtcttttattttcttcaacaaagttgagatagtcagcatgttgcaggaagatgagaagtttttgtctgaagtttttgcacaattaacagatgaggctacagatgatgataaacggcgtgaattggttaattttttcaaggagttttgtgcattttctcagacattacaacctcaaaacagggatgcatttttcaaaacattggcaaaattgggaattcttcctgctcttgaaattgtaatgggcatggatgatttgcaagtcagatcagctgctacagatatattttcttatctagtagaatttagtccatctatggtccgagagtttgtaatgcaagaagctcagcagagtgatgacgatattcttcttattaatgtggtaattgaacaaatgatctgtgatactgatcctgagctaggaggcgctgttcagttaatgggacttcttcgtactctaattgatccagagaacatgctggctacaactaataaaaccgaaaaaagtgaatttctaaattttttctacaaccattgtatgcatgttctcacagcaccacttttgaccaatacttcagaagacaaatgtgaaaaggataatatagttggatcaaacaaaaacaacacaatttgtcccggtgcccttcgctttatgaggcggataattggacttaaagatgaattttataatcgttacatcaccaagggaaatctttttgagccagttataaatgcacttctggataatggaactcggtataatctgttgaattcagctgttattgagttgtttgaatttataagagtggaagatatcaagtctcttactgcccatatagttgaaaacttttataaagcacttgaatcgattgaatatgttcagacattcaaaggattgaagactaaatatgagcaagaaaaagacagacaaaatcagaaactgaacagtgtaccatctatattgcgtagtaacagatttcgcagagatgcaaaagccttggaagaggatgaagaaatgtggtttaatgaagatgaagaagaggaaggaaaagcagttgtggcaccagtggaaaaacctaagccagaagatgattttccagataattatgaaaagtttatggagactaaaaaagcaaaagaaagtgaagacaaggaaaaccttcccaaaaggacatctcctggtggcttcaaatttactttctcccactctgccagtgctgctaatggaacaaacagtaaatctgtagtggctcagataccaccagcaacttctaatggatcctcttccaaaaccacaaacttgcctacgtcagtaacagccaccaagggaagtttggttggcttagtggattatccagatgatgaagaggaagatgaagaagaagaatcgtcccccaggaaaagacctcgtcttggctcataaaatatttattaggggaccctcaacatgtggtcttacaatgctgcaactgttcagtgagctgaaaatctgaatcagaaagctttctcaattgaacttataaaatatacaaggagtagcaaaagacagtatatcagctaagagagtttagttctaataaaaatcaggcttcccaggaacttgattgcttgctagtaattaaggggtttgccttttaggctgtcaaaacaaacattagtaaccagaacctgggagacagcttctcagcaaggaaaagtcacaggtttggggacggtttaggggaggggaaaaggttgatataataatgcagggttgctcctcggggtgtcgatctagaaacaattttacagaacttcagttgtaaactcaataacattacttgtataatggtgctggccatgttgttgttttaatcagttgcctctttttaaaagaaatttttatggaaaacacattcaactatcattaaaaaaatgaagttaagctgttgggaccatttctttaagatttaacaaaagttcagccttttaggtagttgaagggaagtacaccccgtattcagcacatgttgagttttctacaccaggaattttcaatatgtatattgatgaaaacaagctcaattcaaactggacagttttaagataatgttaaaatcagcacttttagagacaacgaaggccaagaatcagtacagtagtattccaaaatgattttctctagaaatttgaaagtagatcgaacagaatgttgtcaaccgcctaccagtacaatcttttgtggaagatactttgaaatcactttctactttgttagtaaagttctgtctttccagagctgcaagttttaaagtgttacttatacagaccaaccaagaatagtgctgaattaagtggcatttagtatctagaagccattttgatccaagaagctacttaagtgtcaaagtcagcatgcagcacatgtagcttttctgtaaacaagggtgtgatatgaaagctgcttttttaagaagagtaaaagcacattccatatacgtaagtgaattttaaaaataaattgaggcaaacagttaagttttatttttagagcaacaagttaactgtaaatattttaatgttagtttgctcatctatgatctgagatcatgccgaagtgagaaaaatctccccaaaatacaatttaatgcattgggaaaaaaaaactttaacagtaattccagccacaatctttagatcacccttgtaatgtgttacgggtccatttttcctggaatcgtttaatctaaagcagtttcccctgttttggagattttgtagttaattttaattttggctattgtttggaaaagatgagctgtctgtgtagatatgaagtatagttttttccataaaacagatgtttattttgtattaaaaaataccactgtacttgttttacaccatttgtatacatgtggtgatattaatgctaaactgtaaaattcaggaattaaaatgtgaccctgtaattccataattgatgtttgtgtttggtttgttgtaaatataaattaactccattttgagatatgtcaattttacagtatcttttaaaagccaataaaattatccataaatatttattataaactgctagatcataccccaattttaatgaaataattctaaacaaatgcgggtcaatggcactttatcagtgactacttatagaaggtaagccttggggaaatcatagcatcacagtatggagcttttctcaccttttcaattaaaggtgtacatatagtaagaaagaaagaccttccacctcataaggcaggtgactcaggatattttaaactaagatcagtaaagttcccatccactttctttgaatcatcaaattttatcgagacccatctctcagcttttagtaaatttcttcttaaaataagcccacatgtaaaacactttcctagttactttttgtttgtttgtttgagtctcgctctgttgcccaggctggagtgtagttgcacgatttcggcttattgcaacatccgccacctgggttcaagcaattctctgcctcagcctgagtagctgggattacaggtgcccgtcaccatgccaggctaatttttgtattttcagtagagacggggtttcaccatcttggccaggctggtcttaaactcctgacctcacaatccacccgcctcagcctccctatctctgtatcttatgaagacttcctttttctttctgaagagctgccataagtcttaaacatttaaatcatcagaaccttttcttgtagcagaaatgtgaatgttttcttgaagtacaggttacggttttcatggtacaagtgcttacctacgacgataagagaacaaggcttaaaatatccctcaaaagaacaattgtgagaattccatgttagcggctgtctttaaacgactaccctcaggcagatctgggtttttatatctttatcttcattcagtgaagcaagccaaaagcccacatttgtatgccttaggtcttcttaaaatggtatctgtaaacatgtgtccaatataaaaactatttttaataaaaagttacatgaaacaga

SEQ ID NO: 204553 - DNA, 2295 bp, Artificial Sequence
  derived and/or modified sequence
atgagcgacaccagaagaagagtgaaggtgtacaccctgaacgaggacagacagtgggacgacagaggcaccggccacgtgagcagcacctacgtggaggagctgaagggcatgagcctgctggtgagagccgagagcgacggcagcctgctgctggagagcaagatcaaccccaacaccgcctaccagaagcagcaggacaccctgatcgtgtggagcgaggccgagaactacgacctggccctgagcttccaggagaaggccggctgcgacgagatctgggagaagatctgccaggtgcagggcaaggaccccagcgtggaggtgacccaggacctgatcgacgagagcgaggaggagagattcgaggagatgcccgagaccagccacctgatcgacctgcccacctgcgagctgaacaagctggaggagatcgccgacctggtgaccagcgtgctgagcagccccatcagaagagagaagctggccctggccctggagaacgagggctacatcaagaagctgctgcagctgttccaggcctgcgagaacctggagaacaccgagggcctgcaccacctgtacgagatcatcagaggcatcctgttcctgaacaaggccaccctgttcgaggtgatgttcagcgacgagtgcatcatggacgtggtgggctgcctggagtacgaccccgccctggcccagcccaagagacacagagagttcctgaccaagaccgccaagttcaaggaggtgatccccatcaccgacagcgagctgagacagaagatccaccagacctacagagtgcagtacatccaggacatcatcctgcccacccccagcgtgttcgaggagaacttcctgagcaccctgaccagcttcatcttcttcaacaaggtggagatcgtgagcatgctgcaggaggacgagaagttcctgagcgaggtgttcgcccagctgaccgacgaggccaccgacgacgacaagagaagagagctggtgaacttcttcaaggagttctgcgccttcagccagaccctgcagccccagaacagagacgccttcttcaagaccctggccaagctgggcatcctgcccgccctggagatcgtgatgggcatggacgacctgcaggtgagaagcgccgccaccgacatcttcagctacctggtggagttcagccccagcatggtgagagagttcgtgatgcaggaggcccagcagagcgacgacgacatcctgctgatcaacgtggtgatcgagcagatgatctgcgacaccgaccccgagctgggcggcgccgtgcagctgatgggcctgctgagaaccctgatcgaccccgagaacatgctggccaccaccaacaagaccgagaagagcgagttcctgaacttcttctacaaccactgcatgcacgtgctgaccgcccccctgctgaccaacaccagcgaggacaagtgcgagaaggacaacatcgtgggcagcaacaagaacaacaccatctgccccggcgccctgagattcatgagaagaatcatcggcctgaaggacgagttctacaacagatacatcaccaagggcaacctgttcgagcccgtgatcaacgccctgctggacaacggcaccagatacaacctgctgaacagcgccgtgatcgagctgttcgagttcatcagagtggaggacatcaagagcctgaccgcccacatcgtggagaacttctacaaggccctggagagcatcgagtacgtgcagaccttcaagggcctgaagaccaagtacgagcaggagaaggacagacagaaccagaagctgaacagcgtgcccagcatcctgagaagcaacagattcagaagagacgccaaggccctggaggaggacgaggagatgtggttcaacgaggacgaggaggaggagggcaaggccgtggtggcccccgtggagaagcccaagcccgaggacgacttccccgacaactacgagaagttcatggagaccaagaaggccaaggagagcgaggacaaggagaacctgcccaagagaaccagccccggcggcttcaagttcaccttcagccacagcgccagcgccgccaacggcaccaacagcaagagcgtggtggcccagatcccccccgccaccagcaacggcagcagcagcaagaccaccaacctgcccaccagcgtgaccgccaccaagggcagcctggtgggcctggtggactaccccgacgacgaggaggaggacgaggaggaggagagcagccccagaaagagacccagactgggcagctag

SEQ ID NO: 204554 - protein, 1610 aa, Artificial Sequence
  derived and/or modified sequence
MKKEGSSGSFRLQPNTGSLSRAVSWINFSSLSRQTKRLFRSDGELSVCGQQVEVDDENWIYRAQPRKAVSNLDEESRWTVHYTAPWHQQENVFLPTTRPPCVEDLHRQAKLNLKSVLRECDKLRHDGYRSSQYYSQGPTFAANASPFCDDYQDEDEETDQKCSLSSSEEERFISIRRPKTPASSDFSDLNTQTNWTKSLPLPTPEEKMRQQAQTVQADVVPINITASGTGQDDADGHSVYTPDHYSTLGRFNSCRSAGQRSETRDSSCQTEDVKVVPPSMRRIRAQKGQGIAAQMGHFSGSSGNMSVLSDSAGIVFPSRLDSDAGFHSLPRSGARANIQSLEPRLGALGPAGDMNGTFLYQRGHPQADENLGHLGGASGTGTLLRPKSQELRHFESENIMSPACVVSPHATYSTSIIPNATLSSSSEVIAIPTAQSAGQRESKSSGSSHARIKSRDHLISRHAVKGDPQSPGRHWNEGHATILSQDLDPHSPGEPALLSLCDSAVPLNAPANRENGSQAMPYNCRNNLAFPAHPQDVDGKSESSYSGGGGHSSSEPWEYKSSGNGRASPLKPHLATPGYSTPTSNMSSCSLDQTSNKEDAGSLYSEDHDGYCASVHTDSGHGSGNLCNSSDGFGNPRHSVINVFVGRAQKNQGDRSNYQDKSLSRNISLKKAKKPPLPPSRTDSLRRIPKKSSQCNGQVLNESLIATLQHSLQLSLPGKSGSSPSQSPCSDLEEPWLPRSRSQSTVSAGSSMTSATTPNVYSLCGATPSQSDTSSVKSEYTDPWGYYIDYTGMQEDPGNPAGGCSTSSGVPTGNGPVRHVQEGSRATMPQVPGGSVKPKIMSPEKSHRVISPSSGYSSQSNTPTALTPVPVFLKSVSPANGKGKPKPKVPERKSSLISSVSISSSSTSLSSSTSTEGSGTMKKLDPAVGSPPAPPPPPVPSPPFPCPADRSPFLPPPPPVTDCSQGSPLPHSPVFPPPPPEALIPFCSPPDWCLSPPRPALSPILPDSPVSLPLPPPLLPSSEPPPAPPLDPKFMKDTRPPFTNSGQPESSRGSLRPPSTKEETSRPPMPLITTEALQMVQLRPVRKNSGAEAAQLSERTAQEQRTPVAPQYHLKPSAFLKSRNSTNEMESESQPASVTSSLPTPAKSSSQGDHGSAAERGGPVSRSPGAPSAGEAEARPSPSTTPLPDSSPSRKPPPISKKPKLFLVVPPPQKDFAVEPAENVSEALRAVPSPTTGEEGSVHSREAKESSAAQAGSHATHPGTSVLEGGAAGSMSPSRVEANVPMVQPDVSPAPKQEEPAENSADTGGDGESCLSQQDGAAGVPETNAAGSSSEACDFLKEDGNDEVMTPSRPRTTEDLFAAIHRSKRKVLGRRDSDDDHSRNHSPSPPVTPTGAAPSLASPKQVGSIQRSIRKSSTSSDNFKALLLKKGSRSDTSARMSAAEMLKNTDPRFQRSRSEPSPDAPESPSSCSPSKNRRAQEEWAKNEGLMPRSLSFSGPRYGRSRTPPSAASSRYSMRNRIQSSPMTVISEGEGEAVEPVDSIARGALGAAEGCSLDGLAREEMDEGGLLCGEGPAASLQPQAPGPVDGTASAEGREPSPQCGGSLSEES

SEQ ID NO: 204555 - DNA, 4833 bp, Artificial Sequence
  derived and/or modified sequence
atgaagaaggagggcagcagcggcagcttcagactgcagcccaacaccggcagcctgagcagagccgtgagctggatcaacttcagcagcctgagcagacagaccaagagactgttcagaagcgacggcgagctgagcgtgtgcggccagcaggtggaggtggacgacgagaactggatctacagagcccagcccagaaaggccgtgagcaacctggacgaggagagcagatggaccgtgcactacaccgccccctggcaccagcaggagaacgtgttcctgcccaccaccagacccccctgcgtggaggacctgcacagacaggccaagctgaacctgaagagcgtgctgagagagtgcgacaagctgagacacgacggctacagaagcagccagtactacagccagggccccaccttcgccgccaacgccagccccttctgcgacgactaccaggacgaggacgaggagaccgaccagaagtgcagcctgagcagcagcgaggaggagagattcatcagcatcagaagacccaagacccccgccagcagcgacttcagcgacctgaacacccagaccaactggaccaagagcctgcccctgcccacccccgaggagaagatgagacagcaggcccagaccgtgcaggccgacgtggtgcccatcaacatcaccgccagcggcaccggccaggacgacgccgacggccacagcgtgtacacccccgaccactacagcaccctgggcagattcaacagctgcagaagcgccggccagagaagcgagaccagagacagcagctgccagaccgaggacgtgaaggtggtgccccccagcatgagaagaatcagagcccagaagggccagggcatcgccgcccagatgggccacttcagcggcagcagcggcaacatgagcgtgctgagcgacagcgccggcatcgtgttccccagcagactggacagcgacgccggcttccacagcctgcccagaagcggcgccagagccaacatccagagcctggagcccagactgggcgccctgggccccgccggcgacatgaacggcaccttcctgtaccagagaggccacccccaggccgacgagaacctgggccacctgggcggcgccagcggcaccggcaccctgctgagacccaagagccaggagctgagacacttcgagagcgagaacatcatgagccccgcctgcgtggtgagcccccacgccacctacagcaccagcatcatccccaacgccaccctgagcagcagcagcgaggtgatcgccatccccaccgcccagagcgccggccagagagagagcaagagcagcggcagcagccacgccagaatcaagagcagagaccacctgatcagcagacacgccgtgaagggcgacccccagagccccggcagacactggaacgagggccacgccaccatcctgagccaggacctggacccccacagccccggcgagcccgccctgctgagcctgtgcgacagcgccgtgcccctgaacgcccccgccaacagagagaacggcagccaggccatgccctacaactgcagaaacaacctggccttccccgcccacccccaggacgtggacggcaagagcgagagcagctacagcggcggcggcggccacagcagcagcgagccctgggagtacaagagcagcggcaacggcagagccagccccctgaagccccacctggccacccccggctacagcacccccaccagcaacatgagcagctgcagcctggaccagaccagcaacaaggaggacgccggcagcctgtacagcgaggaccacgacggctactgcgccagcgtgcacaccgacagcggccacggcagcggcaacctgtgcaacagcagcgacggcttcggcaaccccagacacagcgtgatcaacgtgttcgtgggcagagcccagaagaaccagggcgacagaagcaactaccaggacaagagcctgagcagaaacatcagcctgaagaaggccaagaagccccccctgccccccagcagaaccgacagcctgagaagaatccccaagaagagcagccagtgcaacggccaggtgctgaacgagagcctgatcgccaccctgcagcacagcctgcagctgagcctgcccggcaagagcggcagcagccccagccagagcccctgcagcgacctggaggagccctggctgcccagaagcagaagccagagcaccgtgagcgccggcagcagcatgaccagcgccaccacccccaacgtgtacagcctgtgcggcgccacccccagccagagcgacaccagcagcgtgaagagcgagtacaccgacccctggggctactacatcgactacaccggcatgcaggaggaccccggcaaccccgccggcggctgcagcaccagcagcggcgtgcccaccggcaacggccccgtgagacacgtgcaggagggcagcagagccaccatgccccaggtgcccggcggcagcgtgaagcccaagatcatgagccccgagaagagccacagagtgatcagccccagcagcggctacagcagccagagcaacacccccaccgccctgacccccgtgcccgtgttcctgaagagcgtgagccccgccaacggcaagggcaagcccaagcccaaggtgcccgagagaaagagcagcctgatcagcagcgtgagcatcagcagcagcagcaccagcctgagcagcagcaccagcaccgagggcagcggcaccatgaagaagctggaccccgccgtgggcagcccccccgcccccccccccccccccgtgcccagcccccccttcccctgccccgccgacagaagccccttcctgcccccccccccccccgtgaccgactgcagccagggcagccccctgccccacagccccgtgttccccccccccccccccgaggccctgatccccttctgcagcccccccgactggtgcctgagcccccccagacccgccctgagccccatcctgcccgacagccccgtgagcctgcccctgcccccccccctgctgcccagcagcgagcccccccccgccccccccctggaccccaagttcatgaaggacaccagaccccccttcaccaacagcggccagcccgagagcagcagaggcagcctgagaccccccagcaccaaggaggagaccagcagaccccccatgcccctgatcaccaccgaggccctgcagatggtgcagctgagacccgtgagaaagaacagcggcgccgaggccgcccagctgagcgagagaaccgcccaggagcagagaacccccgtggccccccagtaccacctgaagcccagcgccttcctgaagagcagaaacagcaccaacgagatggagagcgagagccagcccgccagcgtgaccagcagcctgcccacccccgccaagagcagcagccagggcgaccacggcagcgccgccgagagaggcggccccgtgagcagaagccccggcgcccccagcgccggcgaggccgaggccagacccagccccagcaccacccccctgcccgacagcagccccagcagaaagcccccccccatcagcaagaagcccaagctgttcctggtggtgccccccccccagaaggacttcgccgtggagcccgccgagaacgtgagcgaggccctgagagccgtgcccagccccaccaccggcgaggagggcagcgtgcacagcagagaggccaaggagagcagcgccgcccaggccggcagccacgccacccaccccggcaccagcgtgctggagggcggcgccgccggcagcatgagccccagcagagtggaggccaacgtgcccatggtgcagcccgacgtgagccccgcccccaagcaggaggagcccgccgagaacagcgccgacaccggcggcgacggcgagagctgcctgagccagcaggacggcgccgccggcgtgcccgagaccaacgccgccggcagcagcagcgaggcctgcgacttcctgaaggaggacggcaacgacgaggtgatgacccccagcagacccagaaccaccgaggacctgttcgccgccatccacagaagcaagagaaaggtgctgggcagaagagacagcgacgacgaccacagcagaaaccacagccccagcccccccgtgacccccaccggcgccgcccccagcctggccagccccaagcaggtgggcagcatccagagaagcatcagaaagagcagcaccagcagcgacaacttcaaggccctgctgctgaagaagggcagcagaagcgacaccagcgccagaatgagcgccgccgagatgctgaagaacaccgaccccagattccagagaagcagaagcgagcccagccccgacgcccccgagagccccagcagctgcagccccagcaagaacagaagagcccaggaggagtgggccaagaacgagggcctgatgcccagaagcctgagcttcagcggccccagatacggcagaagcagaaccccccccagcgccgccagcagcagatacagcatgagaaacagaatccagagcagccccatgaccgtgatcagcgagggcgagggcgaggccgtggagcccgtggacagcatcgccagaggcgccctgggcgccgccgagggctgcagcctggacggcctggccagagaggagatggacgagggcggcctgctgtgcggcgagggccccgccgccagcctgcagccccaggcccccggccccgtggacggcaccgccagcgccgagggcagagagcccagcccccagtgcggcggcagcctgagcgaggagagctag

SEQ ID NO: 204556 - DNA, 4833 bp, Artificial Sequence
  derived and/or modified sequence
atgaagaaagaagggtctagcggtagctttaggctccagcccaacaccggcagcctcagcagagctgtgtcttggatcaatttttcctcactgtcaaggcaaaccaaaaggctgttcagatctgacggagagctatcagtgtgcggccaacaagtcgaagtcgatgacgaaaactggatttacagagcccaaccacggaaagccgttagcaacctggatgaagagtcaaggtggacggtgcattataccgcaccatggcatcaacaagagaacgtcttcctcccgactacacggcctccttgcgtggaggacctccacaggcaggccaagctgaaccttaaatcagtgctccgtgagtgtgataaactcagacacgacggttaccgctcttcccagtactatagtcagggcccgacttttgcagccaacgccagtccattttgcgatgactaccaggacgaagatgaagagacggatcagaaatgctcactctcatcaagtgaagaagaacgctttatctcaattcggcgcccaaaaacccctgcttcaagcgatttctcagacttgaacacacagacaaactggacaaagagcctgccgctgccgactcctgaagagaagatgcgccagcaggcccagacagtccaggccgacgtggttccaataaacattaccgctagcggaacaggacaagacgacgctgatggtcacagtgtgtacacccctgaccattatagtacactcggccggtttaacagctgccgtagcgcaggacagcgttctgaaaccagagatagctcctgccagacagaagacgtgaaggtggtgcctccctccatgcgacgaattcgtgctcagaaaggccaaggcattgcagctcagatggggcacttttccggttccagcggtaacatgtccgtgttatctgactctgccgggatcgtgtttccctctagactggactcagatgctggcttccactcactgcctagatccggtgcacgcgccaatatccagagtctggaaccccgattaggcgctttgggacccgcgggtgacatgaacggcacgttcctataccaaagaggccaccctcaagccgacgaaaaccttgggcacttgggaggcgccagtggtacggggactctgttacgacctaaaagtcaagagcttcggcattttgagagcgagaatatcatgtctccagcatgtgtggtttccccccacgcaacctactccacttcaatcattcccaacgcaacgttatcaagttctagtgaggtgattgctatcccgaccgcccagagtgcaggacaacgggagtcaaagagttctggatcgagccacgctcgcattaagtctcgggatcatctgattagcaggcacgcagtgaaaggtgacccacagtctccaggacgccactggaatgagggccatgctacaatccttagtcaggaccttgatccccatagccctggcgaacctgcccttctgagcctatgcgattccgccgttccccttaacgctccagctaacagagagaatgggagccaggctatgccatataattgccgtaataatttagctttccctgcccacccccaggacgtagatggaaagtcggagtcttcctacagcggtggggggggacacagtagttctgagccttgggagtacaaatctagtggcaatggacgcgcctctcctctaaaacctcatcttgccacgccaggttattcaacccctactagcaatatgagctcttgtagtctcgatcagacatctaacaaagaggatgccgggtctctgtacagcgaggaccatgacggttattgcgccagcgtccacacagactccgggcatgggagcggaaacctgtgtaacagctcagacggctttggcaatccccggcattcagtcataaacgtatttgtgggtcgtgcacagaagaatcagggcgaccgaagtaactatcaggataagtccctgagtcgtaatatcagcctgaagaaggcgaaaaagccacccctgcccccctcccgaacggacagtctcagacgaatccctaagaaatcctcccagtgcaacggtcaggtcctgaacgagtctctgattgcaacccttcagcactcactgcaattgagcctgccagggaagtccggatcatccccatcccaatccccatgtagtgacctggaggagccatggcttccaaggtctcggtcccagagtaccgttagcgctgggagctcgatgacttctgcaaccactcctaacgtctatagtctctgtggcgcaacccccagtcaaagtgacacatcttcagtgaagagcgagtatactgacccatggggctactacatagactacacagggatgcaggaggaccccggaaatcctgcaggtggatgtagcacatccagcggagtgcccacgggcaatgggcctgtccggcatgtccaggagggcagccgggcgaccatgccccaggtgcctggaggctccgttaaacctaaaatcatgtcccctgagaaatcccaccgtgtgatcagcccaagcagcgggtacagcagccagtcaaataccccaactgctttgacaccagtgcctgtctttttgaaaagcgtgtcccccgctaatggaaaaggtaagcccaaacctaaggttccagaacgcaagagcagtctgatctcttccgtttccatctcatcatcttctacttctctgtcgtcttccacatctacagagggtagtggtacgatgaaaaagctggatccagccgtgggctccccccccgcacccccgccccctcccgtgccaagtcctccatttccgtgccctgctgaccggagcccttttcttccacccccccctcccgttacagactgctctcagggtagccccctgccgcactcgcccgtctttccaccacctccccccgaagcgcttatccccttctgcagccccccagactggtgtcttagccccccaaggcctgctctttccccgattctaccagactctcctgtctctctgcctctccctccccctttgctacctagctccgaaccccccccggcaccacctctagatccaaagtttatgaaagacacacgacccccgtttacaaacagcggacagccagaatcatcccgtggctctctacgaccgccttcgactaaagaggagacctctagacctccgatgccgttgatcactacagaggctctgcagatggtccagcttaggccagtgaggaaaaattctggcgcagaagcagctcagctttccgagcgcaccgcccaggaacaacggacgccagtggccccacagtaccatctcaagccttctgcattcttaaagtccaggaactctacaaatgagatggagtccgagtcacagcctgccagtgttacaagctctcttcccactcccgcaaaaagttccagccagggcgaccatggttcagccgccgaacgcggaggccccgtgtcaagatcgccaggagcaccgtctgcgggggaagcagaagccaggccttccccaagcacaaccccactgcctgacagctctccctccaggaagccacctccgattagtaagaagcctaagctgtttctcgtggtaccccccccacagaaagactttgcagtggaacccgccgagaacgtatctgaggccctccgcgctgtgccatctccaactaccggagaagaaggatcagttcactctcgcgaagccaaggagagctctgcagcgcaggcggggtcccatgcaacccacccagggacctctgtgctggaaggaggcgccgccggaagcatgtcccccagtagagtggaagcaaatgtgccaatggttcagcccgatgtctctcctgcacccaagcaggaagaaccagctgaaaactcagcggacactggcggcgatggggaatcttgtttgtcccaacaagatggagctgccggcgtccccgagaccaacgcggcgggaagttctagcgaagcgtgtgactttctgaaagaggacggaaacgacgaagtgatgaccccctctcggccgaggacaactgaagacctatttgcggctattcaccgcagcaagcgcaaagtgctcggccggcgtgatagcgacgacgaccacagccgtaatcactcccccagtcctcctgtcacacccaccggcgccgcgccaagtttggcaagccccaaacaggtgggatcaatccagcgctccattcgcaaatcttcaacttcctcagacaattttaaagccctcctcctgaagaagggctccaggagtgatacatccgcccgtatgtcggccgcagaaatgctgaagaacactgatcctagatttcagcgaagccgctcagagccaagcccggacgccccggaatcaccatcaagctgttctcctagtaagaaccgccgtgcgcaagaggagtgggcaaaaaatgagggtctgatgccacgtagcctcagtttctccggcccacgttacggtagaagtcgtactcctcctagcgctgcctcctcgaggtattcaatgcggaatagaatccaaagttcaccaatgaccgtaataagcgaaggcgaaggggaagcagttgagcccgtggattcaatagctcgtggagcattgggagcagcggagggatgctcgctcgacgggttagcaagggaagagatggatgagggcggcctgctgtgtggcgagggccctgccgcgtcccttcagccccaggcaccaggtcccgtggacggaacagccagcgctgagggaagggagccttccccacagtgcggtggctctctctcagaggagagttag

SEQ ID NO: 204557 - DNA, 4833 bp, Artificial Sequence
  derived and/or modified sequence
atgaagaaggagggcagcagcggcagcttccggctgcagcccaacacaggcagcctgagcagagctgtgtcctggatcaacttcagcagcctgagccggcagaccaagaggctcttcagaagtgatggagagctgtctgtgtgtggccagcaggtggaggtggatgatgagaactggatctaccgggcccagcccaggaaggctgtgagcaacctggatgaggagagccgctggacagtgcactacacagccccctggcaccagcaggagaatgtgttcctgcccaccaccaggcctccctgtgtggaggacctgcaccggcaggccaagctgaacctgaagtctgtgctgagagaatgtgacaagctgcggcatgatggctaccgcagcagccagtactacagccagggccccacctttgctgccaatgccagccccttctgtgatgactaccaggatgaagatgaggagacagaccagaagtgcagcctgagcagcagcgaggaggagcgcttcatcagcatccggcggcccaagaccccagccagcagtgacttcagtgacctgaacacccagaccaactggaccaagagcctgcccctgcccaccccagaggagaagatgaggcagcaggcccagacagtgcaggctgatgtggtgcccatcaacatcacagccagcggcaccggccaggatgatgctgatggccacagcgtgtacaccccagaccactacagcaccctgggccgcttcaacagctgccgctctgctggccagaggtctgagacccgggacagcagctgccagacagaagatgtgaaggtggtgcccccatccatgaggcgcatccgggcccagaagggccagggcattgctgcccagatgggccacttcagcggcagcagcggcaacatgtctgtgctgagtgacagcgctggcatcgtgttccccagccggctggacagtgatgctggcttccacagcctgcccaggtctggggcccgggccaacatccagagcctggagccccggctgggcgccctgggccctgctggggacatgaatggcaccttcctgtaccagaggggccacccccaggctgatgagaacctgggccacctgggcggggccagcggcaccggcaccctgctgcggcccaagagccaggagctgcggcactttgaaagtgagaacatcatgagccctgcctgtgtggtgagcccccacgccacctacagcaccagcatcatccccaatgccaccctgagcagcagcagcgaggtgattgccatccccacagcccagagcgctggccagcgggagagcaagagcagcggcagcagccacgcccgcatcaagagccgggaccacctgatcagcagacatgctgtgaagggggacccccagagccctggccgccactggaatgaaggacatgccaccatcctgagccaggacctggacccccacagccctggagagcccgccctgctgagcctgtgtgacagcgctgtgcccctgaatgccccagccaaccgggagaatggcagccaggccatgccctacaactgcaggaacaacctggccttccctgcccacccccaggatgtggatggcaagtctgagagcagctacagcggcggcggcggccacagcagcagcgagccctgggagtacaagagcagtggaaatggccgggccagccccctgaagccccacctggccaccccaggctacagcacccccaccagcaacatgagcagctgcagcctggaccagaccagcaacaaggaggatgctggcagcctgtacagcgaggaccatgatggctactgtgcctctgtgcacacagattctggccacggcagcggcaacctgtgcaacagcagtgatggctttggaaaccccaggcacagcgtcatcaacgtgtttgtgggccgggcccagaagaaccagggcgacaggagcaactaccaggacaagagcctgagcaggaacatcagcctgaagaaggccaagaagccacccctgccccccagcaggacagacagcctgcggcgcatccccaagaagagcagccagtgcaatggccaggtgctgaatgaaagcctgattgccaccctgcagcacagcctgcagctgagcctgcccgggaagagcggcagcagccccagccagagcccctgcagcgacctggaggagccctggctgcccaggagccgcagccagagcacagtgtctgctggcagctccatgaccagcgccaccaccccaaatgtgtacagcctgtgtggggccacccccagccagagcgacaccagctctgtgaagtctgagtacacagacccctggggctactacatcgactacacaggcatgcaggaggaccccggcaacccagctgggggctgcagcaccagcagcggcgtgcccactggaaatggacctgtgagacatgtgcaggagggcagccgggccaccatgccccaggtgcctgggggctctgtgaagcccaagatcatgagccctgagaagagccacagggtcatcagccccagcagcggctacagcagccagagcaacacccccacagccctgacccctgtgcctgtgttcctgaagtctgtgtccccagccaacgggaagggcaagcccaagcccaaggtgcctgagaggaagagcagcctcatcagctctgtgtccatcagcagcagcagcaccagcctgagcagcagcaccagcacagagggcagcggcaccatgaagaagctggaccctgctgtgggcagccccccagcccctcctcctcctcctgtgcccagcccccccttcccctgcccagctgacaggagccccttcctgcccccacctcctcctgtgacagactgcagccagggcagccccctgccccacagccctgtgttccccccacctcctcctgaggccctgatccccttctgcagccccccagactggtgcctgagcccccccaggcctgccctgagccccatcctgcctgacagccctgtgtccctgcccctgcccccacccctgctgcccagcagcgagcccccaccagccccacccctggaccccaagttcatgaaggacacccggccccccttcaccaacagcggccagcctgagagcagccggggcagcctgcggccccccagcaccaaggaggagaccagcaggcctcccatgcccctcatcaccacagaggccctgcagatggtgcagctgcggcctgtgaggaagaacagcggggctgaggccgcccagctgtctgagaggacagcccaggagcagaggacccctgtggccccccagtaccacctgaagcccagcgccttcctgaagagcaggaacagcaccaatgagatggagagcgagagccagcctgcctctgtgaccagcagcctgcccaccccagccaagagcagcagccagggcgaccacggcagcgctgctgagcggggcggccctgtgagccgcagccctggggcccccagcgctggggaggccgaggcccggcccagccccagcaccacccccctgcctgacagcagccccagcaggaagcccccacccatcagcaagaagcccaagctgttcctggtggtgcccccaccccagaaggactttgctgtggagccagcagaaaatgtgtctgaggccctgcgggctgtgcccagccccaccaccggggaggagggctctgtgcacagccgggaggccaaggagagcagcgctgcccaggccggcagccacgccacccaccctggcacctctgtgctggagggcggggccgccggctccatgagccccagccgggtggaggccaacgtgcccatggtgcagccagatgtgtccccagcccccaagcaggaggagcctgctgagaacagcgctgacacaggaggagatggagagagctgcctgagccagcaggatggagctgctggggtgcctgagaccaatgctgctggcagcagcagcgaggcctgtgacttcctgaaggaggatggaaatgatgaggtgatgacccccagccggcccaggaccacagaggacctgtttgctgccatccacaggagcaagaggaaggtgctgggccggcgggacagtgatgatgaccacagcaggaaccacagccccagcccccctgtgacccccaccggggccgcccccagcctggccagccccaagcaggtgggcagcatccagaggagcatcaggaagagcagcaccagcagtgacaacttcaaggccctgctgctgaagaagggcagcagaagtgacaccagcgccaggatgtctgctgctgagatgctgaagaacacagacccccgcttccagaggagccgctctgagcccagcccagatgcccctgagagccccagcagctgcagccccagcaagaacagaagagcccaggaggagtgggccaagaatgaaggcctgatgcccaggagcctgtccttcagcggccccaggtatggccgcagcaggaccccaccttctgctgccagcagccgctacagcatgaggaaccgcatccagagcagccccatgaccgtcatcagcgagggggagggggaggccgtggagcctgtggacagcatcgcccggggggccctgggcgctgctgagggctgcagcctggatggcctggcccgggaggagatggatgaaggaggcctgctgtgtggggagggccctgctgccagcctgcagccccaggcccctggccctgtggatggaacagccagcgctgagggccgggagcccagcccccagtgtggcggcagcctgtctgaggagagctag

SEQ ID NO: 204558 - DNA, 4833 bp, Artificial Sequence
  derived and/or modified sequence
atgaagaaggagggcagcagcggcagcttccggctgcagcccaacaccggctctctgtcacgcgccgtctcttggataaatttttcatccctgtcgcgccagacgaaaaggctctttcgcagcgacggcgagctgtcagtatgtgggcagcaagttgaggtggacgatgaaaactggatataccgggcccaaccccggaaagcagtgtcaaatttggacgaggaatcccgctggacagtgcactacactgcgccctggcatcaacaggaaaacgtgtttctccctactacccgcccgccctgcgtagaggacctgcatcgtcaagccaagcttaatctaaagagtgtgcttcgcgaatgcgacaagctacgccacgacgggtatcgaagttcccagtactattcacagggtccgacgtttgcggccaatgccagccctttttgcgatgactaccaggatgaggacgaggagacagatcagaaatgtagcttgagttcgtcggaggaggagcgctttatctccatccgccggcccaaaacacctgcgtcaagcgacttcagtgatctgaatactcagaccaactggacaaaaagcttacctcttccgactccggaagaaaaaatgcgtcaacaagcccagaccgtgcaggccgatgtcgtgccaatcaatatcaccgcctcaggtaccgggcaggacgatgccgacggccactccgtgtatactccagatcactatagtacattgggtaggtttaactcctgtaggtccgccggtcagcgctcagagactcgagattccagttgtcaaaccgaggacgttaaagtggtgccgccatctatgagaagaatacgcgcgcagaaagggcaggggatcgcggcccagatgggacattttagcgggagcagcgggaacatgtcagtactgagcgatagcgccggtatcgtctttccttctagattggactccgatgcaggttttcacagcctaccccggagcggagctcgggccaatatccagtctctggagccacggttgggcgctctcggcccagcaggagacatgaatgggacattcctgtaccagcgcggccacccccaagcagatgagaacctgggccacctcggcggagcctctgggaccggaacactgctgagaccgaagagtcaggagctgaggcatttcgagtccgagaatatcatgtccccagcttgtgtggtgtctccacacgccacatattcaacctctatcatccccaatgccaccctatcgtcaagctccgaggtcatcgcaattcctactgctcagtctgccggacagcgcgaatcaaagtcttcaggatcttcacatgcccggattaaatcaagggaccacctgatctccaggcatgccgtgaagggagaccctcagagcccgggacgtcactggaacgaaggacacgccacaatcttgtcccaagatctggatccgcactcccctggggagccagcattactctctttatgtgattctgccgttcctctcaacgcccctgccaatagagagaacggtagccaggcgatgccctacaattgtaggaataatcttgcctttcctgcgcacccccaggatgtggatgggaaatcagaatcttcctactccggggggggcggacactccagttcagagccctgggagtataagtccagtgggaatgggcgtgcgtctcctctcaagcctcatctggccaccccagggtatagcacaccgaccagtaatatgtcctcttgcagcctcgatcagacctccaacaaggaagatgccggcagtctgtactccgaggatcacgacggatattgtgcctcagttcacactgactccgggcatggaagcggaaacttatgtaattcttccgatggatttggaaacccgcgacattctgttattaatgtgtttgtaggccgggctcaaaaaaatcaaggtgatagaagtaactaccaggataagagccttagtcgcaatattagcctcaaaaaggctaagaagcccccactccccccatcacggacagatagtttgaggcggatacccaagaaaagttcccagtgcaatgggcaagtgttaaacgaaagcttaattgcaaccctccaacactccctgcagttgagcctgcccgggaaatccggctcatcaccttcgcagagcccatgctccgatctggaggaaccttggctccccagaagccgttcccaatccaccgtgagcgccggttccagtatgacttctgccactaccccgaatgtttacagcctgtgcggcgctacacctagtcagtccgatacaagctccgtgaaatccgagtataccgatccatgggggtactacattgactacacgggtatgcaggaggatccagggaatcccgccggggggtgttccacctcatcaggtgtgccgactggcaacggtccggtccgtcacgtgcaggaaggttctcgcgccacaatgccgcaggtgcccgggggcagcgtgaaacccaagatcatgtctcctgaaaagagccacagggtaatctcaccctccagtgggtacagttcccagtccaatacaccaactgctttgacaccagtcccggtgttccttaagagcgtaagccctgctaacggaaaaggcaagcctaagcctaaggtcccggagcgaaagagctctctcatctctagtgtgtctatatcgagttcgagcacatctctgtcaagctcaacctccaccgagggttctggcacaatgaagaaactggatccagcggttggcagcccccctgcgcctccccccccaccagttccaagccccccctttccctgccccgcagatcgttcacccttcttgcctccaccaccccctgttaccgactgcagtcaggggtccccactgccccactccccagtgttccctccccccccacccgaagcccttattcctttctgtagccctcctgattggtgtcttagcccacccagacccgccctgtccccgattttgcctgatagcccagtgagcctgccattacctcctccacttctgccctcctccgaaccaccacccgcgccccccttggaccccaaattcatgaaagacacaagaccaccgtttacaaactccggtcagcctgagtcttcgcgaggctctctgcgaccacccagcactaaggaggaaacatcaaggccaccaatgcctctgattaccaccgaggcccttcagatggtccaactaaggcctgtccgaaagaattctggggccgaggcggcccagctgtctgaaaggactgcccaggaacaacggactcctgtggctccacagtaccacctaaaaccgtccgctttcctgaagtccaggaacagcaccaacgaaatggaaagcgagtcccaaccagctagcgtgaccagcagtttgccaacccctgcaaagtcgagtagccaaggcgaccacggatctgcagcagagaggggcggtccagttagcagaagtccaggcgctccctctgcaggggaggctgaagcgcgaccatcgccatccacgactcccctgccagacagctccccctctcgcaagccccccccgattagcaagaaacccaagctgtttttggtagttccacctccccaaaaagattttgccgttgaacctgccgagaatgtgtcagaggctctccgggcagttccttctcccactacgggggaagaggggtccgtgcactcccgggaggcaaaggaatcaagtgccgcccaagcgggctctcacgcaacccatcctggtacaagtgtgttagaaggaggcgcagccggcagcatgagcccttcaagggtggaggccaacgttccaatggtgcagccagacgtgtctcccgcccccaagcaagaagagccagcggaaaatagcgccgacacgggaggcgacggggagtcatgtctgagccaacaggacggcgcagccggcgttcccgaaacaaatgctgcaggttcctcttctgaggcgtgcgacttcctcaaggaagatggcaacgatgaggtgatgacaccctcaagaccacggacgacagaagatctgtttgccgctatccacaggagcaaaagaaaggtcctgggacggcgcgattcagacgacgaccatagtagaaaccatagcccttccccccctgtgactccgactggagcagcccccagcctggcttcacccaagcaggttggcagtattcagaggagcatccggaagtcctctacttcatccgacaacttcaaagcattacttttgaagaaagggagccggtccgacacatctgcaaggatgtctgcggctgagatgctaaaaaatacagatccccgcttccagagatcaagatcagagccgtcaccggacgctcccgaaagtccaagctcgtgttccccatcaaagaacaggcgcgcccaggaggaatgggctaagaatgaaggactgatgcccagatcactgtctttttctggtccgaggtacgggagatccagaacacccccttcagcagcatcatcccgctacagtatgcgtaatcgcatacagtcttcaccaatgactgtgataagcgagggggaaggagaagccgtcgaacccgttgattccattgcccggggcgcgttgggggccgccgaagggtgtagcctggacggcttagctcgcgaagagatggacgagggaggactgttatgcggggaaggaccagcggccagcttgcagccacaggccccagggcctgttgacgggaccgcatctgccgaggggagagaaccttccccacagtgcggtggttctctgagcgaggaatcttag

SEQ ID NO: 204559 - DNA, 7500 bp, Artificial Sequence
  derived and/or modified sequence
gagcgcttcacagacgggaaggagagcaagtgggcggtttatgattctgccctgtgctggggcgagtgagctgagctctttgatttctcccaagtaaccgtgtgggtgaactgtaaactgggtgcctggcttgaccctgactctttttctctagggtgaggagttacttcaccagggcagctggctttctgccctggtggggaaagatgcccaggagaggagtaggattacaatttgggatgctagggacacgccaaagagtcggggtgccttggctttgtgttttgcaaagtcctgacaagtactcctgaaatgaacacgctgcttcattttttaaattatacttttatttgtttattattttttggccgtggatatcgcggatctagaaacggagtccacaatgtggctagggtaaaacatttttcttttctttcttaacccctccttttccctttctttttaattgggtgacacagaagccgtctttttggataatgcggtgcctgactgtcagcgttgtctaagagggaaacagcaggctcgtggagaggacctgggccaacgcaaaaaacccagcgttttgtttgctgggctgttctttgtctctagttgattttgaaaagaagatgaaaaaggaaggctcttcaggttccttcagactccagccgaatacaggttctctctcacgtgctgtaagttggataaatttctcctccttgtccaggcagacaaagaggctgtttcgcagtgatggagagctctcggtttgtgggcagcaggtggaagtggatgacgaaaactggatatacagagcccagcccagaaaagcggtttccaacctagatgaggaaagccgatggacagtccactacactgccccgtggcaccagcaggagaatgtgttccttcccaccacaagacccccctgtgttgaggacctgcaccgccaagccaagctcaacctcaaatcagtactgagggaatgcgataagttgcggcatgatggctaccgcagttctcagtactactctcagggacccacctttgcggccaacgccagcccattctgtgatgattaccaagatgaagatgaagaaacagatcaaaagtgttctctgtcttcatcagaagaagaaagatttatttccatcaggagacctaaaacaccagcctcaagtgacttctccgaccttaatactcagacgaactggaccaagtcgcttccactgccaacaccagaagagaagatgcgacagcaagcccaaacagtccaggctgacgtggtgcctattaacataactgcatcaggcactggccaagatgatgctgatggccactcagtgtacacccctgatcactactctacactaggaaggttcaatagctgtcggtctgctgggcagcgctcagaaaccagggactccagctgtcagacggaggatgtgaaggtcgtaccaccttccatgaggagaatcagggcacagaaggggcaaggcattgctgcccagatgggccacttctcaggttcctctggcaacatgtctgtgctgagcgattctgcagggatcgtattcccttcccgccttgacagtgatgctggcttccatagtcttccgcgttctggagcaagggcaaacattcagtcccttgagccgaggctgggtgccctcggccctgcaggagacatgaatggcactttcctctaccagagaggtcacccacaagcagatgaaaacttaggccatttaggaggtgcctcagggactggaacacttttgagacccaaatcccaggagttgagacacttcgagagtgaaaatataatgagcccagcgtgtgtggtttctcctcatgcaacctactccaccagcatcatcccaaatgccacactgtcttcctcttccgaggtcatcgctattcccactgctcagagtgcgggacagcgggaaagtaaaagttctggctcatcacatgcaaggataaaatccagagaccacctcatctccaggcatgctgtgaaaggtgatcctcagtctcccggtcgccactggaatgagggccatgccaccattctttcacaggacttagaccctcattcccctggtgaacccgcactgttgtccctctgtgactcagccgtccctctaaatgctccagcaaatagggagaatgggtcccaagctatgccgtataattgtagaaacaacctggccttcccagcccacccccaagatgtggatggcaagagtgaatctagttattcagggggcggagggcacagcagctcggagccctgggaatacaaatcctcaggtaatggaagggcatcccccctgaagccgcatttagcaactcctggctattccactcccacaagtaacatgagcagctgcagtttggaccaaacgtccaacaaagaggatgctgggtcgctgtattctgaggaccacgatggctactgtgcatctgtgcacactgactctggacatggatctgggaatctgtgcaatagcagtgatggctttgggaaccccaggcacagcgtgatcaatgtttttgttggaagagctcagaaaaaccaaggggaccggtccaattaccaggataaatccctatcaagaaacatctctttgaagaaagcaaagaagcctcccctgccaccctcccggacagactccctccgcaggattcccaagaagagcagccagtgcaacgggcaggtgctcaacgagagcctgatcgccacactccagcactcgctgcagctgagcctcccaggcaagagtggcagctcgccctcccagagcccctgcagtgacttggaagagccctggctgccccgctcccggagccagagcacagttagtgctggcagcagcatgacttccgccaccacccccaatgtctactccctgtgcggggccacgccatcgcagagtgacacaagcagcgtcaagtcagagtacacggacccctggggttattacattgactacacgggcatgcaggaagatccggggaacccggcagggggctgttcaaccagcagtggggtgcccactgggaacgggccagtccgccatgtccaagaagggtccagagccacaatgccccaagtgcccggtggttcagtcaaaccaaagatcatgtcaccagagaagtcacacagagtcatttctccatccagtgggtattccagccagtcgaatacacccacagcactcacccctgtgcctgtgtttttaaaatcagtgtcaccagcaaacgggaaggggaagcccaagcccaaggtaccagaaaggaagtcctctctgatatcttcagtatccatttcctcatcgtccacttctctttcttctagtacttctactgaaggaagtggcactatgaagaagctggatccagccgtgggctctcccccggctcctcctcctcctcctgttccctctcctccattcccttgtcctgcagacaggtctcctttccttcctcccccacctcctgtcacagattgctcccagggctctcctctgcctcactctcctgtgttcccccctccgccgccagaagctctcattcctttctgctccccacctgattggtgcctttctcctccccgccctgcactgagccccattcttccagattcacctgtgtccttgccattgcccccacctctcttaccttcctcggaacccccacctgccccacctcttgaccccaaattcatgaaagacaccaggccgcctttcacaaattctggccagccagaatcctcccggggatccttgaggccgccttctaccaaggaggagaccagcaggccccccatgcccctgataaccacggaagcattgcagatggtgcagttgaggcccgtgagaaagaactcaggcgctgaggcggcacagttgtctgaacgaacagctcaggaacaacgaactccagttgctccacagtaccacttaaagccatctgctttcctgaaatcccgaaatagcacaaatgaaatggagagtgaaagccagcctgcctctgtgacaagctcgcttccgacgcctgccaagagctcgagtcagggtgaccatggcagtgcggctgagcgtggtggccctgtgagccgcagccctggagctccaagcgctggggaggcagaggctcggcccagccccagcaccaccccactcccagactcttcacccagcaggaagccaccccccatttccaagaagcccaaactgttcctggtggtaccacctccgcagaaagattttgcagtggagcccgcagagaacgtgagcgaagccctccgagctgtgcccagccccacgacgggagaggagggctctgtgcacagcagggaggcaaaagagagttctgcagcccaagctggctctcatgccacgcaccctggcacctcggttcttgagggaggagctgcaggatccatgtctcccagcagagtggaagccaatgtccccatggttcagcctgatgtctcaccagcccccaagcaggaggagccagccgagaacagtgcggatactgggggcgatggggagagctgcctatctcaacaggacggagcagctggggtgccggagaccaacgcagccggttcatcctcagaggcctgtgacttcctcaaggaagacgggaatgatgaggtaatgacccccagtcgacccaggaccacagaagacctttttgcagctattcacagatccaaaaggaaagtcctcggccgtagagattcagatgatgaccactcccgaaaccattctccctccccgcccgtgacacccaccggcgctgccccaagcctggcctctccaaagcaagtggggtcgattcagagaagcatccgaaagagcagcaccagcagtgacaacttcaaagctctgctgctgaaaaagggcagtcgttcagacaccagcgcccgcatgtctgcagcagagatgctcaagaacacagaccctagattccagaggtcgaggtcagagccttccccagatgcccccgagagcccgtcaagctgctccccaagcaagaacagaagggcgcaggaggagtgggccaagaacgaaggcttgatgcctcggagtctgtccttttccggccccaggtacggccgcagccgaacgccgccttctgccgccagcagcaggtacagcatgcggaaccggatccagagcagccccatgaccgtcatctcggagggagaaggggaagccgtggagcctgtggacagcatagcccgcggggctctgggcgctgcggagggatgttccctggacggactggcgagggaggagatggacgagggcggcctgctctgtggggaggggcctgccgcctccctgcagccccaggcccccggccctgtggatgggacagccagtgcagagggcagagagccctccccacagtgtggcggttctctgagcgaggagagttagggccaagaacgtaactctcccaggtgacacggggggagacgagcaatgcagcactctaggaagcctgctaggcgcccttccctggctcacccggggagcccactctgcttctgtgctgtgggccccggggttgccagccctgcagtgtgagtgaacggttatttaggactcacctggcacttgccctgtggcttaagaacaagtagaagcttaaacttctgaaagtgcttcccggggaagattttttttttttttttttttttttgctaaatgctgggtgtgtatgtgtgcattttccacactttttaatttttaaaaaatacacatatacacaaacaacatgtacagaaatagaagaaagcaagccagacttaagcttggtagagtaacggagtcctctggtctaggcggtaattgctttcagagaattacgtttatagaaatcagcgagttttgtaagaaaggagaagatgttacttcaagaaagaggcagtagagttgctggttcttaatgcacagaacacacagatatatgcacacgtgtgctgctgaggtgaggcaggtctggtgagcacggagaggctgggaaggggctaagtgactaattggttcaggtacttttttctgggggaggtagactttgcttcttttttgtaaaaatgacaaacgtagaagtggcaatgctgtaacctggtgcctgctgctgtgcagccacatacacacaattgtagcctgatttttagaagtgtgggtaattttttaatgaatttcctccttgagtagcagctgaggtcattgacaactgaagtgatggtgtggacatagagagaggggaagggttggaaaggagtaagtgatacactgctggaatttgtttcctgcctatgaaataaaattatttttcagaattaaatttgaaaacttgcactacagaactatgggtggagcttttccttttacaacagtttttttttttttttttttttaaccagagtttaaacttccattaggcaatttcctgtcacttgaaatgtcaacatttgctaacttttggatatccttttggttacaccaaagaaaaagttatggctatttttttttccttgaactgcctacagtatcatgtcctaattcagaaagatttatcaaaatctattatatattatcttactttgaagaaaatgctgaatagctcttgttagtcaaataaactgataaaaattggtagggcctggctatcaattagccctgggaaatgaatttttagattaaaaaggtttttttgcatcatttggtttgtgcatttttatatttgtttataaataattgagttgctaattacttctaatcttctccaatcagattttcaacaattttagacatgggacacacgtgtgtgaagtctttattttaatgtaataatctcattacccccacccttactcccttaacttccatgtacttagactcctttatttgttaaataaactagagtattgtcttcttcattagaaggacctaggatgacaatgcggagagtcttggtctgaatctagtgcgactaccacctgccagcttttggggggtatggaaatactatctaaaagttggactgcatgggtcaaatcattatgagacttataaactaaaactttagatacccatatagaaatgtctttgaggcaaaaacaaacctaaagaatgaaggctctttcccttctctgaaaaaaacaaaacactgctcttcacacaaccggaagtcaagaccagagatttggagcaattgtctactaatttggcacaaagatcgtttctttagaaaagtggcattggcttttgaatatgaaatcttctcatagctgcctaaaaaagactagaatgtatatggatatcagaaacctttaataatacataatttatgcaaagataagataaagcaacataacactaattataaaactatttttaaatccccatttttaatgaaaaatatacatttgtatttaatttcctttgaataaaacaattgtaaagtaaa

SEQ ID NO: 204560 - DNA, 4832 bp, Artificial Sequence
  derived and/or modified sequence
atgaagaaagagggctcgtctggctctttccggctgcagccaaacaccggaagtttgtccagagctgtctcttggatcaacttttcctctctgtctcgccaaactaaaaggttattccgttcggacggcgagttgagcgtctgcggtcagcaggttgaagtggatgacgagaactggatataccgcgcacaaccaaggaaagccgtgtcaaatctcgacgaagaatctcggtggactgttcattacacagctccttggcaccagcaggagaatgtgttcctgccaaccaccagacctccttgcgtcgaagacctccacagacaggcaaagctcaatttaaaatctgtgttacgcgaatgtgacaaactcaggcatgacgggtacagatcttcccagtattacagccagggacccaccttcgccgctaacgcttccccattctgtgatgattaccaagacgaggacgaggaaaccgatcagaagtgctcattatcgtccagcgaagaggaaagatttataagcatccgtcgccctaagaccccggcttctagcgacttctccgacctgaacacccagaccaactggaccaaaagccttcccttgccgaccccagaagagaagatgagacaacaggctcagactgtccaggcagacgtggtcccaatcaacattacggccagtggcacagggcaagacgacgccgacggacacagtgtatacacccccgaccactacagtactctcggccgtttcaatagctgtagatctgccggtcagagaagcgaaacacgtgactcttcctgccagacggaggatgtgaaggtggtcccgcctagtatgaggcggatcagagcccagaaagggcagggaattgctgcccagatgggccacttttctgggtcatccgggaatatgtccgttctgagcgattccgctggtatcgtttttccgagcaggctggattcagatgctggttttcatagtctgcctcgctctggcgcacgtgcaaatatccagagcctcgagccacgccttggcgctctgggcccagccggagacatgaacggaacatttctgtaccagagaggccaccctcaggctgacgaaaatctgggtcatctgggcggagcctccggaaccggaaccctactgagaccaaagtcccaggagttaagacacttcgaaagtgaaaacattatgagtcctgcttgcgtggtgagcccacacgccacctatagtacctcaatcatacctaatgccacattgtctagttcctctgaggtgatcgcaattcctaccgcccagtccgccggacagcgggagtctaagagctccgggtcgagccatgccagaatcaagagcagagaccatctaatatcgcggcatgctgtcaagggcgacccgcagtcgccagggcgacactggaatgaagggcatgctacaattctcagccaggacctagaccctcactcgcctggggaaccagcgctgctgtccttgtgtgattctgcagttcctctgaacgcccctgcaaatcgcgagaacggtagccaagccatgccctacaactgtcgtaataacttggccttccctgctcatccccaggacgtggatggcaagtcagagtctagttacagcggtggagggggtcatagcagtagcgagccttgggaatacaagtccagcgggaacggaagagccagtcctctgaagcctcatctggcaacccctggctactccacccctaccagcaacatgtcaagctgttcactggatcagacttccaacaaagaggatgctggatctctctacagcgaagaccatgatggatactgtgcatctgtacacacggattccggccatgggtccgggaatctgtgtaattcgtctgacgggttcggtaatccgcgacactctgtcattaacgtcttcgtcgggcgagcacaaaagaaccaaggcgaccgctctaattatcaagataaaagcctgtctcgaaacatctctctcaaaaaggccaagaagccaccactgcctccctccaggacagacagccttcgtcgtatccctaaaaaatcttcgcagtgtaatgggcaggtgctgaatgaatcactcattgccaccctgcagcacagcctccagctgtcactccccggaaaaagcggaagcagccctagtcagtcaccttgtagtgacctggaagaaccatggctgcccagaagtagaagccagtccactgtgtctgcgggatcctccatgactagcgcgactaccccgaatgtctacagtttgtgcggagccacaccttcccaaagtgatacctcgtccgtcaagtcagagtacaccgatccctggggttattacatcgactacactgggatgcaggaagaccccggaaatccggcagggggatgcagtacttcctccggcgtcccgacaggcaatggccctgtccgccacgttcaggaaggaagcagagcgaccatgccccaggttcctggaggaagtgtgaagcccaaaatcatgtccccagaaaagtcccacagagtcatcagtccttcttccggctattcctctcaatctaatacccccacagccttaacccccgtgcccgtgtttctcaaatctgtgtctcctgccaatggaaagggaaagcctaagcccaaggtgcctgagcggaagtcctccctgatcagcagtgtctctataagcagcagtagcactagcctcagttcatccactagtactgaagggtctggcacaatgaaaaagctagaccccgcagtcggctctccgcctgcccctccacctccccctgtgcccagccccccttttccatgccccgcagataggtctccctttctgccccctccaccccctgttaccgattgctcccagggttctccactccctcactctccagtatttcccccacctccacctgaagcactgatacctttctgctctcctcctgattggtgcctcagcccccctcggccagcattgtctccaatcctgccagacagcccagtcagccttccccttcctcctcccttactcccatcctcggagccaccccctgctccgccactagaccctaagttcatgaaggatacgcggcctccgtttacaaattctggccaacctgagagcagccgcggatccttaaggccaccatcaactaaagaagagacaagcaggccccctatgcctctcatcaccactgaggctctgcaaatggtgcagcttcgccctgtgcgaaagaacagcggggcagaggcagctcagctgtcagagaggactgcacaggaacagcggacccccgtagccccacaatatcatctcaaacccagtgcattccttaagagtcggaactcaacgaatgagatggagtccgagagccaaccagcatccgtaacttcgagtctcccgactcccgcaaagagttccagtcagggggaccacggctctgcagcggaaaggggtggacctgtctcccggtcaccaggagctccctctgccggagaggcggaagcccgtccgagcccatctaccacgcccctgccagacagttcgccatcccggaaacctcctcccataagcaaaaagcctaagctgtttctggtggtccctccccctcaaaaggatttcgctgttgagccagccgagaacgtctcagaagctctccgggcagtgccctccccgactacaggcgaggagggctctgtacactcacgcgaggctaaggaaagttctgccgctcaggctggttcccacgcgacacatcctggcacgtcggtgctggagggaggcgctgctggtagtatgagccctagcagggttgaagctaacgttcccatggtccagcctgacgtgagccctgcgcctaaacaggaggagcccgcagagaactctgcagacaccggtggcgacggagaatcatgtttatcacaacaggacggggcagccggtgtcccggaaaccaacgccgctggaagcagttccgaggcctgcgacttcctcaaggaagatggcaacgacgaagtgatgacacccagtagacctcgcaccacggaagatttattcgctgcaatacacagatcaaagcggaaggtgcttggcagaagagactccgacgatgaccatagtcggaaccactctccttcccctccggtgacaccaactggggctgctccctcactggccagtccaaagcaggtgggttcaattcagcgatctattcgcaaaagttctacctcctccgacaatttcaaagcgctgctgttgaagaagggaagccgctccgatacatcagctcgaatgtcggccgctgagatgcttaagaacaccgatcccaggttccaaaggtcacggtccgaaccgagccccgacgctcctgaatcacctagctcttgttccccctcaaaaaataggagagcacaagaggagtgggctaagaacgaaggacttatgcccagaagcttaagctttagcggacccagatatgggagatcacgtactccaccaagcgctgcctcgtcccgatattccatgcgaaatcggatacagtcctcacccatgacagtgatcagcgaaggcgaaggcgaggccgtcgaaccagtggatagcattgcaagaggagccttaggagccgctgaaggatgcagcctggatggtttggcacgcgaggagatggacgaggggggtcttctatgcggagaggggcctgccgcaagcctgcaacctcaagccccaggtccagtggacggaacagccagcgcggaaggtcgagagccgtccccccagtgcggaggctctctgagtgaagagtcata

SEQ ID NO: 204561 - protein, 893 aa, Artificial Sequence
  derived and/or modified sequence
MVPWVRTMGQKLKQRLRLDVGREICRQYPLFCFLLLCLSAASLLLNRYIHILMIFWSFVAGVVTFYCSLGPDSLLPNIFFTIKYKPKQLGLQELFPQGHSCAVCGKVKCKRHRPSLLLENYQPWLDLKISSKVDASLSEVDIPSIITKKLLKAAMKHIEVIVKARQKVKNTEFLQQAALEEYGPELHVALRSRRDELHYLRKLTELLFPYILPPKATDCRSLTLLIREILSGSVFLPSLDFLADPDTVNHLLIIFIDDSPPEKATEPASPLVPFLQKFAEPRNKKPSVLKLELKQIREQQDLLFRFMNFLKQEGAVHVLQFCLTVEEFNDRILRPELSNDEMLSLHEELQKIYKTYCLDESIDKIRFDPFIVEEIQRIAEGPYIDVVKLQTMRCLFEAYEHVLSLLENVFTPMFCHSDEYFRQLLRGAESPTRNSKLNRNTQKRGESFGISRIGSKIKGVFKSTTMEGAMLPNYGVAEGEDDFIEEGIVVMEDDSPVEAVSTPNTPRNLAAWKISIPYVDFFEDPSSERKEKKERIPVFCIDVERNDRRAVGHEPEHWSVYRRYLEFYVLESKLTEFHGAFPDAQLPSKRIIGPKNYEFLKSKREEFQEYLQKLLQHPELSNSQLLADFLSPNGGETQFLDKILPDVNLGKIIKSVPGKLMKEKGQHLEPFIMNFINSCESPKPKPSRPELTILSPTSENNKKLFNDLFKNNANRAENTERKQNQNYFMEVMTVEGVYDYLMYVGRVVFQVPDWLHHLLMGTRILFKNTLEMYTDYYLQCKLEQLFQEHRLVSLITLLRDAIFCENTEPRSLQDKQKGAKQTFEEMMNYIPDLLVKCIGEETKYESIRLLFDGLQQPVLNKQLTYVLLDIVIQELFPELNKVQKEVTSVTSWM

SEQ ID NO: 204562 - DNA, 2682 bp, Artificial Sequence
  derived and/or modified sequence
atggtgccctgggtgagaaccatgggccagaagctgaagcagagactgagactggacgtgggcagagagatctgcagacagtaccccctgttctgcttcctgctgctgtgcctgagcgccgccagcctgctgctgaacagatacatccacatcctgatgatcttctggagcttcgtggccggcgtggtgaccttctactgcagcctgggccccgacagcctgctgcccaacatcttcttcaccatcaagtacaagcccaagcagctgggcctgcaggagctgttcccccagggccacagctgcgccgtgtgcggcaaggtgaagtgcaagagacacagacccagcctgctgctggagaactaccagccctggctggacctgaagatcagcagcaaggtggacgccagcctgagcgaggtggacatccccagcatcatcaccaagaagctgctgaaggccgccatgaagcacatcgaggtgatcgtgaaggccagacagaaggtgaagaacaccgagttcctgcagcaggccgccctggaggagtacggccccgagctgcacgtggccctgagaagcagaagagacgagctgcactacctgagaaagctgaccgagctgctgttcccctacatcctgccccccaaggccaccgactgcagaagcctgaccctgctgatcagagagatcctgagcggcagcgtgttcctgcccagcctggacttcctggccgaccccgacaccgtgaaccacctgctgatcatcttcatcgacgacagcccccccgagaaggccaccgagcccgccagccccctggtgcccttcctgcagaagttcgccgagcccagaaacaagaagcccagcgtgctgaagctggagctgaagcagatcagagagcagcaggacctgctgttcagattcatgaacttcctgaagcaggagggcgccgtgcacgtgctgcagttctgcctgaccgtggaggagttcaacgacagaatcctgagacccgagctgagcaacgacgagatgctgagcctgcacgaggagctgcagaagatctacaagacctactgcctggacgagagcatcgacaagatcagattcgaccccttcatcgtggaggagatccagagaatcgccgagggcccctacatcgacgtggtgaagctgcagaccatgagatgcctgttcgaggcctacgagcacgtgctgagcctgctggagaacgtgttcacccccatgttctgccacagcgacgagtacttcagacagctgctgagaggcgccgagagccccaccagaaacagcaagctgaacagaaacacccagaagagaggcgagagcttcggcatcagcagaatcggcagcaagatcaagggcgtgttcaagagcaccaccatggagggcgccatgctgcccaactacggcgtggccgagggcgaggacgacttcatcgaggagggcatcgtggtgatggaggacgacagccccgtggaggccgtgagcacccccaacacccccagaaacctggccgcctggaagatcagcatcccctacgtggacttcttcgaggaccccagcagcgagagaaaggagaagaaggagagaatccccgtgttctgcatcgacgtggagagaaacgacagaagagccgtgggccacgagcccgagcactggagcgtgtacagaagatacctggagttctacgtgctggagagcaagctgaccgagttccacggcgccttccccgacgcccagctgcccagcaagagaatcatcggccccaagaactacgagttcctgaagagcaagagagaggagttccaggagtacctgcagaagctgctgcagcaccccgagctgagcaacagccagctgctggccgacttcctgagccccaacggcggcgagacccagttcctggacaagatcctgcccgacgtgaacctgggcaagatcatcaagagcgtgcccggcaagctgatgaaggagaagggccagcacctggagcccttcatcatgaacttcatcaacagctgcgagagccccaagcccaagcccagcagacccgagctgaccatcctgagccccaccagcgagaacaacaagaagctgttcaacgacctgttcaagaacaacgccaacagagccgagaacaccgagagaaagcagaaccagaactacttcatggaggtgatgaccgtggagggcgtgtacgactacctgatgtacgtgggcagagtggtgttccaggtgcccgactggctgcaccacctgctgatgggcaccagaatcctgttcaagaacaccctggagatgtacaccgactactacctgcagtgcaagctggagcagctgttccaggagcacagactggtgagcctgatcaccctgctgagagacgccatcttctgcgagaacaccgagcccagaagcctgcaggacaagcagaagggcgccaagcagaccttcgaggagatgatgaactacatccccgacctgctggtgaagtgcatcggcgaggagaccaagtacgagagcatcagactgctgttcgacggcctgcagcagcccgtgctgaacaagcagctgacctacgtgctgctggacatcgtgatccaggagctgttccccgagctgaacaaggtgcagaaggaggtgaccagcgtgaccagctggatgtag

SEQ ID NO: 204563 - DNA, 2682 bp, Artificial Sequence
  derived and/or modified sequence
atggtcccctgggtgcggactatgggacagaagctgaaacagcgacttcgattggacgtgggtcgggaaatctgccgacagtaccctctgttttgctttctactgctgtgcctatcggcagcttcccttttactaaatcggtacattcatatcctcatgatcttttggtcattcgtggcgggcgtcgtgacattttattgcagcctgggtccggactccctcctgcccaatattttttttacgattaagtacaagcctaaacagctgggcctgcaagaattgttcccacagggacactcatgtgcagtttgtggcaaggttaaatgtaagcgacacagaccatctctgctgttggagaactatcagccttggctggacttgaaaattagtagtaaggtggatgcatcactctcagaagttgacatcccatctattatcacaaagaagttgctgaaggctgcaatgaagcatatagaggtcatcgtaaaagcccgtcagaaggtgaagaacactgaattccttcagcaggctgctttagaggaatacgggccagagctacacgtggccttgagatctagaagagacgaactgcattacttaaggaaattaactgaactactgttcccgtacattctccctccaaaagccaccgattgcaggtcattaacactcctgatccgggagatccttagtggatcggtgttcctgccctctctagactttctggcagatccagatacggtcaaccacctcctcatcatctttatcgacgattctccacccgaaaaggctaccgagcctgcctctccactagttccttttctccaaaagttcgccgagccaaggaacaaaaagccgtcggtcctcaagctggagctgaaacagattcgggagcagcaggaccttctgttcaggttcatgaactttctcaagcaggagggcgccgttcatgttttgcagttttgcctgacagtcgaagaattcaacgatagaattttacgacccgagctctctaacgatgaaatgttgtcactacacgaggaactccagaagatctataaaacatactgcctcgatgagtcaattgataagataaggtttgatccattcatcgtagaagaaatccaacggatagctgagggcccttatattgatgtcgtaaaactgcagactatgagatgcttgttcgaggcatatgaacacgtgctctccctgttagaaaatgtgttcacaccgatgttctgccacagcgacgaatactttagacaattgttgaggggcgcagaatctcccacccgcaacagcaagctcaaccgcaatacgcagaagcgaggcgagagctttgggatttcaagaatcggatccaagatcaaaggcgtgtttaaatccactaccatggaaggagccatgctacccaattatggcgtggccgagggcgaagatgatttcattgaagagggcattgtggtgatggaagacgacagcccagtggaagccgtctctacacctaacacgcctagaaatctggctgcctggaagatctccatcccctatgtagacttctttgaggatccttcttcagagcgtaaagagaagaaggaaaggatccctgtgttctgtatcgatgtcgaacgcaatgatcgacgcgctgtaggtcatgagccggaacactggtctgtttaccggcgttatcttgaattttacgtactcgaaagcaagttaacagaatttcatggtgccttcccggacgcccagcttccatctaaaaggataatcgggccaaaaaactatgagttcctgaaaagtaagcgagaagaatttcaggaatacctgcagaagctcttgcagcatcccgagctgagcaatagtcagctactggccgacttcttatcacccaacggcggggaaacacagtttctcgataagattctcccggacgtgaatctcggcaagatcataaagagcgttcccggcaaactcatgaaggaaaaaggacaacacctggaaccatttattatgaattttattaacagctgcgagtcccctaaaccaaaaccgagccgacccgaactaactatcctgtccccaaccagtgaaaacaacaaaaagttgttcaacgaccttttcaaaaacaacgctaacagggcagagaacaccgagcgcaaacagaaccagaattactttatggaggtgatgacagtggaaggagtgtatgactaccttatgtacgtgggtcgggtggtgttccaggtccctgattggctgcaccacctccttatgggaacacgtatactgttcaaaaatactctggagatgtacactgactattatctgcaatgtaagctcgagcaactgtttcaggagcataggttagtttctctgattactctccttagagacgccatcttctgtgagaacaccgagcctaggagcctacaggataagcaaaaaggcgctaaacagaccttcgaagaaatgatgaactatatcccagacctcctcgtgaaatgcattggggaggagaccaaatacgagagcattcgattgctgtttgacgggctccagcaaccagtcctcaataagcagttgacatatgtcctgctggacattgttatacaggagctctttcccgaactgaataaagtgcagaaggaggtaacaagtgtgacttcatggatgtag

SEQ ID NO: 204564 - DNA, 2682 bp, Artificial Sequence
  derived and/or modified sequence
atggtgccctgggtgaggaccatgggccagaagctgaagcagaggctgcggctggatgtgggccgggagatctgccggcagtaccccctcttctgcttcctgctgctgtgcctgtctgctgccagcctgctgctgaaccgctacatccacatcctgatgatcttctggagctttgtggccggcgtggtgaccttctactgcagcctgggccctgacagcctgctgcccaacatcttcttcaccatcaagtacaagcccaagcagctgggcctgcaggagctgttcccccagggccacagctgtgctgtgtgtgggaaggtgaagtgcaagaggcaccggcccagcctgctgctggagaactaccagccctggctggacctgaagatcagcagcaaggtggatgccagcctgtctgaggtggacatccccagcatcatcaccaagaagctgctgaaggccgccatgaagcacatcgaggtgattgtgaaggcccggcagaaggtgaagaacacagagttcctgcagcaggccgccctggaggagtatggccctgagctgcacgtggccctgcggagcagaagagatgagctgcactacctgaggaagctgacagagctgctcttcccctacatcctgccccccaaggccacagactgccgcagcctgaccctgctgatccgggagatcctgagcggctctgtgttcctgcccagcctggacttcctggccgaccctgacacagtgaaccacctgctgatcatcttcattgatgacagccccccagagaaggccacagagcccgccagccccctggtgcccttcctgcagaagtttgctgagcccaggaacaagaagcccagcgtgctgaagctggagctgaagcagatccgggagcagcaggacctgctcttccgcttcatgaacttcctgaagcaggagggcgctgtgcacgtgctgcagttctgcctgactgtggaggagttcaatgaccgcatcctgcggcctgagctgagcaatgatgagatgctgagcctgcacgaggagctgcagaagatctacaagacctactgcctggatgagagcattgacaagatccgctttgaccccttcatcgtggaggagatccagagaattgctgagggcccctacattgatgtggtgaagctgcagaccatgcgctgcctgtttgaggcctatgaacatgtgctgagcctgctggagaatgtgttcacccccatgttctgccacagtgatgagtacttccggcagctgctgcggggagctgagagccccaccaggaacagcaagctgaacagaaacacccagaagagaggagagagctttggcatcagcagaattggcagcaagatcaagggcgtcttcaagagcaccaccatggagggcgccatgctgcccaactacggcgtggccgagggggaggatgacttcatcgaggagggcatcgtggtgatggaggatgacagccctgtggaggccgtgtccacccccaacaccccaagaaacctggccgcctggaagatcagcatcccctacgtggacttctttgaggaccccagcagcgagaggaaggagaagaaggagcgcatccctgtgttctgcattgatgtggagagaaatgaccggcgggctgtgggccacgagcctgagcactggagcgtgtaccgccgctacctggagttctacgtgctggagagcaagctgacagagttccacggggccttcccagatgcccagctgcccagcaagaggatcatcggccccaagaactatgagttcctgaagagcaagcgggaggagttccaggagtacctgcagaagctgctgcagcaccctgagctgagcaacagccagctgctggccgacttcctgagccccaatggaggagagacccagttcctggacaagatcctgcctgatgtgaacctgggcaagatcatcaagtctgtgcctgggaagctgatgaaggagaagggccagcacctggagcccttcatcatgaacttcatcaacagctgtgagagccccaagcccaagcccagcaggcctgagctgaccatcctgagccccaccagcgagaacaacaagaagctgttcaatgacctcttcaagaacaatgccaacagagcagaaaatacagagaggaagcagaaccagaactacttcatggaggtgatgacagtggagggcgtgtatgactacctgatgtatgtgggccgggtggtgttccaggtgcctgactggctgcaccacctgctgatgggcacccgcatcctcttcaagaacaccctggagatgtacacagactactacctgcagtgcaagctggagcagctgttccaggagcaccggctggtgtccctcatcaccctgctgagagatgccatcttctgtgaaaatacagagcccaggagcctgcaggacaagcagaagggggccaagcagacctttgaggagatgatgaactacatcccagacctgctggtgaagtgcatcggggaggagaccaagtatgagagcatccggctgctgtttgatggcctgcagcagcctgtgctgaacaagcagctgacctacgtgctgctggacatcgtcatccaggagctgtttcctgagctgaacaaggtgcagaaggaggtgacctctgtgacctcctggatgtag

SEQ ID NO: 204565 - DNA, 2682 bp, Artificial Sequence
  derived and/or modified sequence
atggtgccctgggtgcggaccatgggccagaagctgaagcagcggctccgcctggacgttggaagagaaatctgtagacagtatcccttattttgtttcctcctgttatgcctctccgccgctagtcttctgctgaataggtatattcacatcctaatgattttttggtcttttgtagctggagtggtaacgttctattgctcactgggaccagatagtctgctccctaatattttcttcacaatcaaatacaagcctaagcaactgggcctacaggaattgttcccccagggtcactcctgtgcagtgtgcgggaaggtgaagtgcaagaggcatcggccaagccttcttttagagaattatcaaccatggctggaccttaagatctcctccaaagtagacgccagcctctcagaagtggatattccctctattataacaaagaagctgcttaaagccgcaatgaagcatatagaggtcatcgtcaaagcacgacaaaaggtaaagaacactgagttcctgcagcaggctgcgctggaagagtacggacccgagctccacgtggcgctgagatcgagaagggatgaacttcattacctgagaaaacttacagaattgttgttcccatacatccttccgccaaaggccacagactgtcggtctctgacacttctaatccgtgagatactctccgggtcagtcttcttgcccagccttgacttcctcgcggatcccgatacggttaatcacttgttaataatcttcatcgatgatagcccacccgaaaaagccacagagcctgcctctcccctcgtgccatttctgcagaagtttgcggagcctagaaataaaaagcccagcgtactgaaactcgagttgaagcagatccgcgagcaacaagacttgctcttcagattcatgaattttctgaaacaggagggtgctgtgcacgtgctgcagttctgtttaaccgtggaggagtttaatgaccgaatcctgagaccagagctcagcaatgacgagatgcttagtttgcatgaagaactccagaaaatatataagacgtattgtctggatgagtctatagacaaaattcgctttgatccgtttattgtcgaagagatccagcgcatcgcagaaggtccgtacatagatgtcgtcaagctgcagaccatgcgctgcttgtttgaggcatacgagcacgtgctgtctcttctggagaacgtgttcactcctatgttttgccatagcgatgaatacttcagacaactgcttcggggcgcagaaagtcctacaagaaactccaagctaaatagaaacacccagaagcggggtgaatcattcggcatcagtaggatcggcagcaaaattaagggggtgtttaaaagcacaaccatggagggagccatgctgcctaattatggagttgcagaaggggaggatgattttatcgaggaagggatcgtggttatggaagacgacagtcccgtcgaagccgttagcacacccaatacaccaaggaatctcgcagcctggaagatatccattccatatgtagacttttttgaggacccctcctctgagaggaaagaaaagaaggagagaatccccgtgttctgtatagacgtggaacggaacgaccgaagggcagtggggcacgagcctgagcattggagtgtgtaccgaaggtacctggagttctatgtacttgagagcaaactgacggaattccatggggcttttcctgacgcgcagctccctagcaagaggatcatcggtcccaagaattacgagttcctaaaatctaaacgtgaggagttccaggaatatctgcagaagctgctccagcatcccgagctttcgaattcccagctgctggctgactttctttctcccaacggcggggaaactcaatttttggataagattctccccgacgttaacctcgggaaaattattaagagtgtgccaggaaagcttatgaaagaaaaaggacaacacttagagccttttataatgaactttatcaattcttgcgaatctcccaaacccaagcccagtaggcctgagcttaccatcctgtctcctacctcagaaaacaacaagaagctatttaacgacctcttcaagaataatgccaatcgggctgaaaacaccgagcgcaagcaaaatcagaactatttcatggaggtcatgactgtcgaaggagtgtacgattatctcatgtatgttggacgggtcgtatttcaggtgcctgactggttgcaccacctcctgatgggaacccgcatcctgttcaagaatacactcgagatgtatactgattactacctgcagtgtaaactggagcaactattccaggaacaccgactggtcagcctaatcacgctgttgcgggatgccattttttgcgagaataccgagcctaggagtttgcaggacaaacagaaaggagcaaagcagacctttgaggagatgatgaactacatacccgacttgcttgtaaagtgtattggagaggaaaccaaatacgagtcaatccgtctgctgttcgatggactgcagcagcccgtgcttaataagcagctcacctacgtgctcctggatatcgtgattcaggaactgttccccgagctaaataaggttcagaaagaagttaccagtgttactagctggatgtag

SEQ ID NO: 204566 - DNA, 2682 bp, Artificial Sequence
  derived and/or modified sequence
atggtgccatgggtccgcactatgggccagaaactgaagcagagacttaggcttgatgtaggcagagagatttgccggcagtaccccctgttttgttttctgcttttgtgtctcagcgccgctagcttactcctgaatcgctacatacatattctcatgattttctggtcctttgtcgcgggagtcgttacgttctactgctcactcggccctgactctctcttacccaacatcttctttaccattaagtacaaaccgaagcagctgggcctccaggagttgttccctcagggacacagttgtgccgtgtgcggcaaagtgaagtgcaagcgccaccgcccatcactgcttctggaaaattaccagccctggttagacctaaagatctcgagtaaggttgatgcatcactgtccgaagtggacattccttctatcatcaccaagaagcttttgaaagccgcaatgaaacatattgaggtgatcgtgaaagcacgtcaaaaggtgaagaacacagaattcctgcagcaggctgctctggaagaatacggcccagagctgcatgtcgcactgcgctctcgtcgggacgagctccactacctgcgcaaacttacagagttgctattcccatacatcttgccacccaaagcgacagattgtcggtcgctcacgctactgatccgggagatcttgagcggctccgtgtttctgccttcgctcgatttccttgcagatcccgatacagttaaccatctgctgatcatttttattgacgactcaccacctgagaaagcaactgagccagccagtccactggtcccttttttgcagaagttcgccgaaccaaggaacaaaaaaccttcggtgctgaaactagagctgaagcagattcgagagcagcaggatctcctgttccgcttcatgaacttcctgaaacaagagggagccgtgcatgttctgcaattttgtctgaccgtggaggagtttaatgaccggatcctgagacccgagctcagcaatgatgagatgctgtctctccacgaagagcttcagaagatctataaaacatactgcctggacgaaagcatcgacaagatacgctttgacccctttatagtcgaggagattcagcgtattgctgaaggaccgtacattgatgtagtaaaacttcagaccatgagatgcctttttgaggcctatgaacacgtgctgtcgcttctggagaatgtgttcacccccatgttttgccattcagacgagtacttccgacagctcctgcgaggcgcagagagcccaacaagaaactctaagctgaaccggaacacccaaaaaagaggcgagtctttcggtatctcacggattggttccaagatcaaaggcgttttcaagtcaactacaatggagggagctatgcttcccaattatggggtggctgaaggcgaggacgactttatcgaggagggaattgtggtgatggaagacgacagtcctgtggaagcagtgtccacccccaacacaccacggaaccttgctgcctggaagatcagtattccctacgtggacttcttcgaggacccctcctccgaaagaaaggagaaaaaggaacgtataccagtgttttgcattgatgtggagagaaacgatcgacgagccgtaggccatgaacccgagcactggtctgtctacaggcggtacctggagttctatgtgctggagagtaaactgacagagtttcacggagcattcccagacgcccagttacccagcaagcgcataatcggtcctaagaattatgaattcctcaagtccaagagagaggagtttcaagagtatctccaaaagctgctccagcaccctgagctcagcaacagccaactgttggctgattttctgtcaccaaatggaggcgagacacagtttctcgacaagattctgcccgacgtgaacttgggaaaaataataaagtcagtgccaggtaagctgatgaaggagaagggccaacatcttgagccttttattatgaattttatcaactcatgtgagagcccgaaaccaaagcctagtcgtcccgaacttacaatactgagtcccacgagtgaaaacaacaaaaaactcttcaacgatctcttcaagaataatgcaaaccgggcagagaatacagaaagaaagcagaaccagaattactttatggaagtcatgacggtagagggggtctacgactacctgatgtatgttggacgggtcgttttccaggtgcctgattggctacatcacctgctcatggggacaaggattctgttcaaaaataccttagagatgtacacagattactatctacaatgcaaattagaacaactgtttcaggagcacaggctggtgtctttgatcaccctcctacgcgatgcgattttctgtgagaacacagagccacgctcactccaggacaaacagaagggtgctaagcagaccttcgaagaaatgatgaactacatacctgacctcttggtgaaatgtatcggagaagaaaccaaatatgagagtatcaggctcctgtttgacggtcttcagcagcccgtattaaataagcagctgacatacgtgttgctggatattgtcatacaggagctgttccccgagctgaacaaagtgcagaaggaggtgacctccgttacctcctggatgtag

SEQ ID NO: 204567 - DNA, 3348 bp, Artificial Sequence
  derived and/or modified sequence
ccgcggccgcgcacgcgcggcggggggcgtggggctgggcccagccggacgcgacctcagcctgcggcggctaactgccggtaggcgtctgtgtgcgccgccaagtcggtggggcggggacgcgaggtgtggatggggggtcgccttgacctctgcctcagccagtagcgcagtctcggcctcgccgttacggagatggtgccctgggtgcggacgatggggcagaagctgaagcagcggctgcgactggacgtgggacgcgagatctgccgccagtacccgctgttctgcttcctgctgctctgtctcagcgccgcctccctgcttcttaacaggtatattcatattttaatgatcttctggtcatttgttgctggagttgtcacattctactgctcactaggacctgattctctcttaccaaatatattcttcacaataaaatacaaacccaagcagttaggacttcaggaattatttcctcaaggtcatagctgtgctgtttgtggtaaagtgaaatgtaaacgacataggccttctttgctacttgaaaactaccagccatggctagacctgaaaatttcttccaaggttgatgcatctctctcagaggtggatattccatctattataaccaagaaactattaaaagcagcaatgaagcatatagaagtgatagttaaagccagacagaaagtaaaaaatacagagtttttacagcaagctgctttagaagaatatggtccagagcttcatgttgctttgagaagtcgaagagatgaattgcactatttaaggaaacttactgaactgctttttccttatattttgcctcctaaagcaacagactgcagatctctgaccttacttataagagagattctgtctggctctgtgttccttccttctttggatttcctagctgatccagatactgtgaatcatttgcttatcatcttcatagatgacagtccacctgaaaaagcaactgaaccggcttctcctttggttccattcttgcagaaatttgcagaacctagaaataaaaagccatctgtgctgaagttagaattgaagcaaatcagagagcaacaagatcttttatttcgttttatgaactttctgaaacaagaaggcgcagtgcacgtgttgcagttttgtttgactgtggaggaatttaatgatagaattttacgaccagaattatcaaatgatgaaatgctgtctcttcatgaagaattgcagaagatttataaaacatactgtttggatgaaagtattgacaaaattagatttgatcccttcattgtagaagagattcaaagaattgctgaaggcccatacatagatgttgtgaaacttcaaactatgagatgtctttttgaagcatatgaacatgttctttcccttttggagaatgtatttactcctatgttctgccatagtgatgagtatttcagacaacttttaagaggtgcagaatcaccaacacgcaattcaaaattgaacaggaacacacagaaaaggggagaatcatttggaatcagcagaataggtagcaaaattaaaggagtattcaaaagtaccacaatggagggagctatgttgcctaattatggtgtagctgaaggtgaagatgattttattgaagaaggtattgttgtaatggaagatgattctccagtggaggctgtgagcacacctaatactccccgaaaccttgctgcatggaaaattagcattccatatgtagacttttttgaggatccctcctctgaaaggaaggagaaaaaagaaagaattcctgtgttttgtattgatgttgaaagaaatgatagaagagcagttggacacgagcctgaacattggtctgtctatagaagatatcttgaattctatgtacttgaatcaaaactaacagaatttcatggtgcatttcctgatgcccagcttccttctaagaggatcattggccccaaaaattatgaattcttaaagtcaaagagggaagagttccaagaatatctacagaaacttctgcagcatccagaactgagtaatagtcaacttctggcagactttctttcccctaatggtggggaaacacaatttcttgataagatactaccagatgtaaatcttgggaaaattataaaatctgttcctggaaaactaatgaaagagaaaggtcagcatttggaaccttttatcatgaatttcattaattcttgtgagtctccaaagcctaaaccaagtagaccagaactgaccattctcagccctacttcagaaaacaacaagaagcttttcaatgatctgtttaaaaataatgcaaaccgtgctgaaaatacagagagaaagcaaaatcagaattattttatggaggtgatgactgtagaaggagtctatgattacctgatgtatgtaggacgggtagttttccaggttcctgactggcttcatcatctcttaatgggaactcgaatcctctttaaaaacaccctggaaatgtatactgattactatcttcagtgtaaactagaacagctatttcaggagcaccgtttggtctcactcataacacttctcagagatgctatattctgtgaaaacactgaacctcgctctctccaagataagcaaaaaggagcaaaacagacttttgaagaaatgatgaattacattccagatctgttagtcaagtgtattggtgaagaaaccaagtatgaaagcatcagacttctgtttgatggcttacagcaaccagtactcaacaagcagctgacttatgttttattggacattgtgatacaggaactgtttccagagctcaataaggtacaaaaggaagttacctctgtgacatcttggatgtaaacacttggatttggtatagaataacccattgaaatttctgctgtgcgagggtggtagaaatttacttttttgggtatattcttatatatattatgtacatcgctgtctgaaattttagttattttttgtttttaataaagactaacacaaacttaatgattaaaagtgattgagtctcatagtctttcatttgctagctgtgatccaaattttattagaacataagtcacttgttattgccatttttaaaagagaaaattcataatgatgttatggcaaacagataagactgataaacttcgtattgtatagctttgaaaataattatgcctagtatggagaaacaggaataagatctgattttcttagagttaatatattttagtagattggttttccttttttttattttgtacatagttaactgtgtatctataaataaagcatcctatatgagtttttaataataaa

SEQ ID NO: 204568 - protein, 354 aa, Artificial Sequence
  derived and/or modified sequence
MAEVLRTLAGKPKCHALRPMILFLIMLVLVLFGYGVLSPRSLMPGSLERGFCMAVREPDHLQRVSLPRMVYPQPKVLTPCRKDVLVVTPWLAPIVWEGTFNIDILNEQFRLQNTTIGLTVFAIKKYVAFLKLFLETAEKHFMVGHRVHYYVFTDQLAAVPRVTLGTGRQLSVLEVRAYKRWQDVSMRRMEMISDFCERRFLSEVDYLVCVDVDMEFRDHVGVEILTPLFGTLHPGFYGSSREAFTYERRPQSQAYIPKDEGDFYYLGGFFGGSVQEVQRLTRACHQAMMVDQANGIEAVWHDESHLNKYLLRHKPTKVLSPEYLWDQQLLGWPAVLRKLRFTAVPKNHQAVRNP

SEQ ID NO: 204569 - DNA, 1065 bp, Artificial Sequence
  derived and/or modified sequence
atggccgaggtgctgagaaccctggccggcaagcccaagtgccacgccctgagacccatgatcctgttcctgatcatgctggtgctggtgctgttcggctacggcgtgctgagccccagaagcctgatgcccggcagcctggagagaggcttctgcatggccgtgagagagcccgaccacctgcagagagtgagcctgcccagaatggtgtacccccagcccaaggtgctgaccccctgcagaaaggacgtgctggtggtgaccccctggctggcccccatcgtgtgggagggcaccttcaacatcgacatcctgaacgagcagttcagactgcagaacaccaccatcggcctgaccgtgttcgccatcaagaagtacgtggccttcctgaagctgttcctggagaccgccgagaagcacttcatggtgggccacagagtgcactactacgtgttcaccgaccagctggccgccgtgcccagagtgaccctgggcaccggcagacagctgagcgtgctggaggtgagagcctacaagagatggcaggacgtgagcatgagaagaatggagatgatcagcgacttctgcgagagaagattcctgagcgaggtggactacctggtgtgcgtggacgtggacatggagttcagagaccacgtgggcgtggagatcctgacccccctgttcggcaccctgcaccccggcttctacggcagcagcagagaggccttcacctacgagagaagaccccagagccaggcctacatccccaaggacgagggcgacttctactacctgggcggcttcttcggcggcagcgtgcaggaggtgcagagactgaccagagcctgccaccaggccatgatggtggaccaggccaacggcatcgaggccgtgtggcacgacgagagccacctgaacaagtacctgctgagacacaagcccaccaaggtgctgagccccgagtacctgtgggaccagcagctgctgggctggcccgccgtgctgagaaagctgagattcaccgccgtgcccaagaaccaccaggccgtgagaaacccctag

SEQ ID NO: 204570 - DNA, 1065 bp, Artificial Sequence
  derived and/or modified sequence
atggccgaggtgctgcgcaccctagccggaaagcccaagtgtcacgccctccgcccaatgatcctcttcctgattatgctggtactcgtgctcttcggctatggggtgctgagtcctcggagcctaatgcctggcagtcttgagagaggtttttgcatggccgttcgggagcccgaccacctccagcgtgtctcactgcccagaatggtctacccccagccgaaagtattgacgccttgcagaaaggacgtccttgtggtgaccccctggttggcccccattgtctgggaaggcacctttaatattgacatcttgaatgagcagttccgtttgcagaacactacaataggcctcacagtatttgctatcaaaaaatacgttgcgtttctaaagctgtttttggagaccgccgagaaacactttatggtaggacaccgggtgcattactatgtgtttaccgaccagttggcggccgtccctagagtaaccttgggaaccggccgccagctgagcgtgttggaggtgagggcatacaagcgctggcaagacgttagcatgaggaggatggagatgatatcagatttctgtgagaggaggttcctgtctgaagttgactatctggtatgcgtggacgtggacatggagtttcgcgatcatgtgggagtggaaatcctgacgcccctgttcggcacattacatccagggttctacggctccagcagagaggctttcacctacgagaggcggccgcagagccaggcctacatccctaaggacgaaggagacttctattacctcggtggtttcttcggaggatctgtccaggaagtgcagcgcctaacaagagcatgccatcaggctatgatggtggatcaggcaaacgggattgaagccgtgtggcacgatgagtcccacctgaataagtacctgttgcggcacaaacccaccaaggtactgtcccctgagtatctgtgggaccagcaactgctggggtggcccgcagttctccggaagctccgatttaccgccgtgcccaagaaccaccaagccgtgcggaacccatag

SEQ ID NO: 204571 - DNA, 1065 bp, Artificial Sequence
  derived and/or modified sequence
atggccgaggtgctgcggaccctggccggcaagcccaagtgccacgccctgcggcccatgatcctcttcctgatcatgctggtgctggtgctgtttggctacggcgtgctgagccccaggagcctgatgcctggcagcctggagcggggcttctgcatggctgtgcgggagccagaccacctgcagagggtgtccctgcccaggatggtgtacccccagcccaaggtgctgaccccctgcaggaaggatgtgctggtggtgaccccctggctggcccccatcgtgtgggagggcaccttcaacatcgacatcctgaatgagcagttccggctgcagaacaccaccatcggcctgactgtgtttgccatcaagaagtatgtggccttcctgaagctgttcctggagacagctgagaagcacttcatggtgggccaccgggtgcactactacgtgttcacagaccagctggccgctgtgccccgggtgaccctgggcaccggccggcagctgtctgtgctggaggtgcgggcctacaagcgctggcaggatgtgtccatgaggaggatggagatgatcagtgacttctgtgagcggcgcttcctgtctgaggtggactacctggtgtgtgtggatgtggacatggagttccgggaccacgtgggcgtggagatcctgacccccctgtttggcaccctgcaccctggcttctacggcagcagccgggaggccttcacctatgaaagaagaccccagagccaggcctacatccccaaggatgaaggagacttctactacctgggcggcttcttcggcggctctgtgcaggaggtgcagaggctgacccgggcctgccaccaggccatgatggtggaccaggccaacggcatcgaggccgtgtggcatgatgagagccacctgaacaagtacctgctgcggcacaagcccaccaaggtgctgagccctgagtacctgtgggaccagcagctgctgggctggccagctgtgctgaggaagctgcgcttcaccgctgtgcccaagaaccaccaggccgtgaggaacccctag

SEQ ID NO: 204572 - DNA, 1555 bp, Artificial Sequence
  derived and/or modified sequence
atggccgaggtgttgcggacgctggccggaaaaccaaaatgccacgcacttcgacctatgatccttttcctaataatgcttgtcttggtcttgtttggttacggggtcctaagccccagaagtctaatgccaggaagcctggaacgggggttctgcatggctgttagggaacctgaccatctgcagcgcgtctcgttgccaaggatggtctacccccagccaaaggtgctgacaccgtgtaggaaggatgtcctcgtggtgaccccttggctggctcccattgtctgggagggcacattcaacatcgacatcctcaacgagcagttcaggctccagaacaccaccattgggttaactgtgtttgccatcaagaaatacgtggctttcctgaagctgttcctggagacggcggagaagcacttcatggtgggccaccgtgtccactactatgtcttcaccgaccagctggccgcggtgccccgcgtgacgctggggaccggtcggcagctgtcagtgctggaggtgcgcgcctacaagcgctggcaggacgtgtccatgcgccgcatggagatgatcagtgacttctgcgagcggcgcttcctcagcgaggtggattacctggtgtgcgtggacgtggacatggagttccgcgaccacgtgggcgtggagatcctgactccgctgttcggcaccctgcaccccggcttctacggaagcagccgggaggccttcacctacgagcgccggccccagtcccaggcctacatccccaaggacgagggcgatttctactacctgggggggttcttcggggggtcggtgcaagaggtgcagcggctcaccagggcctgccaccaggccatgatggtcgaccaggccaacggcatcgaggccgtgtggcacgacgagagccacctgaacaagtacctgctgcgccacaaacccaccaaggtgctctcccccgagtacttgtgggaccagcagctgctgggctggcccgccgtcctgaggaagctgaggttcactgcggtgcccaagaaccaccaggcggtccggaacccgtgagcggctgccaggggctctgggagggctgccggcagccccgtccccctcccgcccttggttttagcagaacgggtaaactctgtttcctttgtccgtcctgttgtgagtaactgaagcctaggccccgtccccacctcaaatcacacacaccccctccccaccacagagacaccattacatacacagacacacacagaaagacacacacagacacaaaatcacacacacaccctccccgccacagagacaccattacatacacagacacacacagaaagacacagacacaaaatcacacacacaccctccccgccacagagacacaccattacatacacagacacgcaatcgcagatacgcccttccggccacagaaacacaccattacacacacatacacagaaagacacacacagacacacaatcacacgcagcccctccccgccacagagacacaccattacatacacagacacacacagaaagacac

SEQ ID NO: 204573 - DNA, 1065 bp, Artificial Sequence
  derived and/or modified sequence
atggccgaggtgctgcggaccctggccggcaagcccaagtgccacgccctccgccctatgatcctctttctcatcatgctcgtgttggtcctgtttgggtatggagtcctctcaccaagaagcctgatgcccggatccctggagcgaggattttgtatggcggtgcgagagccagaccatctacagcgcgtgtccttgcccagaatggtgtatccacagcccaaagtcctgactccctgcaggaaggatgtgctggtagtgacaccatggctcgcacccattgtgtgggaaggtactttcaatatagatattctgaatgagcagttccgcttgcaaaatacaacaatcgggctgactgtcttcgcaatcaaaaaatacgtggccttccttaaactttttctggagacggccgagaagcatttcatggtgggacaccgagtgcactactatgtgttcacagaccagcttgccgccgttccccgcgtaaccctgggaaccggacgtcagctctccgtcctggaggtacgggcttacaagcgctggcaagacgtgagcatgaggcgtatggaaatgattagcgacttctgcgaacggcgatttctgtctgaggttgactacctggtgtgcgtcgacgtagacatggagtttcgcgaccatgtaggcgtggagatactgacccctttgttcggcactctgcatccgggcttttacgggtccagccgcgaagcttttacatatgaaaggagaccacaatctcaggcgtacatccctaaggatgagggtgacttttattacctgggggggttcttcggagggtccgtgcaagaggtgcagcgccttactagggcctgtcaccaggctatgatggtggaccaggctaacggtattgaggccgtctggcacgacgagtctcatcttaacaaatacctgctcagacataaaccaacaaaggttctttctccagaatacctgtgggatcagcagctgctaggatggcctgcggttcttagaaaactgcgctttaccgcggtgccgaagaaccaccaggccgtgcggaacccttag

SEQ ID NO: 204574 - DNA, 1065 bp, Artificial Sequence
  derived and/or modified sequence
atggccgaggtgctgcggaccctcgccggtaaacctaaatgtcatgccctgcggccaatgatcctcttcttaataatgcttgtgctggtccttttcgggtacggcgtgcttagcccaagatcactgatgccaggaagcctcgaaaggggcttctgtatggcagtgcgcgaaccagatcatctccagagagtaagtctccctagaatggtctaccctcagccaaaggtcctcactccttgccggaaggatgttttagtggttactccatggctagccccaatcgtttgggaaggcacctttaacattgatatcctgaatgaacaatttcggctccagaataccacgataggcctaaccgtgtttgctataaagaagtacgtcgcctttttaaaactgttccttgagactgccgagaagcatttcatggtcggccacagagtgcactattatgtgttcacagatcaactggcagcagtgccccgtgtaaccttgggaaccgggcgacaactttctgtcctcgaagtgagggcctacaagcgctggcaggacgtcagcatgagacgaatggaaatgattagcgacttctgtgaacgtcgatttctgagcgaagtggactatcttgtctgtgttgacgtggacatggaattccgggatcacgtgggagtggagattcttacaccattatttgggactctgcaccctggcttctatggctcaagcagggaggcgtttacatatgagcgcagaccccagagccaggcctacatccccaaggacgagggcgatttttactatctgggtggtttctttgggggaagcgtgcaggaagtgcaacgtctgactagggcttgtcatcaggccatgatggtagaccaagctaatggaattgaggccgtctggcacgatgaatctcatctcaacaaatacctactgaggcataagcccactaaggtgctaagtccagagtatctgtgggaccagcaactgctcggatggcccgcagtactgaggaagctgcgattcaccgcggtccccaagaaccaccaggccgtgaggaacccgtag

SEQ ID NO: 204575 - protein, 293 aa, Artificial Sequence
  derived and/or modified sequence
MAYHSGYGAHGSKHRARAAPDPPPLFDDTSGGYSSQPGGYPATGADVAFSVNHLLGDPMANVAMAYGSSIASHGKDMVHKELHRFVSVSKLKYFFAVDTAYVAKKLGLLVFPYTHQNWEVQYSRDAPLPPRQDLNAPDLYIPTMAFITYVLLAGMALGIQKRFSPEVLGLCASTALVWVVMEVLALLLGLYLATVRSDLSTFHLLAYSGYKYVGMILSVLTGLLFGSDGYYVALAWTSSALMYFIVRSLRTAALGPDSMGGPVPRQRLQLYLTLGAAAFQPLIIYWLTFHLVR

SEQ ID NO: 204576 - DNA, 882 bp, Artificial Sequence
  derived and/or modified sequence
atggcctaccacagcggctacggcgcccacggcagcaagcacagagccagagccgcccccgaccccccccccctgttcgacgacaccagcggcggctacagcagccagcccggcggctaccccgccaccggcgccgacgtggccttcagcgtgaaccacctgctgggcgaccccatggccaacgtggccatggcctacggcagcagcatcgccagccacggcaaggacatggtgcacaaggagctgcacagattcgtgagcgtgagcaagctgaagtacttcttcgccgtggacaccgcctacgtggccaagaagctgggcctgctggtgttcccctacacccaccagaactgggaggtgcagtacagcagagacgcccccctgccccccagacaggacctgaacgcccccgacctgtacatccccaccatggccttcatcacctacgtgctgctggccggcatggccctgggcatccagaagagattcagccccgaggtgctgggcctgtgcgccagcaccgccctggtgtgggtggtgatggaggtgctggccctgctgctgggcctgtacctggccaccgtgagaagcgacctgagcaccttccacctgctggcctacagcggctacaagtacgtgggcatgatcctgagcgtgctgaccggcctgctgttcggcagcgacggctactacgtggccctggcctggaccagcagcgccctgatgtacttcatcgtgagaagcctgagaaccgccgccctgggccccgacagcatgggcggccccgtgcccagacagagactgcagctgtacctgaccctgggcgccgccgccttccagcccctgatcatctactggctgaccttccacctggtgagatag

SEQ ID NO: 204577 - DNA, 882 bp, Artificial Sequence
  derived and/or modified sequence
atggcctatcactccggctacggcgcccacgggtcaaagcatcgggccagggccgcccctgaccccccgcctttgtttgatgacacctccgggggctactcatctcagcctgggggctatcccgcaactggggccgatgtggcctttagcgttaatcacctcttgggagatcctatggcaaatgtagctatggcttacgggagctcgatagccagtcatggtaaagacatggtccacaaggaactgcaccggttcgtctctgtcagcaaacttaagtacttctttgccgtcgatacggcatacgtagctaagaagttaggcctactggtgttcccttacacacatcagaactgggaggtgcagtacagcagagacgcccctttaccgccacggcaagacctgaatgccccggacctatacattcccaccatggccttcattacctacgtgctgttagctgggatggctttaggaatccagaagcgtttctccccagaagtgctgggactgtgcgcgagtacagccttagtgtgggttgtgatggaggtcttagcccttctgctcggcctgtatttagcgactgtcaggtcagacctgtctaccttccatttactggcatattcggggtataagtatgttggaatgatcctaagcgtcctgaccggcctactgtttgggtccgacggatattatgtagctctagcctggacctccagcgccctgatgtactttattgtacgaagcttgcgcaccgcggcgctcggacccgactctatgggcggcccagtcccccggcagaggctgcagctataccttacgctgggggctgccgcattccagcctctgattatctattggcttaccttccaccttgtgcgatag

SEQ ID NO: 204578 - DNA, 882 bp, Artificial Sequence
  derived and/or modified sequence
atggcctaccacagcggctatggagcccacggcagcaagcaccgggcccgggccgccccagaccccccacccctgtttgatgacaccagcggcggctacagcagccagcccggcggctacccagccactggagcagatgtggccttctctgtgaaccacctgctgggggaccccatggccaacgtggccatggcctacggcagcagcatcgccagccacggcaaggacatggtgcacaaggagctgcacagatttgtgtctgtgtccaagctgaagtacttctttgctgtggacacagcctacgtggccaagaagctgggcctgctggtgttcccctacacccaccagaactgggaggtgcagtacagcagagatgcccccctgcccccccggcaggacctgaatgccccagacctgtacatccccaccatggccttcatcacctacgtgctgctggccggcatggccctgggcatccagaagcgcttcagccctgaggtgctgggcctgtgtgccagcacagccctggtgtgggtggtgatggaggtgctggccctgctgctgggcctgtacctggccaccgtgcggagtgacctgagcaccttccacctgctggcctacagcggctacaagtatgtgggcatgatcctgtctgtgctgaccggcctgctgtttggaagtgatggctactacgtggccctggcctggaccagcagcgccctgatgtacttcatcgtgcgcagcctgaggacagctgccctgggccctgacagcatgggcggccctgtgccccggcagaggctgcagctgtacctgaccctgggcgctgctgccttccagcccctcatcatctactggctgaccttccacctggtgaggtag

SEQ ID NO: 204579 - DNA, 882 bp, Artificial Sequence
  derived and/or modified sequence
atggcctaccacagcggctacggcgcccacggcagcaagcaccgggcccgcgcagccccagatcccccacctcttttcgacgacacctccggcggctattcaagtcaaccgggagggtacccagcaacaggcgctgacgtggcattttcggtgaatcacttgctgggcgaccctatggctaatgtggctatggcttatggttcaagcatcgcctcacacggtaaggacatggtccataaagagctgcacaggtttgtgagcgtgagcaaactgaagtacttcttcgccgtcgacacagcctacgttgcaaagaagctaggactgttagtcttcccttacacacaccagaactgggaagtacaatacagcagagacgctcctctgcccccgcgacaagaccttaatgcacccgacctgtacatcccaactatggcctttattacctacgtcctactagcaggcatggctctgggcatccagaagcgtttttcacccgaagtgctggggctgtgtgcctccactgcacttgtatgggttgtcatggaggtcctggcattgctgctgggtctctatttagccacagtcagatctgatctgtccacattccaccttcttgcatattccgggtataagtatgtcgggatgattctgtccgtgttgaccggcctcctgttcggttctgacgggtactacgtggccctggcctggactagttcagccctgatgtacttcatcgttaggtcactgcgcaccgccgccttgggcccggattctatgggggggcccgtaccccgccaacggctacagctgtacctgacgctgggagcagcagctttccagcccttgatcatctactggctgaccttccacctggtcaggtag

SEQ ID NO: 204580 - DNA, 882 bp, Artificial Sequence
  derived and/or modified sequence
atggcgtaccatagcggatacggcgctcatggctctaagcaccgggctcgtgctgccccagacccccctcctttgtttgatgacacctccggtgggtattcctcacaacctggagggtaccccgcaacaggcgctgatgtggcgttctccgttaatcacctgctgggagaccccatggcaaatgtagctatggcctacggatcttccattgcatcccacggaaaagatatggtccataaagaactccatcggttcgtgtccgtttctaaacttaaatacttcttcgcagttgatacagcctatgtcgcgaagaagctgggactgcttgtttttccctacacacaccagaactgggaagtgcagtacagtcgagacgccccactgccaccgaggcaagatcttaacgccccagacctgtatattcctaccatggcatttattacctatgtgctactggcgggtatggcactgggcatacagaaaagattctctccagaagtcctggggctgtgcgcatctacagcgttagtctgggtggtgatggaggtgcttgctcttctcctcggcctttacctggcaacagtgagaagcgatctgagcacatttcacctcttggcctatagcgggtataagtacgttggcatgattctcagcgtacttaccggccttcttttcggaagcgatggttattacgtcgcacttgcgtggactagttcggctctgatgtatttcatcgtgagaagcctgagaaccgccgcactcggaccagattcaatggggggtcctgtacctaggcagcgcctgcagctctatctcacattgggggcagctgcttttcagccccttattatttactggctaacatttcatctggtcagatag

SEQ ID NO: 204581 - DNA, 1124 bp, Artificial Sequence
  derived and/or modified sequence
gaagagccaatggcaggcgcgggggatgacgccacggacatggtggccgagaccggcggggtgggggacgtgtcgcgcggccgggtggcctcggtcggtaccctgggcgcggagcagctgcctcattagtattcgtacccacgaggcggcgcagcgggccctcggggacagcgagcgtcgcggccatggcttatcactcgggctacggagcccacggctccaagcacagggcccgggcagccccggatccccctcccctcttcgatgacacaagcggtggttattccagccagcccgggggatacccagccacaggagcagacgtggccttcagtgtcaaccacttgcttggggacccaatggccaatgtggctatggcctatggcagctccatcgcatcccatgggaaggacatggtgcacaaggagctgcaccgttttgtgtctgtgagcaaactcaagtatttttttgctgtggacacagcctacgtggccaagaagctagggctgctggtcttcccctacacacaccagaactgggaagtgcagtacagtcgtgatgctcctctgcccccccggcaagacctcaacgcccctgacctctatatccccacgatggccttcattacttacgtgctcctggctgggatggcactgggcattcagaaaaggttctccccggaggtgctgggcctgtgtgcaagcacagcgctggtgtgggtggtgatggaggtgctggccctgctcctgggcctctacctggccaccgtgcgcagtgacctgagcacctttcacctgctggcctacagtggctacaaatacgtgggaatgatcctcagtgtgctcacggggctgctgttcggcagcgatggctactacgtggcgctggcctggacctcatcggcgctcatgtacttcattgtgcgctctttgcggacagcagccctgggccccgacagcatggggggccccgtcccccggcagcgtctccagctctacctgactctgggagctgcagccttccagcccctcatcatatactggctgactttccacctggtccggtgaccccctggccccagatggcactgagtttttcattcattgaagatttgatttccttga

SEQ ID NO: 204582 - protein, 250 aa, Artificial Sequence
  derived and/or modified sequence
MELTGIDLLSGIIPELCQKYPDLNFIIGGEGPKRIILEEVRERYQLHDRVRLLGALEHKDVRNVLVQGHIFLNTSLTEAFCMAIVEAASCGLQVVSTRVGGIPEVLPENLIILCEPSVKSLCEGLEKAIFQLKSGTLPAPENIHNIVKTFYTWRNVAERTEKVYDRVSVEAVLPMDKRLDRLISHCGPVTGYIFALLAVFNFLFLIFLRWMTPDSIIDVAIDATGPRGAWTNNYSHSKRGGENNEISETR

SEQ ID NO: 204583 - DNA, 510 bp, Artificial Sequence
  derived and/or modified sequence
atggccattgtggaggcagcttcctgcggactgcaggttgtttccacgagggtgggtgggattccggaagtgctccccgaaaacttgataattctttgtgaaccttccgtcaagtccctctgtgaaggcttagaaaaggctatttttcagcttaagagcggcacattgcctgcccccgagaatatccacaacatcgtgaaaacattctacacttggaggaacgtggccgagcggacagaaaaagtttatgatcgggtatctgtcgaggctgtgctgcctatggataagcggctggatcgcctcatcagtcactgcggacctgtgacaggctacatcttcgccctgctcgcagtctttaacttcctgtttctcatcttcctgagatggatgaccccagacagcatcattgatgtcgccatcgatgctacagggccaaggggcgcttggacgaataattatagccactctaaacgcggcggcgagaataacgaaatttccgaaacgcgctag

SEQ ID NO: 204584 - DNA, 753 bp, Artificial Sequence
  derived and/or modified sequence
atggagctcacggggatcgacttactgagtggcattatccccgaactttgtcagaagtatcccgacctcaactttattataggaggcgagggtccgaagcggattatcctagaagaggtgagggaacggtaccagctgcacgatcgggtgcgacttctgggagcgctggagcacaaggatgtgcgaaacgtccttgtgcagggccatattttcctgaacacttcactcaccgaagcattttgcatggcgatcgttgaagcggcctcctgtgggctgcaggtcgtgtcaacccgtgtgggtggtatacccgaggtgcttcccgaaaacttgattatcctttgtgagcccagtgtcaaatccttgtgcgaggggctcgagaaggcaatcttccagctgaagtcgggcaccctgccggcgccagagaacatccacaacatcgtgaaaacattctacacttggcgcaatgtggccgagcggactgagaaggtgtacgacagagtctcggttgaagcagtgttgccgatggataagcgtctcgatcggctgatatctcattgcgggcctgtcaccggctatatctttgcgcttttggcagtgttcaactttctgttcctcatttttctccgctggatgacccctgactccataatcgatgttgccatcgatgccacgggccctcgcggagcgtggacgaataactactcacatagtaagcggggaggcgaaaataatgagatttctgagacaagatag

SEQ ID NO: 204585 - DNA, 510 bp, Artificial Sequence
  derived and/or modified sequence
atggccatcgtggaggccgccagctgtggcctgcaggtggtgtccaccagggtgggcggcatccctgaggtgctgcctgaaaatctcatcatcctgtgtgagcccagcgtgaagagcctgtgtgagggcctggagaaggccatcttccagctgaagagcggcaccctgcctgcccctgagaacatccacaacatcgtgaagaccttctacacctggagaaatgtggccgagaggacagagaaggtgtatgacagagtgtctgtggaggccgtgctgcccatggacaagaggctggacaggctcatcagccactgcggccctgtgacaggctacatctttgccctgctggccgtgttcaacttcctgttcctgatcttcctgcgctggatgaccccagacagcatcattgatgtggccattgatgccaccggccccaggggggcctggaccaacaactacagccacagcaagagaggaggagaaaataatgagatcagcgagaccaggtag

SEQ ID NO: 204586 - DNA, 753 bp, Artificial Sequence
  derived and/or modified sequence
atggagctgaccggcatcgacctgctgagcggcatcatccctgagctgtgccagaagtacccagacctgaacttcatcattggaggagagggccccaagaggatcatcctggaggaggtgcgggagcgctaccagctgcatgacagagtgcggctgctgggcgccctggagcacaaggatgtgagaaatgtgctggtgcagggccacatcttcctgaacaccagcctgacagaggccttctgcatggccatcgtggaggccgccagctgtggcctgcaggtggtgtccaccagggtgggcggcatccctgaggtgctgcctgagaacctgatcatcctgtgtgagcccagcgtgaagagcctgtgtgagggcctggagaaggccatcttccagctgaagagcggcaccctgcctgcccctgagaacatccacaacatcgtgaagaccttctacacctggagaaatgtggccgagaggacagagaaggtgtatgacagagtgtctgtggaggccgtgctgcccatggacaagaggctggacaggctcatcagccactgcggccctgtgacaggctacatctttgccctgctggccgtgttcaacttcctgttcctgatcttcctgcgctggatgaccccagacagcatcattgatgtggccattgatgccaccggccccaggggggcctggaccaacaactacagccacagcaagaggggcggggagaacaatgagatcagcgagaccaggtag

SEQ ID NO: 204587 - DNA, 510 bp, Artificial Sequence
  derived and/or modified sequence
atggccatcgtggaggccgccagctgcggcctgcaggtggtgagcactcgcgtcggcgggataccagaggtcctccctgaaaatctcatcattctgtgcgaacccagtgtgaagtcactgtgtgagggattggagaaggcaattttccagttgaaaagtggcaccctccctgctccggagaacatccacaacatcgtcaagacattttacacctggagaaatgtggcggaacgtacagaaaaagtatacgatcgggtcagcgtggaagccgttctcccgatggacaagaggctggacagactgatctcacattgcgggccagttaccggctacatttttgccctgctagccgtgtttaacttcctgttcctcatctttttgcggtggatgacgccggattcgatcattgatgtggctatcgacgccaccgggcccaggggggcctggaccaataactactcccatagtaagagaggaggcgaaaataacgaaattagcgaaacccgttag

SEQ ID NO: 204588 - DNA, 753 bp, Artificial Sequence
  derived and/or modified sequence
atggagctgaccggcatcgacctgctgagcggcatcatccccgagctgtgccagaaatatccagatcttaactttattattggcggtgagggacctaagaggatcattctcgaagaggtgagggagagataccaactgcatgacagagtgcgcctgctgggcgccctggagcataaggatgtgaggaacgtgctggtgcaagggcacatcttcctgaacaccagtttaaccgaggccttttgcatggccattgtcgaggccgcgagttgtggtctgcaggttgtatcaactagagtgggtgggatccccgaggtgctacctgagaacctgattatcctttgtgagccaagtgtcaaaagtctctgcgagggtctggaaaaggccatttttcagttaaaaagcggcacccttcccgcacccgagaacatccacaacatcgtgaagacattttacacctggcgcaacgtggccgaacgcactgagaaagtctatgaccgggtgtccgtcgaggcagtgctcccaatggacaaaagactcgatagattgatttcacactgcggcccagttacgggatatatctttgcactcttagccgtgtttaattttctgttcctgattttcctgcgttggatgactcccgattcaatcattgatgtggccattgacgccactggacccagaggcgcttggactaacaattacagccacagcaagaggggaggcgaaaacaatgaaattagcgaaacaagatag

SEQ ID NO: 204589 - DNA, 2943 bp, Artificial Sequence
  derived and/or modified sequence
gcgggaggtccggacactggcggccatggaactcaccggtaatagaggacacatctcttaactgggttgctctaagaactgatgtctaaaccgtctcagcatggcctgtagaggaggagctgggaatggccaccgtgcctcagctacactctctcggggatcgatttgcttagtggtataatacctgaactctgtcagaaatatccagatttaaatttcataattggaggagagggaccaaagagaatcattttggaagaagttcgggaaagataccagctgcatgacagggtgcgtcttttgggagctttagaacacaaggatgttagaaatgtcttagttcaaggacatatttttctgaatacctcccttactgaagcattctgcatggcgatcgtggaagcagccagttgtggtttacaggttgtaagtaccagagttggtggaattcctgaggtgcttccagaaaaccttattattttatgtgagccttcagtaaaatctttgtgtgaaggattggaaaaggctattttccaactgaagtcagggacattgccagctccagaaaacatccataacatagtaaagactttctacacctggaggaatgttgcagaaagaactgaaaaggtatatgaccgggtatcagtggaagctgtgttgccaatggacaaacgactggacagacttatttctcactgcggcccagtaacaggctacatctttgctttgttggcagttttcaacttcctcttcctcattttcttgagatggatgactccagattctatcattgatgttgcaatagatgccactgggccacggggtgcctggactaataactattctcacagtaaaagagggggtgagaataatgagatatctgaaaccaggtagaaggaagcctagattgtaagattttaaacatttgtaatagttctataaagactatggaaaataaccttgcttttggggggtttttgtttttttagagttaatttagtaagttatgctacctctatatcattcaatattttctgttgaggaaagataaaaatgtatgcaattcctgagtgtagaaacttcttgcacttatttaaaatttaggagagaacatttaagccactcaggtatgcaatttttcagactactgaaatccctgtagcagagatgttttaacattatattttgagagctttgggtgctgaagggccaaacgttttctgggcattttttggccagtttttaatgtaacaccattagacactcaccagatgtttacaagttttctttaggggaactacaacaattatatgaactgttttatatcatgttcatatacatttattaggaatctaaatcatgtctttgaacatttattaggttcactcagtaggtgttacatgtaattaacaggttccttgagtaagatagtccatcagttaccagcacattttgaacccctgctctgtgtagaatgttgaactagatgcttcccgccattaaggaccaggggtgcattcactctttgtttaccattcaaatggcttacttcatcataattgtggttgatatgagatcaatatccaacatgccaaaaatgctcatgccagttaatgccaggaaaaaaatcaccgacacactactagtactttgttcctgttgtatgcattctcctaggtagagcctccatcttcagttgtgtttgtgaaggtattttttgctttttaaatactggggaccgatatcactgttgatagtgcagagaaaccctccacatttttcagtgcataattgagttttctataaatgccttcgtgttttctgagcagaatgtacgaggtgtgccatcccaaaaccagctgctaccctgtccttttaatgtaagtcactccccttcactgtggcctcgctgatgtctgataagtattgtcagtgtgcaaaaggctttacttcagaatggtttatttatagcaaactaagttgaaaattttagaaacagtctttgtgggtggatgttattaactgtcattgttgttgcccagagccatgggttttttaaccccaaattatccacatggtgtgtattatgaattctttgaactcttaaggtttttgtgagaaaaggactgtgaattcaaaacaataaggcacttgtgggtgcactacatagattctgacagtgttgtgattctgtataggatttttaaaaatgacaacattcacaaaatttattactttttaaaaaataacatgcctattaactggttgcactgatataaaagaaatatatttgtgttttgtttgtactaaaatgcaaaagcaagagtgcaatttttaaaatctagaagttaggggttttgttggagaaaaatggactgatctttaaactattcagtcttactgggatttttatgcatagaaactcacatataaacatgaaataaacagtgccagtattcataggaaagtgagaaactgtaatatttggccattattctattcaacaggttttagaggcatgccaccattttttccttatatttttgcttaatttttttaaattgtcatttaattcttaaactgtcatttatttgagatggaaataagatctaaagttagttgcctttgcctgtaaaacatgtgatttgcaaattattatttttcttttttttaacaaatggaagtaaatttgtttcacgtaaatcttaattttcaacctttctggataccttaattgtaactgtcagtttgcactggtcggtatatggaaacacattgctctaccctgctacttagttgattttaaagtgaatttacagtgatgagaaatttgtgaaaaatatattgtatttcttttgatgtttcaaaaggttgcctatgaaaaactgatttgttaaaacatgctacatgtccaaaaataaagaccagaatgacattttg

SEQ ID NO: 204590 - DNA, 2849 bp, Artificial Sequence
  derived and/or modified sequence
gactccggctgcagccgcgggaggtccggacactggcggccatggaactcaccgggatcgatttgcttagtggtataatacctgaactctgtcagaaatatccagatttaaatttcataattggaggagagggaccaaagagaatcattttggaagaagttcgggaaagataccagctgcatgacagggtgcgtcttttgggagctttagaacacaaggatgttagaaatgtcttagttcaaggacatatttttctgaatacctcccttactgaagcattctgcatggcgatcgtggaagcagccagttgtggtttacaggttgtaagtaccagagttggtggaattcctgaggtgcttccagaaaaccttattattttatgtgagccttcagtaaaatctttgtgtgaaggattggaaaaggctattttccaactgaagtcagggacattgccagctccagaaaacatccataacatagtaaagactttctacacctggaggaatgttgcagaaagaactgaaaaggtatatgaccgggtatcagtggaagctgtgttgccaatggacaaacgactggacagacttatttctcactgcggcccagtaacaggctacatctttgctttgttggcagttttcaacttcctcttcctcattttcttgagatggatgactccagattctatcattgatgttgcaatagatgccactgggccacggggtgcctggactaataactattctcacagtaaaagagggggtgagaataatgagatatctgaaaccaggtagaaggaagcctagattgtaagattttaaacatttgtaatagttctataaagactatggaaaataaccttgcttttggggggtttttgtttttttagagttaatttagtaagttatgctacctctatatcattcaatattttctgttgaggaaagataaaaatgtatgcaattcctgagtgtagaaacttcttgcacttatttaaaatttaggagagaacatttaagccactcaggtatgcaatttttcagactactgaaatccctgtagcagagatgttttaacattatattttgagagctttgggtgctgaagggccaaacgttttctgggcattttttggccagtttttaatgtaacaccattagacactcaccagatgtttacaagttttctttaggggaactacaacaattatatgaactgttttatatcatgttcatatacatttattaggaatctaaatcatgtctttgaacatttattaggttcactcagtaggtgttacatgtaattaacaggttccttgagtaagatagtccatcagttaccagcacattttgaacccctgctctgtgtagaatgttgaactagatgcttcccgccattaaggaccaggggtgcattcactctttgtttaccattcaaatggcttacttcatcataattgtggttgatatgagatcaatatccaacatgccaaaaatgctcatgccagttaatgccaggaaaaaaatcaccgacacactactagtactttgttcctgttgtatgcattctcctaggtagagcctccatcttcagttgtgtttgtgaaggtattttttgctttttaaatactggggaccgatatcactgttgatagtgcagagaaaccctccacatttttcagtgcataattgagttttctataaatgccttcgtgttttctgagcagaatgtacgaggtgtgccatcccaaaaccagctgctaccctgtccttttaatgtaagtcactccccttcactgtggcctcgctgatgtctgataagtattgtcagtgtgcaaaaggctttacttcagaatggtttatttatagcaaactaagttgaaaattttagaaacagtctttgtgggtggatgttattaactgtcattgttgttgcccagagccatgggttttttaaccccaaattatccacatggtgtgtattatgaattctttgaactcttaaggtttttgtgagaaaaggactgtgaattcaaaacaataaggcacttgtgggtgcactacatagattctgacagtgttgtgattctgtataggatttttaaaaatgacaacattcacaaaatttattactttttaaaaaataacatgcctattaactggttgcactgatataaaagaaatatatttgtgttttgtttgtactaaaatgcaaaagcaagagtgcaatttttaaaatctagaagttaggggttttgttggagaaaaatggactgatctttaaactattcagtcttactgggatttttatgcatagaaactcacatataaacatgaaataaacagtgccagtattcataggaaagtgagaaactgtaatatttggccattattctattcaacaggttttagaggcatgccaccattttttccttatatttttgcttaatttttttaaattgtcatttaattcttaaactgtcatttatttgagatggaaataagatctaaagttagttgcctttgcctgtaaaacatgtgatttgcaaattattatttttcttttttttaacaaatggaagtaaatttgtttcacgtaaatcttaattttcaacctttctggataccttaattgtaactgtcagtttgcactggtcggtatatggaaacacattgctctaccctgctacttagttgattttaaagtgaatttacagtgatgagaaatttgtgaaaaatatattgtatttcttttgatgtttcaaaaggttgcctatgaaaaactgatttgttaaaacatgctacatgtccaaaaataaagaccagaatgacattttgataattttc

SEQ ID NO: 204591 - DNA, 510 bp, Artificial Sequence
  derived and/or modified sequence
atggccatcgtggaagctgcctcttgtggcctgcaggtggttagcactcgagtgggtggcatacctgaggttctccccgaaaatttaattatactatgcgaaccctctgtcaaatcactgtgcgaaggcctagaaaaggctattttccagttgaagtctggtacattacctgctccagagaacatacacaacatcgtaaagacattctacacctggcgcaacgtagcagaacgcaccgagaaggtgtacgaccgagtgtccgtggaggctgtacttcctatggacaagagactcgaccgcctcatatctcactgcggccctgtgacaggctacatcttcgcactgctcgccgtcttcaactttctcttcctgattttcctcaggtggatgactccggatagcatcatcgacgttgccattgatgcaacaggaccaaggggcgcttggacgaacaattattcccactccaaacgaggaggtgagaacaatgaaatctccgagaccagatag

SEQ ID NO: 204592 - DNA, 753 bp, Artificial Sequence
  derived and/or modified sequence
atggagctgacaggaatagacttgttaagcggaattattcctgagctatgccaaaagtatccagatttaaattttatcatcggaggggaggggccaaaaaggattatcctcgaggaagtccgggagagatatcagttgcatgacagggtgagactgctgggggcattggagcacaaagatgtccgaaacgtattggtccagggtcatatattcctcaatacatcactcaccgaggccttttgcatggctatagttgaagctgcctcctgtggactccaagtcgttagcacccgggtcggcggtatacctgaggttctgcccgagaatctgatcatcctctgcgaaccctcggtgaagtcgttgtgcgagggcttggagaaagcaatatttcagctgaaaagcgggacattgccagccccagaaaacatccacaatatcgtgaagacattctacacctggaggaatgtcgccgaaagaacagaaaaggtctacgatcgtgtcagcgtcgaggccgtcctacccatggacaagaggcttgaccgcttgattagccattgtggcccagtgacagggtatatctttgctctgctggcagtttttaactttctcttcctgatcttcctgagatggatgacgcccgactcgatcatcgacgtcgcgatcgacgccaccggcccacggggagcatggactaataactattcgcatagcaaacggggaggagaaaacaatgagatcagcgaaacacgctag

SEQ ID NO: 204593 - DNA, 510 bp, Artificial Sequence
  derived and/or modified sequence
atggccatcgtggaggccgccagctgcggcctgcaggtggtgagcaccagagtgggcggcatccccgaggtgctgcccgagaacctgatcatcctgtgcgagcccagcgtgaagagcctgtgcgagggcctggagaaggccatcttccagctgaagagcggcaccctgcccgcccccgagaacatccacaacatcgtgaagaccttctacacctggagaaacgtggccgagagaaccgagaaggtgtacgacagagtgagcgtggaggccgtgctgcccatggacaagagactggacagactgatcagccactgcggccccgtgaccggctacatcttcgccctgctggccgtgttcaacttcctgttcctgatcttcctgagatggatgacccccgacagcatcatcgacgtggccatcgacgccaccggccccagaggcgcctggaccaacaactacagccacagcaagagaggcggcgagaacaacgagatcagcgagaccagatag

SEQ ID NO: 204594 - DNA, 753 bp, Artificial Sequence
  derived and/or modified sequence
atggagctgaccggcatcgacctgctgagcggcatcatccccgagctgtgccagaagtaccccgacctgaacttcatcatcggcggcgagggccccaagagaatcatcctggaggaggtgagagagagataccagctgcacgacagagtgagactgctgggcgccctggagcacaaggacgtgagaaacgtgctggtgcagggccacatcttcctgaacaccagcctgaccgaggccttctgcatggccatcgtggaggccgccagctgcggcctgcaggtggtgagcaccagagtgggcggcatccccgaggtgctgcccgagaacctgatcatcctgtgcgagcccagcgtgaagagcctgtgcgagggcctggagaaggccatcttccagctgaagagcggcaccctgcccgcccccgagaacatccacaacatcgtgaagaccttctacacctggagaaacgtggccgagagaaccgagaaggtgtacgacagagtgagcgtggaggccgtgctgcccatggacaagagactggacagactgatcagccactgcggccccgtgaccggctacatcttcgccctgctggccgtgttcaacttcctgttcctgatcttcctgagatggatgacccccgacagcatcatcgacgtggccatcgacgccaccggccccagaggcgcctggaccaacaactacagccacagcaagagaggcggcgagaacaacgagatcagcgagaccagatag

SEQ ID NO: 204595 - DNA, 5505 bp, Artificial Sequence
  derived and/or modified sequence
atgccatactcagtgggattcagggaggccgatgctgccacgtcgtttctgcgagcagctcggagtggaaacttggataaggccttagaccatctgcgcaacggcgttgatattaacacctgtaatcagaatgggcttaacgggttacatcttgctagtaaagaaggacacgttaaaatggtcgtggaactgctgcataaggagattatactggaaacaaccactaagaaggggaataccgcgctgcacattgctgccctcgcaggccaagatgaggtagtgagggagttagtcaattacggtgctaatgtcaacgctcagagccaaaaaggattcacaccactatacatggccgctcaggaaaaccacctggaggtggtcaagtttctgctggaaaacggagccaatcagaatgtggctacggaagacggctttacgccccttgccgttgccttgcaacaaggccacgaaaacgttgtggcccatctgattaactacggcactaagggaaaagtgcggctgcctgcgctccacatcgccgccagaaacgatgacaccagaacagccgccgtcctgctacagaacgatcctaatcctgatgtgctgtccaagaccggatttacccctttgcatatcgccgcccactatgaaaatctgaacgtagcccagttgttattgaacagaggtgcctccgttaacttcacccctcagaacggcataacccccctccacatagcaagccgtcgaggcaacgtgattatggtgagactgcttctcgacagaggtgcccagatcgagactaaaacgaaggacgaactgacccccctgcattgcgctgcacgaaatggacacgtgaggatttctgaaatcctcctagatcatggagccccaatccaggccaagacaaagaatggcctaagtcctatccacatggctgctcagggggaccacttggactgcgtgaggcttctgctgcaatatgatgcagagattgatgacattacccttgatcacctaacacccctgcacgtggctgcccattgtgggcaccatcgtgtggccaaggttctgctcgataagggcgctaagccaaactctcgggcactgaacggcttcacaccccttcatattgcttgcaaaaagaatcacgtgagggtcatggaactgttgctgaaaacgggggcttcaatcgatgcggtgactgagtctggtctgactccactgcatgtagccagctttatgggtcacctgcccattgtgaaaaacctcttgcagcggggggcctccccaaacgtctctaatgtgaaggtagagacgccattacatatggccgcacgggccgggcacaccgaagtagccaagtatctccttcaaaacaaggccaaggtgaatgctaaggctaaagatgatcaaactcccctgcattgcgccgctagaatcggacatacgaatatggtgaagttgctgcttgaaaataacgctaatcccaatctggcaactacagccgggcacaccccactgcatatcgcagctcgggaaggccatgttgagaccgtcttagcccttctggaaaaagaagctagccaggcatgtatgactaaaaagggctttaccccgcttcacgttgccgcgaagtatggaaaggttagagttgcggagctgcttctggaaagagacgctcatcccaacgctgcagggaagaacgggctcactccccttcatgtggccgttcatcataataacctcgatattgttaaattgcttctgcccaggggtggcagtccacactctcctgcatggaatggatacacaccacttcacattgccgcaaagcagaaccaggtcgaagtggccagatctcttcttcagtatggtggctctgctaatgctgagtccgtccagggggtcactccactgcacctcgccgcacaggaggggcatgccgaaatggttgctttactcttaagtaaacaggctaatggtaacctgggtaacaaaagcggcctaacccctctgcaccttgtggctcaagagggacacgtgccggttgccgatgtgctgatcaagcatggcgtgatggtggatgctaccacccggatgggctatacccccctgcacgtcgcttctcactatggcaacattaaactggtcaaatttctgttgcagcatcaggccgatgtaaacgcaaaaacaaagctgggctatagtcctttgcaccaagctgcacagcagggccatactgatatcgtgacgctacttttaaaaaatggagctagtcccaacgaggtctcttcagatggtaccacacccctcgcaattgctaaacgactcggctatatttccgtcaccgatgtgctaaaggtggtgacggacgagacaagttttgtcttagtgtccgacaaacaccgaatgtccttcccagagaccgtggatgaaatcctggacgtgagcgaggacgaaggcgaggagctgatatccttcaaggctgagaggcgggatagtagggatgttgacgaggagaaggagttgctggactttgttcctaaactagaccaggtcgtggagtcccctgcaatacctaggatcccatgcgccatgccagaaaccgtggtgatacgcagcgaggaacaagagcaggcgagcaaagaatacgatgaggactcactgataccctcttcacccgcaaccgagacttcagacaacatcagccctgtcgctagccccgtgcatacaggttttctggtgtcatttatggtggacgcccgcgggggaagcatgagagggagtcgtcacaatgggttgcgcgttgtcatcccaccacggacatgtgccgcacctactcggatcacttgtcgtttggtgaaaccacaaaaattgtctacacctccacccctggcagaagaggaaggactggcgagtcgcattatcgccttgggcccaacaggtgcccagttcctgagcccggtgatcgtagagatcccccacttcgcctctcacgggagaggcgacagggaactagtggtgcttagaagcgaaaatgggtctgtgtggaaggagcataggtctcgatacggcgaaagctaccttgatcagattctgaatggcatggatgaagagctaggaagtctagaggagcttgaaaagaaacgcgtatgcaggattattacaaccgacttccccctctattttgtaatcatgagccggctttgtcaggattatgatactataggccccgaaggcgggtctctcaagagtaagctggtgcccctcgtccaggccacgtttccggagaacgcagttacgaaacgtgtgaagcttgctttacaagctcaaccagtgccagacgaattagtcacaaagctgctcggtaatcaagcaaccttcagccctatagtgactgtagagccacgccgtcgcaagttccatcgccctattggactccgtatccctcttccccccagctggactgacaaccctagggacagcggcgaaggcgatactacatccctcaggttactgtgtagcgtgattggtgggactgatcaggctcagtgggaggatataaccggcaccacaaagctggtgtatgcgaacgaatgcgccaacttcaccacaaacgtctctgcccgattttggctgagtgactgcccccgcaccgctgaggccgtcaatttcgctactctgctgtataaggagttgactgccgtgccctacatggctaagtttgtgatctttgccaaaatgaacgaccctcgggaaggcagacttagatgctactgtatgaccgacgacaaggtggataaaaccttggagcaacacgaaaactttgtagaagtggcgcgatctcgtgatatcgaggtcttggaaggcatgagcttattcgctgagttatccggcaacttggtccctgtcaagaaggccgcccagcagagatcatttcatttccagtcctttagagagaacaggctcgccatgcctgtcaaggtgagagactcctctcgtgagccgggggggagcctgtcttttctgcgaaaggccatgaaatatgaggatacgcagcacattctctgtcacctcaatattacaatgcccccatgcgccaagggctccggagcagaagataggagacgaaccccaaccccactagccctcagatatagcattcttagcgaaagcactcctggtagtctttccggcacagagcaggccgagatgaaaatggccgtgatcagcgaacacctgggcctgtcctgggcggagctcgccagggagctccagttctccgtcgaggacattaaccggatacgggttgagaaccctaactcgctccttgagcagagtgtcgcgctgctgaatttgtgggtgatccgggaagggcagaatgccaatatggaaaatttgtacaccgcactgcagagcattgaccggggtgaaatcgtgaatatgctggagggtagtggacggcaatcacgaaacttaaagcctgatcgtcggcatacagatcgcgattatagtttatctcctagccagatgaacggatacagcagtctccaggacgagcttctttccccagcaagtcttggctgcgcacttagttccccgctgcgggctgatcaatactggaatgaggttgccgttttggacgcaattcctctcgccgcaactgaacacgatactatgctggagatgagtgatatgcaagtgtggagcgcaggcctaactccatcactcgtcacagcagaggatagctccctggagtgttccaaggccgaagattcagacgccaccggtcatgagtggaagctggagggggcactatccgaagaaccgcgggggcccgagcttggcagtctggaactcgtggaggacgatacagtggacagcgatgccactaacgggctcatagatctcttggagcaggaggagggacaacggtccgaggagaagctgcccggctcaaagagacaagatgacgcaacaggggccggacaggatagcgagaatgaagtgagccttgtgtctgggcaccagagaggccaagcccggattacccacagtcctacagtgagccaagttactgagagatctcaggatcggctgcaagactgggacgccgacggctccattgtatcctacctgcaagatgccgcccagggaagttggcaggaggaggtgacacaaggaccacacagcttccagggtactagcaccatgaccgagggactggaacccggaggctcacaggaatacgagaaggtgctcgtgtccgtgagtgaacatacgtggaccgagcaacccgaggccgaaagcagtcaggcagaccgggatcgtcggcaacagggccaagaggagcaggtgcaggaggcaaaaaataccttcacccaggtagtgcagggcaatgagttccagaatatccctggagagcaggtcaccgaggaacagtttactgatgaacagggaaacatcgtcaccaagaaggaccacactagtactcccaacccttag

SEQ ID NO: 204596 - DNA, 5505 bp, Artificial Sequence
  derived and/or modified sequence
atgccctacagcgtgggcttccgggaggctgatgctgccaccagcttcctgcgggccgcccggagcggcaacctggacaaggccctggaccacctgagaaatggagtggacatcaacacctgcaaccagaatggcctgaatggcctgcacctggccagcaaggagggccacgtgaagatggtggtggagctgctgcacaaggagatcatcctggagaccaccaccaagaagggcaacacagccctgcacatcgccgccctggccggccaggatgaggtggtgcgggagctggtgaactacggggccaacgtgaatgcccagagccagaagggcttcacccccctgtacatggccgcccaggagaaccacctggaggtggtgaagttcctgctggagaatggagccaaccagaatgtggccacagaagatggcttcacccccctggccgtggccctgcagcagggccatgaaaatgtggtggcccacctgatcaactacggcaccaagggcaaggtgcggctgcctgccctgcacatcgccgccagaaatgatgacaccaggacagctgctgtgctgctgcagaatgaccccaacccagatgtgctgagcaagacaggcttcacccccctgcacatcgccgcccactatgagaacctgaatgtggcccagctgctgctgaacagaggagcctctgtgaacttcaccccccagaatggcatcacccccctgcacatcgccagcagaagaggaaatgtcatcatggtgcggctgctgctggacagaggagcccagatcgagaccaagaccaaggatgagctgacccccctgcactgtgccgccagaaatggccacgtgcgcatcagcgagatcctgctggaccacggggcccccatccaggccaagaccaagaatggcctgagccccatccacatggccgcccagggcgaccacctggactgtgtgcggctgctgctgcagtatgatgctgagattgatgacatcaccctggaccacctgacccccctgcacgtggccgcccactgcggccaccaccgggtggccaaggtgctgctggacaagggggccaagcccaacagccgggccctgaatggcttcacccccctgcacatcgcctgcaagaagaaccacgtgcgggtgatggagctgctgctgaagacaggagccagcattgatgctgtgacagaaagtggcctgacccccctgcacgtggccagcttcatgggccacctgcccatcgtgaagaacctgctgcagagaggagccagccccaacgtgtccaatgtgaaggtggagacccccctgcacatggccgcccgggccggccacacagaggtggccaagtacctgctgcagaacaaggccaaggtgaatgccaaggccaaggatgaccagacccccctgcactgtgccgcccgcatcggccacaccaacatggtgaagctgctgctggagaacaatgccaaccccaacctggccaccacagctggccacacccccctgcacatcgccgcccgggagggccacgtggagaccgtgctggccctgctggagaaggaggccagccaggcctgcatgaccaagaagggcttcacccccctgcacgtggccgccaagtatggcaaggtgcgggtggccgagctgctgctggagagagatgcccaccccaatgctgctgggaagaatggcctgacccccctgcacgtggccgtgcaccacaacaacctggacatcgtgaagctgctgctgccccggggcggcagcccccacagccctgcctggaatggctacacccccctgcacatcgccgccaagcagaaccaggtggaggtggcccggagcctgctgcagtatggaggcagcgccaatgctgagagcgtgcagggcgtgacccccctgcacctggccgcccaggagggccacgccgagatggtggccctgctgctgagcaagcaggccaacggcaacctgggcaacaagagcggcctgacccccctgcacctggtggcccaggagggccacgtgcctgtggctgatgtgctgatcaagcacggcgtgatggtggatgccaccaccaggatgggctacacccccctgcacgtggccagccactacggcaacatcaagctggtgaagttcctgctgcagcaccaggctgatgtgaatgccaagaccaagctgggctacagccccctgcaccaggccgcccagcagggccacacagacatcgtgaccctgctgctgaagaatggagccagccccaatgaggtgtccagtgatggcaccacccccctggccatcgccaagaggctgggctacatctctgtgacagatgtgctgaaggtggtgacagatgagaccagctttgtgctggtgtctgacaagcacaggatgtccttccctgagaccgtggatgagatcctggatgtgtctgaagatgaaggagaggagctgatctccttcaaggccgagcggcgggacagcagagatgtggatgaggagaaggagctgctggactttgtgcccaagctggaccaggtggtggagagccctgccatcccccgcatcccctgtgccatgcctgagaccgtggtgatccgctctgaggagcaggagcaggccagcaaggagtatgatgaggacagcctcatccccagcagccctgccacagagaccagtgacaacatcagccctgtggccagccctgtgcacacaggcttcctggtgtccttcatggtggatgcccggggcggctccatgaggggcagccgccacaacggcctgcgggtggtgattcctcccaggacctgtgccgcccccacccgcatcacctgccgcctggtgaagccccagaagctgagcaccccaccacccctggccgaggaggagggcctggccagccgcatcatcgccctgggccccactggagcccagttcctgagccctgtgattgtggagatcccccactttgccagccacggccgcggggaccgggagctggtggtgctgcggagtgaaaatggatctgtgtggaaggagcacaggagccgctacggggagagctacctggaccagatcctgaatggcatggatgaggagctgggcagcctggaggagctggagaagaagagggtgtgccgcatcatcaccacagacttccccctgtactttgtgatcatgagccggctgtgccaggactatgacaccatcggccctgagggcggcagcctgaagagcaagctggtgcccctggtgcaggccaccttcccagaaaatgctgtgaccaagagggtgaagctggccctgcaggcccagcctgtgcctgatgagctggtgaccaagctgctgggcaaccaggccaccttcagccccatcgtgacagtggagcccaggaggaggaagttccaccggcccatcggcctgcgcatccccctgccccccagctggacagacaacccccgggacagcggggagggggacaccaccagcctgcggctgctgtgcagcgtgattggaggaacagaccaggcccagtgggaggacatcaccggcaccaccaagctggtgtatgccaatgaatgtgccaacttcaccaccaacgtgtctgcccgcttctggctgagtgactgccccaggacagctgaggccgtgaactttgccaccctgctgtacaaggagctgacagctgtgccctacatggccaagtttgtgatctttgccaagatgaatgacccccgggagggccgcctgcgctgctactgcatgacagatgacaaggtggacaagaccctggagcagcacgagaactttgtggaggtggcccggagccgggacatcgaggtgctggagggcatgagcctgtttgctgagctgagcggcaacctggtgcctgtgaagaaggccgcccagcagaggagcttccacttccagagcttccgggagaaccggctggccatgcctgtgaaggtgcgggacagcagccgggagcccggcggcagcctgtccttcctgaggaaggccatgaagtatgaggacacccagcacatcctgtgccacctgaacatcaccatgccaccctgtgccaagggcagcggggctgaagatagaagaaggacccccacccccctggccctgcgctacagcatcctgtctgagagcaccccaggcagcctgagcggcacagagcaggccgagatgaagatggccgtcatcagcgagcacctgggcctgtcctgggccgagctggcccgggagctgcagttctctgtggaggacatcaaccgcatccgggtggagaaccccaacagcctgctggagcagagcgtggccctgctgaacctgtgggtgatccgggagggccagaatgccaacatggagaacctgtacacagccctgcagagcattgacagaggagaaattgtgaacatgctggagggcagcggccggcagagcaggaacctgaagccagacagaagacacacagaccgggactacagcctgagccccagccagatgaatggctacagcagcctgcaggatgagctgctgagccctgccagcctgggctgtgccctgagcagccccctgcgggctgaccagtactggaatgaggtggccgtgctggatgccatccccctggccgccacagaacatgacaccatgctggagatgtctgacatgcaggtgtggagcgctggcctgacccccagcctggtgacagctgaggacagcagcctggagtgcagcaaggcagaagattctgatgccaccggccacgagtggaagctggagggcgccctgtctgaggagccccggggccctgagctgggcagcctggagctggtggaggatgacacagtggacagtgatgccaccaacggcctgattgacctgctggagcaggaggagggccagaggtctgaggagaagctgcccggcagcaagaggcaggatgatgccaccggggccggccaggacagtgaaaatgaggtgtccctggtgtctggccaccagaggggccaggcccgcatcacccacagccccaccgtgtcccaggtgacagagaggagccaggaccggctgcaggactgggatgctgatggcagcatcgtgtcctacctgcaggatgctgcccagggctcctggcaggaggaggtgacccagggcccccacagcttccagggcaccagcaccatgacagagggcctggagcccggcggcagccaggagtatgagaaggtgctggtgtctgtgtctgagcacacctggacagagcagcctgaggccgagagcagccaggccgaccgggaccggcggcagcagggccaggaggagcaggtgcaggaggccaagaacaccttcacccaggtggtgcagggcaatgagttccagaacatccctggagagcaggtgacagaggagcagttcacagatgagcagggcaacatcgtgaccaagaaggaccacaccagcacccccaacccctag

SEQ ID NO: 204597 - DNA, 5505 bp, Artificial Sequence
  derived and/or modified sequence
atgccctacagcgtgggcttccgggaggccgacgccgccaccagcttcctcagagcagcccgatctggcaacctggacaaggccctggatcacctgcggaatggggttgacataaacacctgtaatcaaaatggcttaaacggcttgcacctagcatcaaaggaagggcacgtcaagatggtggtggagttgttgcacaaggagatcatcctcgagaccacgactaagaagggcaatacggctctccatatagcggcattggccggccaagacgaggtcgttcgagaactagtgaattatggggcaaatgtcaacgcccaaagccagaaggggttcactccattatacatggcagcacaggagaaccacctcgaggttgtgaagttcttgcttgaaaacggcgccaaccaaaacgtggccacagaagatggctttactccccttgctgtcgctctccagcagggccatgaaaatgtcgtggcgcacttaatcaactatggtactaaaggcaaagttcggctgcctgcactccacatagccgcaagaaacgatgatacacggaccgcagcagtgctgttgcagaacgacccaaaccccgatgtcttgtccaagaccggcttcacccctctgcacatagctgcccattatgaaaacttgaatgtggcccaactgttactgaatcgcggtgcttcagtgaacttcacgcctcagaacggaattaccccactccatatcgcaagtaggcggggaaacgtgattatggtcaggctgctattagaccgcggggcccaaatcgagacaaaaacaaaggatgagctgacccccttgcactgtgcagcccgaaatggccacgtaaggatctctgagattcttctggaccatggcgctccaatccaggcaaaaacaaaaaacggactgagtccaattcatatggccgctcagggcgatcacctggattgcgtgcgtctgctcctgcaatatgacgccgaaatcgacgacatcactctggatcacctgacgccgcttcatgtggccgcacattgcggccatcaccgagtagccaaggtgttgcttgataaaggcgcgaagcccaactcacgcgccctaaacgggttcactcccctgcatattgcctgtaagaagaaccatgtccgggtcatggagctgctgctgaagacaggcgcctctatcgatgccgtgacagaatccgggttaactcctctgcatgtggcaagctttatgggccacttgccgattgtgaagaacctacttcagcgcggtgctagccctaacgtgtcaaacgtgaaggtagaaactccccttcacatggctgctagagccgggcataccgaggtggccaagtacctgttgcagaataaggccaaggtcaacgctaaggccaaggacgatcagaccccactgcactgcgccgccaggataggacacaccaacatggtaaaacttctgttggagaataatgccaatcccaatcttgccactacagccgggcatactccactgcacattgcggcgcgcgaaggacatgtcgaaaccgtcctggctctcctggaaaaggaagcatcacaggcctgcatgaccaaaaagggcttcacaccattacacgttgccgcaaagtatggcaaggtccgcgtggccgaactcctactggagagagatgcgcaccccaatgccgcaggcaagaatggactgactcccctacacgtcgccgtgcaccataataacctagatatcgtgaagctcctgttgccccgcggaggatctccgcacagccctgcctggaacggatacacgccactccacatagcagctaagcaaaatcaagtcgaggtggcccgttcactgttgcaatacggcggctccgcgaacgcagagtcagtacagggcgttacacctctgcatctggcagcgcaggaagggcatgccgagatggtggccctgttgctgagtaagcaggcaaacggtaacctgggcaacaagtccggccttactccacttcacttggtcgctcaagaaggtcacgtccccgtggcggacgtattgatcaaacatggagttatggtagacgccaccacaagaatgggctacactcccctgcacgttgcatcgcattacggcaatatcaaactggtgaagtttctgctccaacatcaggcagacgttaacgctaaaaccaaactgggatactcaccccttcatcaggcagcacagcagggccataccgatattgtgaccttactgctgaagaacggagcaagcccgaatgaggtaagcagcgatggcaccacaccactggcgattgctaaaaggttgggctacatcagtgtgactgacgtgctgaaggtagtcaccgacgagacaagtttcgtgctcgtttcagataaacaccgcatgtccttcccagagaccgtcgacgagatcctggatgttagtgaggacgagggcgaagagctgatttcatttaaagctgaaagaagagacagccgtgatgttgatgaagaaaaggagctcttagatttcgtgcccaagttagatcaggttgtagagtctcctgcaatccctagaatcccctgcgcaatgccagagacggttgtgattcggagtgaggagcaggaacaggcgagtaaggagtacgatgaggactctctgatcccctcatcaccagcgacggaaacatctgacaacatttccccagtggcttcaccagttcacaccggttttttggtgagctttatggtggacgctcggggtgggagtatgagaggctctcgccacaacggcctgcgggtggtcataccccctaggacttgtgcggcgcccacacggatcacctgtcgcctcgtgaagcctcagaagctctccactccaccacctttggctgaggaagaagggctcgcatcccggatcatcgctcttggacccacaggcgcccagttcctatctcctgtgattgtggagatcccacacttcgcttcccacggccggggggatagagagctagtcgtgcttaggtctgagaatgggtcggtgtggaaagagcaccggtcacgctacggagaatcatacctggaccagatcctcaacggcatggacgaagaactcggaagcctcgaggagctcgaaaagaaaagagtctgccgcatcatcacgaccgactttccactgtattttgtgataatgagtagactttgtcaggactacgacactatcggacccgaggggggatcgctgaagtccaaattggttcccctggtccaagccactttccctgagaacgcagtgacgaagcgtgtaaaacttgccctgcaagcccaacccgtgcctgacgaattggtaactaagctgctcggaaatcaagcaacttttagccccattgtgacagttgaaccgcggcgcaggaagttccaccggcctattggcttgaggatcccattgcctccatcctggaccgacaacccgagagacagcggcgagggagacactacctcccttaggcttctctgtagcgtcatcggggggaccgatcaggcccagtgggaggatattactggcacaacaaagctggtgtatgcaaatgaatgtgccaacttcacaactaacgtttctgccaggttctggttatctgactgtccacggactgccgaagccgttaactttgctacactgctttacaaagaactgaccgcagttccctacatggccaaattcgtgatatttgcaaaaatgaacgatccccgggagggcagactgaggtgctactgtatgactgatgataaagtagataagaccctagagcagcatgagaattttgtggaggtggctagaagtagggatatcgaggtcctggaaggaatgtccctattcgctgaactgtccggtaatctcgtcccagtgaagaaggccgcccaacagcgctcttttcattttcagtctttcagggagaatagactagccatgcctgttaaggtgcgcgacagcagtagagagccagggggaagcctgagcttcttgcgtaaagccatgaagtacgaggatacccagcacatactatgtcatctcaatatcaccatgccgccctgtgctaaagggagcggagctgaggatcgtcggcggaccccaacaccgcttgcacttaggtattctattctcagtgagagtactccaggcagcctgtctgggacggaacaggcagagatgaaaatggcagtaattagtgaacacttagggctctcgtgggccgagctcgccagagagttgcagttttccgtggaagatatcaacagaatccgcgttgaaaatccgaactctctccttgagcagagcgtggccctgttaaatctgtgggttataagggaggggcaaaacgccaatatggaaaacctgtacacagcactgcagagcatcgaccggggcgagatcgtgaatatgcttgaaggctctgggcgccagtccaggaacttgaagccagataggcgccacacggaccgggactacagcctgtcaccctcccagatgaatggatactcatcactgcaggacgagttacttagtccagcctccctgggttgtgccctgtcttccccactcagagcggatcagtactggaacgaggtagccgtactggacgctattccactggccgctaccgagcacgacacaatgctggaaatgtctgatatgcaggtgtggagcgctgggctgacccccagcctggtgactgcggaggactcatctcttgagtgtagcaaagcagaggattccgatgcaacaggccacgaatggaagcttgaaggggccctgagcgaagagccacgtggtcctgaactgggcagtttggaactggtggaggacgatacagtggactctgacgccacaaacggtctgatcgacttgctggaacaggaggaaggtcagcgatcagaggaaaaactgcccggaagcaagcgacaggacgatgccactggagccggccaggactctgagaacgaggtgtccttggtttctggccatcaaaggggccaagcccgtattacacacagcccaactgtgtctcaggtgacagaaagaagccaggaccgtctccaggactgggacgccgacggaagtattgtaagctatttacaggatgccgcccaggggtcttggcaagaggaggttacccaggggccacactcttttcagggcacatccaccatgacggaaggattagaaccaggcggtagccaagagtacgagaaggtcctggtgtctgtaagtgagcatacatggactgagcagcccgaggcagaatcatcccaggccgaccgagatcgcaggcagcagggacaggaggaacaggtgcaagaggcgaagaatacgttcacacaggtcgttcagggaaatgaatttcagaacattcctggggaacaagtgactgaggagcagttcaccgatgaacagggcaatatcgtgactaaaaaggaccatacgtctacccccaacccctag

SEQ ID NO: 204598 - DNA, 5504 bp, Artificial Sequence
  derived and/or modified sequence
atgccttattctgtgggctttcgcgaggctgatgcagccacgtcattcctaagagccgcaaggagtggtaacctggataaggccctggatcatctgagaaatggcgttgacatcaacacttgtaaccaaaacggccttaacggcctccatcttgctagtaaagaggggcatgtaaagatggtggtcgaactgcttcataaagaaataatcctagaaaccacaaccaaaaagggcaataccgctctgcacatagctgccctcgctggacaggacgaggtcgtgagagagctcgttaactacggtgccaatgtgaatgcacagtcccagaagggatttacccccttgtacatggccgcacaagaaaaccatctggaagtggtaaaattcctattggagaacggtgctaatcagaatgtggccacagaggacgggtttacgcctcttgccgtcgccctacagcaagggcacgaaaatgtagtagcccacttgatcaattatggtaccaaaggaaaggtcaggctccctgcccttcacattgccgcacgtaacgatgacacccgtacagccgctgttttgttgcagaacgatcctaacccagacgtgctaagcaagactggctttacacccttacatattgcagcccattacgagaatctgaacgtggcccaactgttgctgaatcgtggagcctctgtcaacttcactccccagaacgggatcacgccattacatatagcatctaggcggggaaacgttataatggtgcgtttgcttctcgacaggggggcacaaatagagactaagacgaaagacgaactaacacccctgcactgcgctgcgagaaacggccacgtgagaatcagtgagatcctccttgatcatggtgctcccatacaggctaagactaagaacggactgagtcccatacatatggcggcacagggtgaccaccttgactgcgttcggttgttgctgcagtacgacgcagaaatcgacgacatcaccttggaccacttgacgccactgcacgttgcggcacattgcggtcaccatagggtggccaaggtgcttctggacaaaggtgccaaaccaaactcccgggctctgaacggattcactccactgcacatcgcctgtaagaagaatcacgtgcgcgttatggagctcctcctgaagacaggagcgtccattgatgctgtcacagagtccgggttaaccccactccatgtggccagcttcatgggacacttaccaatcgttaagaacttgctgcagcggggtgccagtcctaacgtgtctaacgtcaaggtagaaaccccccttcatatggccgctcgggctggacacaccgaagtcgccaagtaccttttacagaataaggctaaagttaatgctaaggcaaaggatgatcagacccccctgcattgtgcagccagaatcggacatactaacatggttaagctgctcctggagaataacgcaaatccaaacctggctaccacagccggtcataccccactgcatatcgcagccagagagggacacgtggagacagtgcttgccctgttggagaaagaggctagccaggcctgcatgacaaaaaaaggatttacccctctgcatgttgccgcaaagtacggaaaggtccgagtcgctgaactgctgctggagagggatgcgcaccccaacgccgctggaaagaacggattaacgcctctgcatgtagcagtgcaccataataatctggacatagttaaactattgttgcctagaggcggaagtccacacagcccggcatggaacggttacacccccctgcacatcgcagccaagcaaaaccaagtagaggttgcccgaagtcttctacagtatggcggttccgctaacgctgagtccgtccagggcgtgactccccttcacctggcagctcaggaagggcacgccgagatggttgctttgctcctgtctaagcaggctaatgggaaccttggtaataaaagcgggctaacacccctgcacctggttgctcaggaaggtcacgtgcccgttgcagacgtgctgataaagcatggagtaatggtcgacgccactactcgtatgggatatacgccactccatgtcgcctctcattatggcaacattaaattggtcaaattcttactacagcatcaggccgacgtgaacgcaaagactaaactcggctactccccccttcaccaggctgcccagcagggccacaccgacatcgtgactttattattaaagaatggggcttcccccaatgaggtgagttcggacggtacgacccccctggctattgcgaagaggctcggatatatcagcgttaccgacgtgcttaaagtggttactgatgaaacatccttcgtgctcgtatctgataagcatcgcatgagcttcccagaaaccgtagacgagatacttgatgtctctgaagatgaaggcgaggagctgatttctttcaaggctgagcggagggacagcagggatgtcgatgaggagaaggagctcctcgatttcgtaccgaagctcgatcaggtcgtcgaatcccccgctattcctagaatcccgtgcgcaatgcctgaaactgtggtaatccgcagtgaagaacaagagcaggccagtaaggaatacgacgaagacagccttatcccttccagccccgctactgaaacaagcgataatatttctccagtggctagcccagtgcacaccggcttcttggtgtcttttatggttgacgccagggggggttccatgcgcggatccaggcacaacgggctgcgggtggtcatccctccacgaacttgcgccgcacctacacgcatcacctgtagattagttaaaccgcagaaactctccacacctcctcccttggccgaggaagagggtctcgctagccgtataattgctctaggacctactggtgctcagtttctgagtcccgtgattgtggagattcctcattttgctagccacgggagaggagaccgcgaattggtggtgctaaggtctgagaacggcagcgtgtggaaagaacacaggtcccgttacggcgagtcctacctcgatcagatccttaacgggatggacgaggagctgggctccctcgaagagcttgagaaaaagagggtgtgtcgaattatcacaactgactttccgctttattttgttataatgtccagactgtgccaggattacgacaccatcgggcctgagggaggttctttaaaatccaagttggtgcccctcgtgcaagcaaccttccccgaaaatgcggttaccaagcgagtgaagctggccctccaagcacaaccagtgccggacgagctggtgacaaaacttctcgggaatcaagcaacgtttagtccgatcgttactgttgaaccgagacgcagaaaattccaccgtccaattggcctacgaatacccttaccaccgagctggacagacaatccacgagacagcggcgaaggggatacaacatccctgagactcctttgctcggtgatcggagggacagatcaggcacaatgggaagacattaccggtactaccaagctggtgtatgcaaatgagtgtgctaacttcacaactaacgtctccgccaggttttggctgtcagactgtccaaggaccgccgaggcggtgaacttcgccaccttgctgtacaaagaacttacggccgtcccctacatggccaagttcgttatttttgccaagatgaacgatcctagagaaggacgcctacgatgttactgtatgactgacgacaaagtggacaaaacactagaacagcatgaaaacttcgtggaagtcgccaggagtcgcgatatagaggtgttggagggcatgtctctgtttgctgagctgtctggaaatctggtgcctgtcaaaaaagccgcacagcagagaagtttccattttcagagctttagagaaaaccggctggcgatgcctgtgaaggtacgcgatagctccagggaacccggtggctcactatcctttctaagaaaagctatgaagtacgaagatactcaacacatcctgtgtcatttaaatatcacaatgcccccatgcgcgaaggggagcggagccgaagatcgtcgtcgcaccccaacccccctggctctcaggtactccatactgtccgaatctacaccaggctcactctccggaaccgagcaggcagagatgaaaatggcagtgatctcagagcacctgggcctgtcttgggcagagttagcccgagagttgcagttctccgttgaagatattaaccgcatcagggtcgagaacccaaattcacttttggagcagtctgtggctttattaaatctttgggtcataagggagggccaaaacgcaaacatggaaaatctgtatacagccctccagtccatcgacaggggcgagattgtcaatatgttagaaggatctggcaggcaaagtcgtaacctgaaaccagaccgtaggcacaccgacagagattatagtctatctccttcccagatgaacggatatagcagcttgcaggatgaactcctgtcccccgcttcgcttggctgcgccctatcttcccctcttagggctgatcagtactggaatgaggtggctgttctcgacgcaatccctctcgctgccactgaacacgataccatgctggaaatgagcgacatgcaggtttggagtgccggactcaccccttctctggtgacagcagaagattcatccctcgagtgctccaaggccgaagactccgatgccactgggcacgagtggaaactagagggcgcactgtctgaggagcctcggggtccagagcttgggtcactggagctggtagaggacgacaccgttgacagcgatgccactaacggcctcatcgacctgctcgagcaggaggagggtcagcggtccgaggaaaaacttcccggaagcaaaagacaggacgatgcgacgggggcaggccaggactcagaaaatgaggtctccttagtcagtggtcaccagagaggacaagctaggatcacccacagccccacggtgtcccaagtcactgaaaggtcacaggaccgcctgcaggactgggacgccgatggcagcattgtatcatatctacaggatgctgcacagggctcttggcaggaagaggttacccagggcccacactccttccagggaaccagcactatgacggaaggccttgagccgggtggatcccaggaatacgagaaggtgctggtctcagtgtcagagcacacttggactgagcaaccagaggctgaatcctcacaggccgacagggacaggcggcagcagggccaggaagagcaggtgcaagaggccaagaataccttcacacaggtggtccaaggtaacgagttccagaatatacccggagagcaggtaaccgaggagcaattcaccgacgagcaggggaatattgtgactaagaaggatcacacgagcacaccaaacccata

SEQ ID NO: 204599 - DNA, 5505 bp, Artificial Sequence
  derived and/or modified sequence
atgccctacagcgtgggcttcagagaggccgacgccgccaccagcttcctgagagccgccagaagcggcaacctggacaaggccctggaccacctgagaaacggcgtggacatcaacacctgcaaccagaacggcctgaacggcctgcacctggccagcaaggagggccacgtgaagatggtggtggagctgctgcacaaggagatcatcctggagaccaccaccaagaagggcaacaccgccctgcacatcgccgccctggccggccaggacgaggtggtgagagagctggtgaactacggcgccaacgtgaacgcccagagccagaagggcttcacccccctgtacatggccgcccaggagaaccacctggaggtggtgaagttcctgctggagaacggcgccaaccagaacgtggccaccgaggacggcttcacccccctggccgtggccctgcagcagggccacgagaacgtggtggcccacctgatcaactacggcaccaagggcaaggtgagactgcccgccctgcacatcgccgccagaaacgacgacaccagaaccgccgccgtgctgctgcagaacgaccccaaccccgacgtgctgagcaagaccggcttcacccccctgcacatcgccgcccactacgagaacctgaacgtggcccagctgctgctgaacagaggcgccagcgtgaacttcaccccccagaacggcatcacccccctgcacatcgccagcagaagaggcaacgtgatcatggtgagactgctgctggacagaggcgcccagatcgagaccaagaccaaggacgagctgacccccctgcactgcgccgccagaaacggccacgtgagaatcagcgagatcctgctggaccacggcgcccccatccaggccaagaccaagaacggcctgagccccatccacatggccgcccagggcgaccacctggactgcgtgagactgctgctgcagtacgacgccgagatcgacgacatcaccctggaccacctgacccccctgcacgtggccgcccactgcggccaccacagagtggccaaggtgctgctggacaagggcgccaagcccaacagcagagccctgaacggcttcacccccctgcacatcgcctgcaagaagaaccacgtgagagtgatggagctgctgctgaagaccggcgccagcatcgacgccgtgaccgagagcggcctgacccccctgcacgtggccagcttcatgggccacctgcccatcgtgaagaacctgctgcagagaggcgccagccccaacgtgagcaacgtgaaggtggagacccccctgcacatggccgccagagccggccacaccgaggtggccaagtacctgctgcagaacaaggccaaggtgaacgccaaggccaaggacgaccagacccccctgcactgcgccgccagaatcggccacaccaacatggtgaagctgctgctggagaacaacgccaaccccaacctggccaccaccgccggccacacccccctgcacatcgccgccagagagggccacgtggagaccgtgctggccctgctggagaaggaggccagccaggcctgcatgaccaagaagggcttcacccccctgcacgtggccgccaagtacggcaaggtgagagtggccgagctgctgctggagagagacgcccaccccaacgccgccggcaagaacggcctgacccccctgcacgtggccgtgcaccacaacaacctggacatcgtgaagctgctgctgcccagaggcggcagcccccacagccccgcctggaacggctacacccccctgcacatcgccgccaagcagaaccaggtggaggtggccagaagcctgctgcagtacggcggcagcgccaacgccgagagcgtgcagggcgtgacccccctgcacctggccgcccaggagggccacgccgagatggtggccctgctgctgagcaagcaggccaacggcaacctgggcaacaagagcggcctgacccccctgcacctggtggcccaggagggccacgtgcccgtggccgacgtgctgatcaagcacggcgtgatggtggacgccaccaccagaatgggctacacccccctgcacgtggccagccactacggcaacatcaagctggtgaagttcctgctgcagcaccaggccgacgtgaacgccaagaccaagctgggctacagccccctgcaccaggccgcccagcagggccacaccgacatcgtgaccctgctgctgaagaacggcgccagccccaacgaggtgagcagcgacggcaccacccccctggccatcgccaagagactgggctacatcagcgtgaccgacgtgctgaaggtggtgaccgacgagaccagcttcgtgctggtgagcgacaagcacagaatgagcttccccgagaccgtggacgagatcctggacgtgagcgaggacgagggcgaggagctgatcagcttcaaggccgagagaagagacagcagagacgtggacgaggagaaggagctgctggacttcgtgcccaagctggaccaggtggtggagagccccgccatccccagaatcccctgcgccatgcccgagaccgtggtgatcagaagcgaggagcaggagcaggccagcaaggagtacgacgaggacagcctgatccccagcagccccgccaccgagaccagcgacaacatcagccccgtggccagccccgtgcacaccggcttcctggtgagcttcatggtggacgccagaggcggcagcatgagaggcagcagacacaacggcctgagagtggtgatcccccccagaacctgcgccgcccccaccagaatcacctgcagactggtgaagccccagaagctgagcacccccccccccctggccgaggaggagggcctggccagcagaatcatcgccctgggccccaccggcgcccagttcctgagccccgtgatcgtggagatcccccacttcgccagccacggcagaggcgacagagagctggtggtgctgagaagcgagaacggcagcgtgtggaaggagcacagaagcagatacggcgagagctacctggaccagatcctgaacggcatggacgaggagctgggcagcctggaggagctggagaagaagagagtgtgcagaatcatcaccaccgacttccccctgtacttcgtgatcatgagcagactgtgccaggactacgacaccatcggccccgagggcggcagcctgaagagcaagctggtgcccctggtgcaggccaccttccccgagaacgccgtgaccaagagagtgaagctggccctgcaggcccagcccgtgcccgacgagctggtgaccaagctgctgggcaaccaggccaccttcagccccatcgtgaccgtggagcccagaagaagaaagttccacagacccatcggcctgagaatccccctgccccccagctggaccgacaaccccagagacagcggcgagggcgacaccaccagcctgagactgctgtgcagcgtgatcggcggcaccgaccaggcccagtgggaggacatcaccggcaccaccaagctggtgtacgccaacgagtgcgccaacttcaccaccaacgtgagcgccagattctggctgagcgactgccccagaaccgccgaggccgtgaacttcgccaccctgctgtacaaggagctgaccgccgtgccctacatggccaagttcgtgatcttcgccaagatgaacgaccccagagagggcagactgagatgctactgcatgaccgacgacaaggtggacaagaccctggagcagcacgagaacttcgtggaggtggccagaagcagagacatcgaggtgctggagggcatgagcctgttcgccgagctgagcggcaacctggtgcccgtgaagaaggccgcccagcagagaagcttccacttccagagcttcagagagaacagactggccatgcccgtgaaggtgagagacagcagcagagagcccggcggcagcctgagcttcctgagaaaggccatgaagtacgaggacacccagcacatcctgtgccacctgaacatcaccatgcccccctgcgccaagggcagcggcgccgaggacagaagaagaacccccacccccctggccctgagatacagcatcctgagcgagagcacccccggcagcctgagcggcaccgagcaggccgagatgaagatggccgtgatcagcgagcacctgggcctgagctgggccgagctggccagagagctgcagttcagcgtggaggacatcaacagaatcagagtggagaaccccaacagcctgctggagcagagcgtggccctgctgaacctgtgggtgatcagagagggccagaacgccaacatggagaacctgtacaccgccctgcagagcatcgacagaggcgagatcgtgaacatgctggagggcagcggcagacagagcagaaacctgaagcccgacagaagacacaccgacagagactacagcctgagccccagccagatgaacggctacagcagcctgcaggacgagctgctgagccccgccagcctgggctgcgccctgagcagccccctgagagccgaccagtactggaacgaggtggccgtgctggacgccatccccctggccgccaccgagcacgacaccatgctggagatgagcgacatgcaggtgtggagcgccggcctgacccccagcctggtgaccgccgaggacagcagcctggagtgcagcaaggccgaggacagcgacgccaccggccacgagtggaagctggagggcgccctgagcgaggagcccagaggccccgagctgggcagcctggagctggtggaggacgacaccgtggacagcgacgccaccaacggcctgatcgacctgctggagcaggaggagggccagagaagcgaggagaagctgcccggcagcaagagacaggacgacgccaccggcgccggccaggacagcgagaacgaggtgagcctggtgagcggccaccagagaggccaggccagaatcacccacagccccaccgtgagccaggtgaccgagagaagccaggacagactgcaggactgggacgccgacggcagcatcgtgagctacctgcaggacgccgcccagggcagctggcaggaggaggtgacccagggcccccacagcttccagggcaccagcaccatgaccgagggcctggagcccggcggcagccaggagtacgagaaggtgctggtgagcgtgagcgagcacacctggaccgagcagcccgaggccgagagcagccaggccgacagagacagaagacagcagggccaggaggagcaggtgcaggaggccaagaacaccttcacccaggtggtgcagggcaacgagttccagaacatccccggcgagcaggtgaccgaggagcagttcaccgacgagcagggcaacatcgtgaccaagaaggaccacaccagcacccccaacccctag

SEQ ID NO: 204600 - protein, 1881 aa, Artificial Sequence
  derived and/or modified sequence
MPYSVGFREADAATSFLRAARSGNLDKALDHLRNGVDINTCNQNGLNGLHLASKEGHVKMVVELLHKEIILETTTKKGNTALHIAALAGQDEVVRELVNYGANVNAQSQKGFTPLYMAAQENHLEVVKFLLENGANQNVATEDGFTPLAVALQQGHENVVAHLINYGTKGKVRLPALHIAARNDDTRTAAVLLQNDPNPDVLSKTGFTPLHIAAHYENLNVAQLLLNRGASVNFTPQNGITPLHIASRRGNVIMVRLLLDRGAQIETKTKDELTPLHCAARNGHVRISEILLDHGAPIQAKTKNGLSPIHMAAQGDHLDCVRLLLQYDAEIDDITLDHLTPLHVAAHCGHHRVAKVLLDKGAKPNSRALNGFTPLHIACKKNHVRVMELLLKTGASIDAVTESGLTPLHVASFMGHLPIVKNLLQRGASPNVSNVKVETPLHMAARAGHTEVAKYLLQNKAKVNAKAKDDQTPLHCAARIGHTNMVKLLLENNANPNLATTAGHTPLHIAAREGHVETVLALLEKEASQACMTKKGFTPLHVAAKYGKVRVAELLLERDAHPNAAGKNGLTPLHVAVHHNNLDIVKLLLPRGGSPHSPAWNGYTPLHIAAKQNQVEVARSLLQYGGSANAESVQGVTPLHLAAQEGHAEMVALLLSKQANGNLGNKSGLTPLHLVAQEGHVPVADVLIKHGVMVDATTRMGYTPLHVASHYGNIKLVKFLLQHQADVNAKTKLGYSPLHQAAQQGHTDIVTLLLKNGASPNEVSSDGTTPLAIAKRLGYISVTDVLKVVTDETSFVLVSDKHRMSFPETVDEILDVSEDEGEELISFKAERRDSRDVDEEKELLDFVPKLDQVVESPAIPRIPCAMPETVVIRSEEQEQASKEYDEDSLIPSSPATETSDNISPVASPVHTGFLVSFMVDARGGSMRGSRHNGLRVVIPPRTCAAPTRITCRLVKPQKLSTPPPLAEEEGLASRIIALGPTGAQFLSPVIVEIPHFASHGRGDRELVVLRSENGSVWKEHRSRYGESYLDQILNGMDEELGSLEELEKKRVCRIITTDFPLYFVIMSRLCQDYDTIGPEGGSLKSKLVPLVQATFPENAVTKRVKLALQAQPVPDELVTKLLGNQATFSPIVTVEPRRRKFHRPIGLRIPLPPSWTDNPRDSGEGDTTSLRLLCSVIGGTDQAQWEDITGTTKLVYANECANFTTNVSARFWLSDCPRTAEAVNFATLLYKELTAVPYMAKFVIFAKMNDPREGRLRCYCMTDDKVDKTLEQHENFVEVARSRDIEVLEGMSLFAELSGNLVPVKKAAQQRSFHFQSFRENRLAMPVKVRDSSREPGGSLSFLRKAMKYEDTQHILCHLNITMPPCAKGSGAEDRRRTPTPLALRYSILSESTPGSLSGTEQAEMKMAVISEHLGLSWAELARELQFSVEDINRIRVENPNSLLEQSVALLNLWVIREGQNANMENLYTALQSIDRGEIVNMLEGSGRQSRNLKPDRRHTDRDYSLSPSQMNGYSSLQDELLSPASLGCALSSPLRADQYWNEVAVLDAIPLAATEHDTMLEMSDMQVWSAGLTPSLVTAEDSSLECSKAEDSDATGHEWKLEGALSEEPRGPELGSLELVEDDTVDSDATNGLIDLLEQEEGQRSEEKLPGSKRQDDATGAGQDSENEVSLVSGHQRGQARITHSPTVSQVTERSQDRLQDWDADGSIVSYLQDAAQGSWQEEVTQGPHSFQGTSTMTEGLEPGGSQEYEKVLVSVSEHTWTEQPEAESSQADRDRRQQGQEEQVQEAKNTFTQVVQGNEFQNIPGEQVTEEQFTDEQGNIVTKKIIRKVVRQIDLSSADAAQEHEEVTVEGPLEDPSELEVDIDYFMKHSKDHTSTPNP

SEQ ID NO: 204601 - protein, 1519 aa, Artificial Sequence
  derived and/or modified sequence
MPYSVGFREADAATSFLRAARSGNLDKALDHLRNGVDINTCNQNGLNGLHLASKEGHVKMVVELLHKEIILETTTKKGNTALHIAALAGQDEVVRELVNYGANVNAQSQKGFTPLYMAAQENHLEVVKFLLENGANQNVATEDGFTPLAVALQQGHENVVAHLINYGTKGKVRLPALHIAARNDDTRTAAVLLQNDPNPDVLSKTGFTPLHIAAHYENLNVAQLLLNRGASVNFTPQNGITPLHIASRRGNVIMVRLLLDRGAQIETKTKDELTPLHCAARNGHVRISEILLDHGAPIQAKTKNGLSPIHMAAQGDHLDCVRLLLQYDAEIDDITLDHLTPLHVAAHCGHHRVAKVLLDKGAKPNSRALNGFTPLHIACKKNHVRVMELLLKTGASIDAVTESGLTPLHVASFMGHLPIVKNLLQRGASPNVSNVKVETPLHMAARAGHTEVAKYLLQNKAKVNAKAKDDQTPLHCAARIGHTNMVKLLLENNANPNLATTAGHTPLHIAAREGHVETVLALLEKEASQACMTKKGFTPLHVAAKYGKVRVAELLLERDAHPNAAGKNGLTPLHVAVHHNNLDIVKLLLPRGGSPHSPAWNGYTPLHIAAKQNQVEVARSLLQYGGSANAESVQGVTPLHLAAQEGHAEMVALLLSKQANGNLGNKSGLTPLHLVAQEGHVPVADVLIKHGVMVDATTRMGYTPLHVASHYGNIKLVKFLLQHQADVNAKTKLGYSPLHQAAQQGHTDIVTLLLKNGASPNEVSSDGTTPLAIAKRLGYISVTDVLKVVTDETSFVLVSDKHRMSFPETVDEILDVSEDEGEELISFKAERRDSRDVDEEKELLDFVPKLDQVVESPAIPRIPCAMPETVVIRSEEQEQASKEYDEDSLIPSSPATETSDNISPVASPVHTGFLVSFMVDARGGSMRGSRHNGLRVVIPPRTCAAPTRITCRLVKPQKLSTPPPLAEEEGLASRIIALGPTGAQFLSPVIVEIPHFASHGRGDRELVVLRSENGSVWKEHRSRYGESYLDQILNGMDEELGSLEELEKKRVCRIITTDFPLYFVIMSRLCQDYDTIGPEGGSLKSKLVPLVQATFPENAVTKRVKLALQAQPVPDELVTKLLGNQATFSPIVTVEPRRRKFHRPIGLRIPLPPSWTDNPRDSGEGDTTSLRLLCSVIGGTDQAQWEDITGTTKLVYANECANFTTNVSARFWLSDCPRTAEAVNFATLLYKELTAVPYMAKFVIFAKMNDPREGRLRCYCMTDDKVDKTLEQHENFVEVARSRDIEVLEGMSLFAELSGNLVPVKKAAQQRSFHFQSFRENRLAMPVKVRDSSREPGGSLSFLRKAMKYEDTQHILCHLNITMPPCAKGSGAEDRRRTPTPLALRYSILSESTPGSLSGTEQAEMKMAVISEHLGLSWAELARELQFSVEDINRIRVENPNSLLEQSVALLNLWVIREGQNANMENLYTALQSIDRGEIVNMLEGSGRQSRNLKPDRRHTDRDYSLSPSQMNGISTNNP

SEQ ID NO: 204602 - protein, 1806 aa, Artificial Sequence
  derived and/or modified sequence
MPYSVGFREADAATSFLRAARSGNLDKALDHLRNGVDINTCNQNGLNGLHLASKEGHVKMVVELLHKEIILETTTKKGNTALHIAALAGQDEVVRELVNYGANVNAQSQKGFTPLYMAAQENHLEVVKFLLENGANQNVATEDGFTPLAVALQQGHENVVAHLINYGTKGKVRLPALHIAARNDDTRTAAVLLQNDPNPDVLSKTGFTPLHIAAHYENLNVAQLLLNRGASVNFTPQNGITPLHIASRRGNVIMVRLLLDRGAQIETKTKDELTPLHCAARNGHVRISEILLDHGAPIQAKTKNGLSPIHMAAQGDHLDCVRLLLQYDAEIDDITLDHLTPLHVAAHCGHHRVAKVLLDKGAKPNSRALNGFTPLHIACKKNHVRVMELLLKTGASIDAVTESGLTPLHVASFMGHLPIVKNLLQRGASPNVSNVKVETPLHMAARAGHTEVAKYLLQNKAKVNAKAKDDQTPLHCAARIGHTNMVKLLLENNANPNLATTAGHTPLHIAAREGHVETVLALLEKEASQACMTKKGFTPLHVAAKYGKVRVAELLLERDAHPNAAGKNGLTPLHVAVHHNNLDIVKLLLPRGGSPHSPAWNGYTPLHIAAKQNQVEVARSLLQYGGSANAESVQGVTPLHLAAQEGHAEMVALLLSKQANGNLGNKSGLTPLHLVAQEGHVPVADVLIKHGVMVDATTRMGYTPLHVASHYGNIKLVKFLLQHQADVNAKTKLGYSPLHQAAQQGHTDIVTLLLKNGASPNEVSSDGTTPLAIAKRLGYISVTDVLKVVTDETSFVLVSDKHRMSFPETVDEILDVSEDEGEELISFKAERRDSRDVDEEKELLDFVPKLDQVVESPAIPRIPCAMPETVVIRSEEQEQASKEYDEDSLIPSSPATETSDNISPVASPVHTGFLVSFMVDARGGSMRGSRHNGLRVVIPPRTCAAPTRITCRLVKPQKLSTPPPLAEEEGLASRIIALGPTGAQFLSPVIVEIPHFASHGRGDRELVVLRSENGSVWKEHRSRYGESYLDQILNGMDEELGSLEELEKKRVCRIITTDFPLYFVIMSRLCQDYDTIGPEGGSLKSKLVPLVQATFPENAVTKRVKLALQAQPVPDELVTKLLGNQATFSPIVTVEPRRRKFHRPIGLRIPLPPSWTDNPRDSGEGDTTSLRLLCSVIGGTDQAQWEDITGTTKLVYANECANFTTNVSARFWLSDCPRTAEAVNFATLLYKELTAVPYMAKFVIFAKMNDPREGRLRCYCMTDDKVDKTLEQHENFVEVARSRDIEVLEGMSLFAELSGNLVPVKKAAQQRSFHFQSFRENRLAMPVKVRDSSREPGGSLSFLRKAMKYEDTQHILCHLNITMPPCAKGSGAEDRRRTPTPLALRYSILSESTPGSLSGTEQAEMKMAVISEHLGLSWAELARELQFSVEDINRIRVENPNSLLEQSVALLNLWVIREGQNANMENLYTALQSIDRGEIVNMLEGSGRQSRNLKPDRRHTDRDYSLSPSQMNGYSSLQDELLSPASLGCALSSPLRADQYWNEVAVLDAIPLAATEHDTMLEMSDMQVWSAGLTPSLVTAEDSSLECSKAEDSDATGHEWKLEGALSEEPRGPELGSLELVEDDTVDSDATNGLIDLLEQEEGQRSEEKLPGSKRQDDATGAGQDSENEVSLVSGHQRGQARITHSPTVSQVTERSQDRLQDWDADGSIVSYLQDAAQGSWQEEVTQGPHSFQGTSTMTEGLEPGGSQEYEKVLVSVSEHTWTEQPEAESSQADRDRRQQGQEEQVQEAKNTFTQVVQDHTSTPNP

SEQ ID NO: 204603 - DNA, 5646 bp, Artificial Sequence
  derived and/or modified sequence
atgccttatagcgttggttttcgagaagcggacgcggccacttctttcctacgtgccgccaggagcgggaatctcgacaaggcactagaccacctacgcaacggcgtagatattaacacatgcaaccagaatggattgaacggtttgcacctggcaagcaaagagggacacgtgaaaatggttgtggaactcctacacaaggagatcattctcgaaactaccacaaagaagggtaacacagccctgcacattgccgctctggccggccaggacgaagttgtacgtgagctagtgaactatggcgctaatgtcaacgcccaaagccagaagggctttactccactttacatggcagctcaggagaaccacctggaagtcgtgaagtttctgttggagaatggtgctaatcagaatgttgcaactgaggacggatttactccactggccgtggcgctccagcaggggcatgagaacgtggtggcacacttgattaactacggcacgaaaggcaaggtaagactgcctgcattgcatattgccgccaggaatgacgatacccggactgctgctgtgcttctccagaacgaccccaatccggacgttttgagtaaaaccggcttcacacctctacatatcgcagcccattatgaaaatctgaacgtagctcaattgctattgaaccgcggggccagtgtcaattttaccccccagaatggcattacacccctgcatattgcctcacgaagaggaaacgttataatggttagactgttattggaccgaggtgcgcagattgagactaagaccaaagacgaacttacaccattacactgcgcagcacggaatgggcacgtgcggatatctgagattctgcttgatcacggcgctcctatccaggcaaagacgaagaatggcctgtctcctatccatatggccgcacagggcgatcacctcgattgtgtgcggctgctgttgcaatacgatgccgagatcgacgacattacacttgaccatctcacacctctgcacgtagccgcgcactgtggccaccatcgggttgctaaggttctgttagacaagggagcaaagcctaactcccgcgccttaaacggctttaccccactccatattgcatgtaaaaaaaatcacgtacgcgtcatggaactgctgcttaagaccggcgcctccattgacgctgtgaccgagtcagggctgacaccccttcatgtggcgagttttatggggcacctgcctattgtaaagaacttgctccaacggggggcgagcccaaacgtatcaaatgtgaaggtggagactcctctgcatatggctgcccgggctggacatacggaggtggctaaatatctgctccagaacaaggccaaggtgaatgctaaggccaaagatgaccagacacctctccactgcgctgcccgcattgggcacacaaatatggtaaaactgcttctggagaacaatgcaaatccaaatttggccactacagcaggtcacacccctctacatatcgcagccagggagggccacgtcgaaaccgtgttagccctgctcgagaaggaggcctctcaggcctgcatgaccaagaaagggttcactccactgcatgttgctgcaaaatacggaaaagtgagagtggctgagcttctccttgagcgcgacgctcacccgaatgcagcagggaaaaacggcctaactccgttgcatgtggccgtgcaccacaacaaccttgatatcgtgaaattgctactgcctcggggtgggagcccacactcacctgcatggaacggatataccccccttcacatcgccgcgaaacagaaccaagtcgaggttgctcgatctcttcttcagtatggcggatccgccaacgctgagtccgtgcagggcgtgaccccattgcatctggctgcccaggagggccacgccgagatggttgctctgttgttaagtaaacaggctaatggcaacctgggaaataagtccggcctgacacccctgcaccttgttgcacaggaagggcatgtacccgtggccgacgtcctgataaagcatggcgtcatggtcgacgccacgacacgaatgggctatacaccattgcatgtggcgagccattacggtaatatcaagctcgtcaagttcctgttgcagcaccaggcagatgtcaatgctaaaacaaaactggggtacagcccactgcaccaggcagcacaacaaggacacacagacattgttacgctcttactaaagaacggtgcgtctcccaacgaagtaagcagcgacgggacaacccccttagctattgcgaaaaggctcggctatatctctgtcactgacgtgttgaaagtggtcacggacgagacctcatttgtactggtgagcgacaagcaccgcatgtcctttcccgaaacagtggatgagatacttgatgtctccgaggacgagggtgaggagctgattagtttcaaagccgagaggcgcgatagcagagatgtcgatgaagagaaagaattgctagattttgttcccaagttggatcaagttgttgagagtcccgccatcccgagaatcccttgcgctatgccggaaaccgttgtaataaggtctgaggaacaagagcaggcttctaaagagtacgacgaagactctctgattccttcttcccctgctaccgagacttccgacaacatatccccagttgctagtccagtccataccggctttttggtcagctttatggttgacgccagaggcggctctatgagaggtagcaggcacaatggactgagagtcgttatccccccgcggacttgtgccgcccccacgcgaatcacctgccgcctggtgaaacctcagaaactgtcaactccaccacccctcgctgaagaagaaggattggcctcacgcatcattgctctgggccccaccggagctcaattcctctccccggttatcgtggaaattcctcacttcgcttcacatggtagaggtgacagagagcttgtagtgctgcggtccgaaaacggatcggtttggaaagaacacagatcgagatacggagaatcttacttagatcaaatcctgaacggcatggacgaggaattgggctctctcgaggagttagagaaaaaaagagtgtgtcggatcattaccactgattttccattgtactttgtcattatgagccgcctctgtcaagactatgacacaattggtcccgaaggtggctcactcaagtctaaattggtccctttagttcaggccacgtttcccgaaaacgccgttacgaagagggttaaattggccctccaggcccagcccgtgcccgacgaactggttacaaaattgttaggaaaccaggcaaccttctcgcctatagtgactgtggaaccccgtcggaggaagtttcatagaccaatcggattgaggatcccactgcctccgagctggactgacaatccgagggactccggcgagggagatacaacatcattgcgcctgttatgcagcgtcatcggcggaaccgatcaggcccaatgggaagacatcacgggcacaacaaagctggtttacgccaacgaatgtgcgaacttcacaaccaatgtttcagccagattctggttgtctgattgcccccgaactgccgaggctgtcaactttgctacactgctgtacaaggagctgacggcagtgccttacatggctaaatttgtgatattcgccaaaatgaacgaccctagggagggtaggctgcgatgctactgtatgactgacgataaggtggacaagactttggagcagcatgagaattttgtcgaagtagcacggtcacgcgatatcgaagtcctcgaaggaatgtccctgttcgccgagctctctggcaatctagtaccggtaaagaaggctgcacagcagcggtctttccactttcaaagttttcgtgaaaaccgactcgctatgccagttaaggtgcgggactccagccgggagccgggcgggagtctgtcttttctccggaaggctatgaaatatgaagatacccagcacattttgtgccacttgaatattaccatgccgccttgcgccaaggggtcaggcgccgaagaccgcagacggactcccacgccactggccctgcggtactccatcctctcagaaagtacgcccggttccctgagcggcaccgagcaggccgaaatgaagatggccgtaatctctgaacacctggggctcagctgggccgagctggcacgggagttacagttttccgttgaagatatcaacagaatccgagttgaaaaccctaattctttgctggaacagtccgttgcattgctgaatctgtgggtcattcgggagggtcagaacgccaatatggaaaatctttacacagcgttgcagagcatcgacagaggcgaaatcgtgaacatgctggagggcagcgggcggcaatccaggaaccttaaacctgacaggaggcacactgatcgcgattatagtctgagcccttcccagatgaacggttattcatctcttcaagacgaactgctgtctcctgccagcttgggatgtgcccttagcagcccgttacgcgccgaccagtactggaacgaggtggccgtgctcgacgccataccactcgccgcaaccgagcatgatactatgcttgagatgtccgacatgcaggtctggtctgcgggactgactccgtctttggttacagcagaagattctagccttgagtgcagcaaggctgaggactcggacgcgaccggtcatgagtggaaactggagggagcactgagtgaggaacctcgaggacccgagctgggaagtctggagctggtcgaggacgataccgtggatagcgatgccactaacggccttattgacttactcgagcaggaggagggacagcgaagcgaggaaaagttacctggctctaaacgacaggacgatgccacgggagcgggtcaggacagcgagaacgaggtgtcactcgtgtccggacatcaacgaggccaggctcgtatcacacattcccccacagtcagccaggtcacagagcgatcacaggaccggctgcaggactgggacgctgacggatcaatcgtttcctatctacaggacgctgcccagggttcttggcaagaagaagtcacacagggaccccatagctttcaaggtacaagcacaatgacagaaggactagagccaggcggctcccaggaatacgaaaaggtcttggtttctgtctcggaacacacatggaccgaacagcctgaagcagaatcttcacaggcggatcgcgaccgcaggcagcagggtcaggaggagcaggtgcaggaggcaaaaaacaccttcacccaagtggtgcaggggaacgaattccagaacatccccggtgaacaagtcacagaagagcagttcaccgacgagcagggaaacattgtaacaaagaaaattatccgtaaagtggtgagacagatcgatctgtcatccgccgacgccgctcaggaacacgaagaggtgacagttgagggtccattggaggatccatcagagctggaagttgacatcgattattttatgaaacacagcaaggaccacaccagcaccccgaatccttag

SEQ ID NO: 204604 - DNA, 4560 bp, Artificial Sequence
  derived and/or modified sequence
atgccttactctgttggctttagggaggccgacgccgcgacttccttcctgagagctgcgaggtccggaaacctcgacaaggccctggaccatctgagaaacggcgtagatattaacacctgcaaccagaacggtctgaacggactgcacctcgccagtaaggaaggccacgttaaaatggtggtggagctgcttcataaggagatcatcctggagacaacaactaaaaagggtaatactgccttgcacatcgccgcacttgccggacaggacgaggtagtccgcgagctggtgaactacggcgctaacgtcaatgcacagagtcagaaggggttcacacccctctatatggcggcccaggaaaaccacctggaagtggtgaagttcctgctcgagaacggcgcaaaccagaacgtcgctacagaggatggctttacacctctggccgtcgccttgcaacagggccacgagaatgtagttgctcaccttattaactacgggacaaagggcaaagtgcggcttcctgcccttcatattgcagcccggaacgatgacacaaggacggcagccgtcctcctgcagaatgaccccaacccggatgtgctgagcaaaactggatttactcccctccatattgccgcgcattacgaaaatctcaatgtggctcagctgttgttaaatcgtggcgcaagcgttaacttcacaccgcagaacggaattacccccctgcacatagccagtagacggggcaacgtgatcatggtgaggcttttgttagatcgtggggcccagattgagacaaaaaccaaagatgaattgacacccctgcattgtgcggcccggaatggccacgtgaggatcagcgagattctgctggatcacggcgcacccattcaggccaaaaccaaaaacgggttgagccccatccacatggctgcgcaaggggaccatctagattgtgttaggctcctactgcaatacgatgcagagattgatgacatcactttggaccatttaaccccgttgcatgttgccgcacattgtggtcaccacagggttgccaaggtcctgctggataaaggagcaaaaccaaactctcgcgctctgaacggatttacgcctcttcatatcgcctgtaagaagaaccatgtcagagttatggagctcctcctcaagaccggcgctagcatcgatgcagttactgagagcggtctcactcccttacacgttgcaagctttatgggccatctgccaattgtcaaaaacctgctgcagcgcggtgcatccccaaacgtaagcaatgtgaaggtcgagactcccttgcacatggctgcccgcgcaggtcacactgaagttgcaaaatatctgttgcaaaacaaagccaaggtcaacgcgaaggcaaaagacgatcagacccccctccactgtgccgctaggattggacacacaaatatggtgaagctgctattggagaacaatgcaaacccaaatcttgctacgacagccggccatacgccgcttcacatagccgctagagaaggccacgtcgaaactgttctagccttgctggagaaggaagcatcacaggcatgcatgacgaaaaagggattcacacctctacacgttgcagcaaaatacgggaaggtgagagtcgccgagctactcttggagagggacgcgcaccccaatgccgccgggaagaatggtctgaccccactgcacgtggccgtacaccacaacaaccttgacatagtcaagctgcttctcccgcggggaggttcacctcatagccctgcctggaacggctatacaccattgcacatagcggcgaaacagaatcaggtggaggtagcacggtcgctcctgcagtatggaggctcagccaacgctgaatctgtccagggggtgactccgttgcatctggccgcgcaagaggggcatgccgagatggtcgctcttctgctctctaagcaagctaatggtaacctaggcaacaaatccgggttgactcccctgcatctggtggcacaggagggccacgtccccgtggcagacgtcctgatcaaacatggggtgatggtcgacgcgaccacacgcatgggctatacccctctccatgtcgcttcacattatggtaatattaagctcgtaaaatttctgctgcagcaccaggccgacgtaaacgccaagacgaagctggggtacagccccctgcaccaggccgcccagcaagggcacaccgatatagtgacccttttactgaaaaacggagcttcacccaatgaagtatcaagcgatggaactacccctctggccatagccaaaagattggggtatattagtgtcacagatgtacttaaagttgtaacagacgagacgtccttcgtccttgtgagtgacaagcatcgcatgtcctttccagaaacagtggacgaaattttagatgtatcggaggacgagggagaggagctcatctcgttcaaagcagagcgcagggactctagggatgtggacgaagaaaaggagcttctggatttcgtcccaaagctcgaccaagtggtggaatctccagcaatcccgcgaattccctgtgctatgcctgaaactgtggtaatccgctcagaggagcaggagcaggctagcaaggaatacgatgaggatagtctcattccctctagtccagctacagagacctccgacaatatcagccccgttgcgtcccctgtccatacaggttttttagtttctttcatggtggacgcccggggtgggtctatgcgtgggtcaaggcataacgggcttcgcgtggttataccccccagaacctgcgctgcccccaccagaatcacctgcagacttgttaaaccacagaagctgagcacacccccaccccttgccgaagaagagggtctcgcctctaggatcattgctctcggaccaacaggagcccaattcttatcccctgtcattgttgagattccccactttgcttctcacgggaggggggatcgcgagcttgtggtgttaagatcagaaaatggtagtgtgtggaaagaacacaggagccgttacggagagtcctatctggaccaaatcctaaatgggatggacgaggaactcggaagtctggaagagctcgaaaagaagagagtgtgcagaattattacaacagattttcctctgtactttgtgattatgtccaggctttgccaagattacgacaccattggtcccgagggcggatccttgaaatccaaactggtgccgttagtgcaagctacattcccagagaacgcagtcactaagagggtgaagctggccttacaagctcagcccgtacccgacgaattggttactaagttgctcggtaaccaggcgacgttctcacccatcgtcaccgtggagcctagacgacgtaagtttcatcggccaattgggctgaggatccctctgcccccctcatggaccgataaccccagagacagcggggagggcgatactacatcactacgcttgctgtgcagcgtaatagggggtactgatcaggcccaatgggaggatataaccggcacaacgaaactggtctacgccaacgagtgtgctaacttcaccacaaatgtgagcgcgcgtttctggctgagcgattgcccgagaacagcagaggcagtaaacttcgctactctcctgtacaaagaactgacagctgtgccctacatggcaaagttcgtgatcttcgctaaaatgaacgatccccgggaggggcgacttcgctgctattgcatgaccgatgataaagtcgataaaacactggaacagcatgagaactttgtagaggtagcaagaagtcgggatatcgaggtgctcgagggcatgtctctcttcgctgagttaagtgggaacctcgtgccggtcaaaaaagccgcccagcagcgctcattccactttcaatcctttcgcgaaaatcgcctggcaatgcctgtcaaagtcagggactcctcaagagaacctggtggtagcctatcctttctgagaaaggcaatgaagtacgaagatacgcagcatatactctgccacctgaacatcacaatgcccccttgcgctaagggttcaggagcagaagataggcggaggaccccaacgcctctggctttgcgctactccattctgagcgagtccacccccggatcactgtctggaaccgaacaggctgaaatgaagatggctgtgatttcagagcacctgggattgtcctgggctgaactggcacgagaactacagttctccgtggaagatattaaccggatcagagttgagaaccccaattctctcctagagcagtcggtcgctcttctgaacctctgggtgatcagggagggccagaatgctaatatggaaaatctttacactgccctgcagagcatcgatcggggcgaaatcgtgaatatgctggaaggcagtggacggcaaagccggaaccttaagccagaccgtagacacacagaccgcgattattccctgagtcccagtcagatgaatgggatttccacgaacaacccttag

SEQ ID NO: 204605 - DNA, 5421 bp, Artificial Sequence
  derived and/or modified sequence
atgccctattctgttggcttccgggaagctgatgccgcaacgtccttccttagagcagctcgctccgggaatctggacaaagccctcgaccacttgcgaaacggggtggacatcaacacatgtaaccagaatggcctgaacggcctgcacttggcaagtaaagagggccacgtgaagatggtagtggagctgcttcataaggaaatcatactcgaaactacaactaagaagggtaataccgctcttcacatcgccgctctggctgggcaggacgaagtggtgagggagctggtcaactacggagccaatgtaaatgcgcaatcacagaaaggatttacccccctctatatggcggcccaggagaatcatttggaggtggtcaagtttctgttagaaaacggcgcgaatcagaacgtcgccaccgaggatggatttaccccattggcagtagccctgcagcaagggcacgaaaatgttgttgcccaccttattaactatggcacaaaaggtaaagtgagacttccggccctacatatagccgcgagaaatgatgacacccgcactgccgccgtactgctgcagaacgaccccaatccggatgtcttgtccaaaacaggatttactccactccatattgcagctcactacgagaatctgaatgtcgcacaattgttactaaataggggagctagcgtcaacttcactccacagaacggaataacgccgctccacatagctagtcgtagagggaatgtgatcatggtgcgcttactgctggacaggggagctcagatcgagactaaaactaaggatgagcttacgcccctgcactgtgccgcacggaatggccacgtgcggatcagcgaaatcctgctagaccacggggcacctattcaagcaaaaaccaaaaatggtctgagccccattcacatggctgcgcaaggggatcacctggactgtgtgcgattgctcctccagtatgatgccgagattgatgatattacactcgatcacctaacaccactacacgtggcagcccattgcgggcaccacagggttgccaaagtactcctggataagggcgctaaacctaattcacgggcgctcaatgggttcactcctcttcatatagcctgcaagaaaaatcatgtgcgagtgatggagttgctcttaaagaccggggcatctatagacgctgtaaccgaatccggcctcactcccctccacgtagcgagcttcatggggcacctcccgatagtgaagaatctgctccagagaggagccagcccaaatgtgtccaatgtgaaagtggaaactccccttcacatggccgcaagagctggtcatactgaggtggcaaagtacctgctgcagaataaggccaaggtgaatgccaaagccaaggatgatcagactcccctgcattgcgctgcccgaattgggcacactaacatggtcaagctcctgctggaaaataacgctaatcctaacctcgctaccacagctggacatactcccctgcatatagccgctcgggagggccacgtggaaaccgtcctcgctttgcttgagaaggaggcgtcgcaggcctgtatgaccaaaaaaggattcacaccactccacgtggctgcaaagtatggaaaggttcgggtcgccgagctactcctggagcgagatgcccatccaaatgcagccgggaaaaatggactcactccgctccacgtggccgtacatcataataacctggatattgtgaagttacttctgccaaggggggggtctcctcatagccccgcttggaacggatacacaccgctgcatatcgctgctaaacagaatcaggttgaggtggcccgctctctgcttcagtacgggggaagtgcaaatgcggagagtgtgcaaggagtaaccccactgcatttggcagcgcaagagggtcacgccgaaatggttgcactgctattgtctaagcaggcaaacggcaatttgggaaacaagtccgggttaacccccctccatctggttgcacaggagggacacgtcccagtggctgacgtactgatcaaacacggtgttatggtcgatgccacaacacggatgggctacacccccctccacgtggcaagccactatggtaatatcaaacttgtgaaattcctgctccagcatcaggccgacgtgaatgccaagacgaagcttggctactcccccttgcatcaggccgctcagcagggtcacactgacatagtgaccctgctcctgaagaacggggcctctccgaacgaagtttcctctgacggaacaactcctctggcaatcgctaagaggctcgggtatatatctgttactgacgttctgaaagttgtgactgacgagacatcattcgtgctcgtgagcgacaaacacagaatgagcttcccagagacagtcgatgaaattttggatgtgagtgaagacgaaggcgaagagctcatctcatttaaagccgaacgaagagactcccgtgacgtggacgaggaaaaagaattgctggactttgtgccgaagctggaccaggtcgtggagagcccagctataccccgcatcccatgcgcaatgccagagactgtagtgattcgaagcgaggagcaggagcaggctagcaaagaatatgatgaagattcactgattccatcatctcctgccacagaaacctctgacaatatctcacctgtggcttcgccagtgcacaccggcttcctcgtctccttcatggttgacgctcgcgggggcagtatgagggggtcacgacataacggtttgcgagtggtgatccctccacggacttgtgccgctccaactcggattacctgcagactggtgaaaccgcagaaactgtctaccccgcctcctctcgcggaggaagagggcctggcaagcaggatcattgcactgggtcccactggggctcagtttctgtcacccgtgattgtcgaaatacctcacttcgccagtcatggccggggggatagggagttggtggtcctgcgttctgaaaacgggagtgtgtggaaagagcacaggtctaggtatggtgagagctatctggatcagatcctgaatgggatggacgaggagctgggttcattggaggaattggaaaaaaagagggtctgtcggatcatcactacagacttccctctttatttcgtaatcatgtctaggttgtgtcaggactacgacacaattggcccagaagggggaagcctgaagtccaaactggtcccactggtgcaggccacctttcccgagaatgcagtgaccaagcgggtcaaactggctctgcaggctcagcctgtgccagatgaacttgtcacaaaattgctcggcaatcaagcaacattcagccctatagtcactgttgagccccgccgtaggaagttccatagacccatcggactccgcattcccctgcccccatcatggaccgataatcctcgagactcaggcgagggggatacaacatcattaaggttactgtgctccgtcattggcgggacggaccaagctcagtgggaggatatcactggaactacgaagctggtttacgctaatgaatgcgctaacttcacgaccaatgtctcagcccgcttctggctaagcgactgtccgaggacagctgaagccgtcaacttcgccaccctgctgtacaaagaactgactgcagttccatatatggctaaatttgtgatcttcgctaagatgaatgacccccgcgagggcagattacgttgttactgtatgaccgatgacaaggtcgacaaaacactggaacaacacgagaactttgtggaggtagctcgctcaagagacattgaggtcctggaggggatgagcctgttcgcagagctatccgggaacctggtgcctgtaaagaaagcagctcaacagcgcagcttccattttcagagttttcgggagaaccgtctcgctatgcccgttaaagtgagagacagttctcgagagcccgggggcagcctatctttcttacgcaaagccatgaagtatgaagatactcaacatattctttgtcacctgaatatcacaatgcccccttgcgctaagggaagtggggctgaagataggcgcagaactcctaccccccttgccttgagatattccattctctccgagtcgacgcccggctccctgagtggaactgaacaagcagagatgaaaatggctgttatcagtgagcatctgggactatcatgggccgaactggctcgcgagttacaattcagtgtagaggacatcaatagaatcagggtggaaaacccaaacagcctgctagaacagagcgttgccctccttaacctgtgggtcattcgcgaaggacagaatgccaacatggagaatttgtacactgccctgcagtctattgataggggagagatcgtgaacatgcttgagggctccggcagacagtctcgcaacctaaaaccagacagaagacacactgatcgggactattctttgtctccctcccagatgaacggatattcttcacttcaagacgagctcctgtccccagcatcactgggttgcgctctgagcagtcccctgcgggccgaccagtactggaacgaggtcgccgtgctggacgccatacctctggctgccacagagcacgataccatgctggaaatgtcagacatgcaggtctggtctgctgggctgaccccaagtttggtcaccgccgaggattcttctcttgagtgctcgaaagctgaggactctgatgcaaccgggcatgaatggaagcttgaaggagctctgagcgaggaaccccggggacccgagctcggctcactcgagttagtggaagatgacacggtagatagcgatgccaccaatggactgattgatcttctggagcaggaagaaggacagcggtccgaggagaagctgcccggttcaaaaagacaggatgacgccactggcgccggacaggattccgagaacgaggtgagcttggtatcaggccaccagcggggtcaagctcggatcacccacagcccgacagtgtcccaggtcaccgagaggagtcaggaccgactgcaagactgggatgctgatggaagcatcgtttcttaccttcaggacgcagcgcaggggagttggcaggaagaggtcacacaaggtccacactcattccagggcaccagcaccatgacggagggcctggaacccgggggctcccaagaatatgagaaagtgttggtgagcgtgagcgagcacacttggaccgagcaaccagaggccgagtcaagtcaggccgatcgggacagaaggcagcaggggcaggaggagcaggtccaggaagccaaaaacacttttacccaagtcgtacaagaccacacttctacccccaacccatag

SEQ ID NO: 204606 - DNA, 5646 bp, Artificial Sequence
  derived and/or modified sequence
atgccctacagcgtgggcttccgggaggctgatgctgccaccagcttcctgcgggccgcccggagcggcaacctggacaaggccctggaccacctgagaaatggagtggacatcaacacctgcaaccagaatggcctgaatggcctgcacctggccagcaaggagggccacgtgaagatggtggtggagctgctgcacaaggagatcatcctggagaccaccaccaagaagggcaacacagccctgcacatcgccgccctggccggccaggatgaggtggtgcgggagctggtgaactacggggccaacgtgaatgcccagagccagaagggcttcacccccctgtacatggccgcccaggagaaccacctggaggtggtgaagttcctgctggagaatggagccaaccagaatgtggccacagaagatggcttcacccccctggccgtggccctgcagcagggccatgaaaatgtggtggcccacctgatcaactacggcaccaagggcaaggtgcggctgcctgccctgcacatcgccgccagaaatgatgacaccaggacagctgctgtgctgctgcagaatgaccccaacccagatgtgctgagcaagacaggcttcacccccctgcacatcgccgcccactatgagaacctgaatgtggcccagctgctgctgaacagaggagcctctgtgaacttcaccccccagaatggcatcacccccctgcacatcgccagcagaagaggaaatgtcatcatggtgcggctgctgctggacagaggagcccagatcgagaccaagaccaaggatgagctgacccccctgcactgtgccgccagaaatggccacgtgcgcatcagcgagatcctgctggaccacggggcccccatccaggccaagaccaagaatggcctgagccccatccacatggccgcccagggcgaccacctggactgtgtgcggctgctgctgcagtatgatgctgagattgatgacatcaccctggaccacctgacccccctgcacgtggccgcccactgcggccaccaccgggtggccaaggtgctgctggacaagggggccaagcccaacagccgggccctgaatggcttcacccccctgcacatcgcctgcaagaagaaccacgtgcgggtgatggagctgctgctgaagacaggagccagcattgatgctgtgacagaaagtggcctgacccccctgcacgtggccagcttcatgggccacctgcccatcgtgaagaacctgctgcagagaggagccagccccaacgtgtccaatgtgaaggtggagacccccctgcacatggccgcccgggccggccacacagaggtggccaagtacctgctgcagaacaaggccaaggtgaatgccaaggccaaggatgaccagacccccctgcactgtgccgcccgcatcggccacaccaacatggtgaagctgctgctggagaacaatgccaaccccaacctggccaccacagctggccacacccccctgcacatcgccgcccgggagggccacgtggagaccgtgctggccctgctggagaaggaggccagccaggcctgcatgaccaagaagggcttcacccccctgcacgtggccgccaagtatggcaaggtgcgggtggccgagctgctgctggagagagatgcccaccccaatgctgctgggaagaatggcctgacccccctgcacgtggccgtgcaccacaacaacctggacatcgtgaagctgctgctgccccggggcggcagcccccacagccctgcctggaatggctacacccccctgcacatcgccgccaagcagaaccaggtggaggtggcccggagcctgctgcagtatggaggcagcgccaatgctgagagcgtgcagggcgtgacccccctgcacctggccgcccaggagggccacgccgagatggtggccctgctgctgagcaagcaggccaacggcaacctgggcaacaagagcggcctgacccccctgcacctggtggcccaggagggccacgtgcctgtggctgatgtgctgatcaagcacggcgtgatggtggatgccaccaccaggatgggctacacccccctgcacgtggccagccactacggcaacatcaagctggtgaagttcctgctgcagcaccaggctgatgtgaatgccaagaccaagctgggctacagccccctgcaccaggccgcccagcagggccacacagacatcgtgaccctgctgctgaagaatggagccagccccaatgaggtgtccagtgatggcaccacccccctggccatcgccaagaggctgggctacatctctgtgacagatgtgctgaaggtggtgacagatgagaccagctttgtgctggtgtctgacaagcacaggatgtccttccctgagaccgtggatgagatcctggatgtgtctgaagatgaaggagaggagctgatctccttcaaggccgagcggcgggacagcagagatgtggatgaggagaaggagctgctggactttgtgcccaagctggaccaggtggtggagagccctgccatcccccgcatcccctgtgccatgcctgagaccgtggtgatccgctctgaggagcaggagcaggccagcaaggagtatgatgaggacagcctcatccccagcagccctgccacagagaccagtgacaacatcagccctgtggccagccctgtgcacacaggcttcctggtgtccttcatggtggatgcccggggcggctccatgaggggcagccgccacaacggcctgcgggtggtgattcctcccaggacctgtgccgcccccacccgcatcacctgccgcctggtgaagccccagaagctgagcaccccaccacccctggccgaggaggagggcctggccagccgcatcatcgccctgggccccactggagcccagttcctgagccctgtgattgtggagatcccccactttgccagccacggccgcggggaccgggagctggtggtgctgcggagtgaaaatggatctgtgtggaaggagcacaggagccgctacggggagagctacctggaccagatcctgaatggcatggatgaggagctgggcagcctggaggagctggagaagaagagggtgtgccgcatcatcaccacagacttccccctgtactttgtgatcatgagccggctgtgccaggactatgacaccatcggccctgagggcggcagcctgaagagcaagctggtgcccctggtgcaggccaccttcccagaaaatgctgtgaccaagagggtgaagctggccctgcaggcccagcctgtgcctgatgagctggtgaccaagctgctgggcaaccaggccaccttcagccccatcgtgacagtggagcccaggaggaggaagttccaccggcccatcggcctgcgcatccccctgccccccagctggacagacaacccccgggacagcggggagggggacaccaccagcctgcggctgctgtgcagcgtgattggaggaacagaccaggcccagtgggaggacatcaccggcaccaccaagctggtgtatgccaatgaatgtgccaacttcaccaccaacgtgtctgcccgcttctggctgagtgactgccccaggacagctgaggccgtgaactttgccaccctgctgtacaaggagctgacagctgtgccctacatggccaagtttgtgatctttgccaagatgaatgacccccgggagggccgcctgcgctgctactgcatgacagatgacaaggtggacaagaccctggagcagcacgagaactttgtggaggtggcccggagccgggacatcgaggtgctggagggcatgagcctgtttgctgagctgagcggcaacctggtgcctgtgaagaaggccgcccagcagaggagcttccacttccagagcttccgggagaaccggctggccatgcctgtgaaggtgcgggacagcagccgggagcccggcggcagcctgtccttcctgaggaaggccatgaagtatgaggacacccagcacatcctgtgccacctgaacatcaccatgccaccctgtgccaagggcagcggggctgaagatagaagaaggacccccacccccctggccctgcgctacagcatcctgtctgagagcaccccaggcagcctgagcggcacagagcaggccgagatgaagatggccgtcatcagcgagcacctgggcctgtcctgggccgagctggcccgggagctgcagttctctgtggaggacatcaaccgcatccgggtggagaaccccaacagcctgctggagcagagcgtggccctgctgaacctgtgggtgatccgggagggccagaatgccaacatggagaacctgtacacagccctgcagagcattgacagaggagaaattgtgaacatgctggagggcagcggccggcagagcaggaacctgaagccagacagaagacacacagaccgggactacagcctgagccccagccagatgaatggctacagcagcctgcaggatgagctgctgagccctgccagcctgggctgtgccctgagcagccccctgcgggctgaccagtactggaatgaggtggccgtgctggatgccatccccctggccgccacagaacatgacaccatgctggagatgtctgacatgcaggtgtggagcgctggcctgacccccagcctggtgacagctgaggacagcagcctggagtgcagcaaggcagaagattctgatgccaccggccacgagtggaagctggagggcgccctgtctgaggagccccggggccctgagctgggcagcctggagctggtggaggatgacacagtggacagtgatgccaccaacggcctgattgacctgctggagcaggaggagggccagaggtctgaggagaagctgcccggcagcaagaggcaggatgatgccaccggggccggccaggacagtgaaaatgaggtgtccctggtgtctggccaccagaggggccaggcccgcatcacccacagccccaccgtgtcccaggtgacagagaggagccaggaccggctgcaggactgggatgctgatggcagcatcgtgtcctacctgcaggatgctgcccagggctcctggcaggaggaggtgacccagggcccccacagcttccagggcaccagcaccatgacagagggcctggagcccggcggcagccaggagtatgagaaggtgctggtgtctgtgtctgagcacacctggacagagcagcctgaggccgagagcagccaggccgaccgggaccggcggcagcagggccaggaggagcaggtgcaggaggccaagaacaccttcacccaggtggtgcagggcaatgagttccagaacatccctggagagcaggtgacagaggagcagttcacagatgagcagggcaacatcgtgaccaagaagatcatcaggaaggtggtgcggcagattgacctgagcagcgcagatgctgcccaggagcacgaggaggtgacagtggagggccccctggaggaccccagcgagctggaggtggacatcgactacttcatgaagcacagcaaggaccacaccagcacccccaacccctag

SEQ ID NO: 204607 - DNA, 4560 bp, Artificial Sequence
  derived and/or modified sequence
atgccctacagcgtgggcttccgggaggctgatgctgccaccagcttcctgcgggccgcccggagcggcaacctggacaaggccctggaccacctgagaaatggagtggacatcaacacctgcaaccagaatggcctgaatggcctgcacctggccagcaaggagggccacgtgaagatggtggtggagctgctgcacaaggagatcatcctggagaccaccaccaagaagggcaacacagccctgcacatcgccgccctggccggccaggatgaggtggtgcgggagctggtgaactacggggccaacgtgaatgcccagagccagaagggcttcacccccctgtacatggccgcccaggagaaccacctggaggtggtgaagttcctgctggagaatggagccaaccagaatgtggccacagaagatggcttcacccccctggccgtggccctgcagcagggccatgaaaatgtggtggcccacctgatcaactacggcaccaagggcaaggtgcggctgcctgccctgcacatcgccgccagaaatgatgacaccaggacagctgctgtgctgctgcagaatgaccccaacccagatgtgctgagcaagacaggcttcacccccctgcacatcgccgcccactatgagaacctgaatgtggcccagctgctgctgaacagaggagcctctgtgaacttcaccccccagaatggcatcacccccctgcacatcgccagcagaagaggaaatgtcatcatggtgcggctgctgctggacagaggagcccagatcgagaccaagaccaaggatgagctgacccccctgcactgtgccgccagaaatggccacgtgcgcatcagcgagatcctgctggaccacggggcccccatccaggccaagaccaagaatggcctgagccccatccacatggccgcccagggcgaccacctggactgtgtgcggctgctgctgcagtatgatgctgagattgatgacatcaccctggaccacctgacccccctgcacgtggccgcccactgcggccaccaccgggtggccaaggtgctgctggacaagggggccaagcccaacagccgggccctgaatggcttcacccccctgcacatcgcctgcaagaagaaccacgtgcgggtgatggagctgctgctgaagacaggagccagcattgatgctgtgacagaaagtggcctgacccccctgcacgtggccagcttcatgggccacctgcccatcgtgaagaacctgctgcagagaggagccagccccaacgtgtccaatgtgaaggtggagacccccctgcacatggccgcccgggccggccacacagaggtggccaagtacctgctgcagaacaaggccaaggtgaatgccaaggccaaggatgaccagacccccctgcactgtgccgcccgcatcggccacaccaacatggtgaagctgctgctggagaacaatgccaaccccaacctggccaccacagctggccacacccccctgcacatcgccgcccgggagggccacgtggagaccgtgctggccctgctggagaaggaggccagccaggcctgcatgaccaagaagggcttcacccccctgcacgtggccgccaagtatggcaaggtgcgggtggccgagctgctgctggagagagatgcccaccccaatgctgctgggaagaatggcctgacccccctgcacgtggccgtgcaccacaacaacctggacatcgtgaagctgctgctgccccggggcggcagcccccacagccctgcctggaatggctacacccccctgcacatcgccgccaagcagaaccaggtggaggtggcccggagcctgctgcagtatggaggcagcgccaatgctgagagcgtgcagggcgtgacccccctgcacctggccgcccaggagggccacgccgagatggtggccctgctgctgagcaagcaggccaacggcaacctgggcaacaagagcggcctgacccccctgcacctggtggcccaggagggccacgtgcctgtggctgatgtgctgatcaagcacggcgtgatggtggatgccaccaccaggatgggctacacccccctgcacgtggccagccactacggcaacatcaagctggtgaagttcctgctgcagcaccaggctgatgtgaatgccaagaccaagctgggctacagccccctgcaccaggccgcccagcagggccacacagacatcgtgaccctgctgctgaagaatggagccagccccaatgaggtgtccagtgatggcaccacccccctggccatcgccaagaggctgggctacatctctgtgacagatgtgctgaaggtggtgacagatgagaccagctttgtgctggtgtctgacaagcacaggatgtccttccctgagaccgtggatgagatcctggatgtgtctgaagatgaaggagaggagctgatctccttcaaggccgagcggcgggacagcagagatgtggatgaggagaaggagctgctggactttgtgcccaagctggaccaggtggtggagagccctgccatcccccgcatcccctgtgccatgcctgagaccgtggtgatccgctctgaggagcaggagcaggccagcaaggagtatgatgaggacagcctcatccccagcagccctgccacagagaccagtgacaacatcagccctgtggccagccctgtgcacacaggcttcctggtgtccttcatggtggatgcccggggcggctccatgaggggcagccgccacaacggcctgcgggtggtgattcctcccaggacctgtgccgcccccacccgcatcacctgccgcctggtgaagccccagaagctgagcaccccaccacccctggccgaggaggagggcctggccagccgcatcatcgccctgggccccactggagcccagttcctgagccctgtgattgtggagatcccccactttgccagccacggccgcggggaccgggagctggtggtgctgcggagtgaaaatggatctgtgtggaaggagcacaggagccgctacggggagagctacctggaccagatcctgaatggcatggatgaggagctgggcagcctggaggagctggagaagaagagggtgtgccgcatcatcaccacagacttccccctgtactttgtgatcatgagccggctgtgccaggactatgacaccatcggccctgagggcggcagcctgaagagcaagctggtgcccctggtgcaggccaccttcccagaaaatgctgtgaccaagagggtgaagctggccctgcaggcccagcctgtgcctgatgagctggtgaccaagctgctgggcaaccaggccaccttcagccccatcgtgacagtggagcccaggaggaggaagttccaccggcccatcggcctgcgcatccccctgccccccagctggacagacaacccccgggacagcggggagggggacaccaccagcctgcggctgctgtgcagcgtgattggaggaacagaccaggcccagtgggaggacatcaccggcaccaccaagctggtgtatgccaatgaatgtgccaacttcaccaccaacgtgtctgcccgcttctggctgagtgactgccccaggacagctgaggccgtgaactttgccaccctgctgtacaaggagctgacagctgtgccctacatggccaagtttgtgatctttgccaagatgaatgacccccgggagggccgcctgcgctgctactgcatgacagatgacaaggtggacaagaccctggagcagcacgagaactttgtggaggtggcccggagccgggacatcgaggtgctggagggcatgagcctgtttgctgagctgagcggcaacctggtgcctgtgaagaaggccgcccagcagaggagcttccacttccagagcttccgggagaaccggctggccatgcctgtgaaggtgcgggacagcagccgggagcccggcggcagcctgtccttcctgaggaaggccatgaagtatgaggacacccagcacatcctgtgccacctgaacatcaccatgccaccctgtgccaagggcagcggggctgaagatagaagaaggacccccacccccctggccctgcgctacagcatcctgtctgagagcaccccaggcagcctgagcggcacagagcaggccgagatgaagatggccgtcatcagcgagcacctgggcctgtcctgggccgagctggcccgggagctgcagttctctgtggaggacatcaaccgcatccgggtggagaaccccaacagcctgctggagcagagcgtggccctgctgaacctgtgggtgatccgggagggccagaatgccaacatggagaacctgtacacagccctgcagagcattgacagaggagaaattgtgaacatgctggagggcagcggccggcagagcaggaacctgaagccagacagaagacacacagaccgggactacagcctgagccccagccagatgaatggcatcagcaccaacaacccctag

SEQ ID NO: 204608 - DNA, 5421 bp, Artificial Sequence
  derived and/or modified sequence
atgccctacagcgtgggcttccgggaggctgatgctgccaccagcttcctgcgggccgcccggagcggcaacctggacaaggccctggaccacctgagaaatggagtggacatcaacacctgcaaccagaatggcctgaatggcctgcacctggccagcaaggagggccacgtgaagatggtggtggagctgctgcacaaggagatcatcctggagaccaccaccaagaagggcaacacagccctgcacatcgccgccctggccggccaggatgaggtggtgcgggagctggtgaactacggggccaacgtgaatgcccagagccagaagggcttcacccccctgtacatggccgcccaggagaaccacctggaggtggtgaagttcctgctggagaatggagccaaccagaatgtggccacagaagatggcttcacccccctggccgtggccctgcagcagggccatgaaaatgtggtggcccacctgatcaactacggcaccaagggcaaggtgcggctgcctgccctgcacatcgccgccagaaatgatgacaccaggacagctgctgtgctgctgcagaatgaccccaacccagatgtgctgagcaagacaggcttcacccccctgcacatcgccgcccactatgagaacctgaatgtggcccagctgctgctgaacagaggagcctctgtgaacttcaccccccagaatggcatcacccccctgcacatcgccagcagaagaggaaatgtcatcatggtgcggctgctgctggacagaggagcccagatcgagaccaagaccaaggatgagctgacccccctgcactgtgccgccagaaatggccacgtgcgcatcagcgagatcctgctggaccacggggcccccatccaggccaagaccaagaatggcctgagccccatccacatggccgcccagggcgaccacctggactgtgtgcggctgctgctgcagtatgatgctgagattgatgacatcaccctggaccacctgacccccctgcacgtggccgcccactgcggccaccaccgggtggccaaggtgctgctggacaagggggccaagcccaacagccgggccctgaatggcttcacccccctgcacatcgcctgcaagaagaaccacgtgcgggtgatggagctgctgctgaagacaggagccagcattgatgctgtgacagaaagtggcctgacccccctgcacgtggccagcttcatgggccacctgcccatcgtgaagaacctgctgcagagaggagccagccccaacgtgtccaatgtgaaggtggagacccccctgcacatggccgcccgggccggccacacagaggtggccaagtacctgctgcagaacaaggccaaggtgaatgccaaggccaaggatgaccagacccccctgcactgtgccgcccgcatcggccacaccaacatggtgaagctgctgctggagaacaatgccaaccccaacctggccaccacagctggccacacccccctgcacatcgccgcccgggagggccacgtggagaccgtgctggccctgctggagaaggaggccagccaggcctgcatgaccaagaagggcttcacccccctgcacgtggccgccaagtatggcaaggtgcgggtggccgagctgctgctggagagagatgcccaccccaatgctgctgggaagaatggcctgacccccctgcacgtggccgtgcaccacaacaacctggacatcgtgaagctgctgctgccccggggcggcagcccccacagccctgcctggaatggctacacccccctgcacatcgccgccaagcagaaccaggtggaggtggcccggagcctgctgcagtatggaggcagcgccaatgctgagagcgtgcagggcgtgacccccctgcacctggccgcccaggagggccacgccgagatggtggccctgctgctgagcaagcaggccaacggcaacctgggcaacaagagcggcctgacccccctgcacctggtggcccaggagggccacgtgcctgtggctgatgtgctgatcaagcacggcgtgatggtggatgccaccaccaggatgggctacacccccctgcacgtggccagccactacggcaacatcaagctggtgaagttcctgctgcagcaccaggctgatgtgaatgccaagaccaagctgggctacagccccctgcaccaggccgcccagcagggccacacagacatcgtgaccctgctgctgaagaatggagccagccccaatgaggtgtccagtgatggcaccacccccctggccatcgccaagaggctgggctacatctctgtgacagatgtgctgaaggtggtgacagatgagaccagctttgtgctggtgtctgacaagcacaggatgtccttccctgagaccgtggatgagatcctggatgtgtctgaagatgaaggagaggagctgatctccttcaaggccgagcggcgggacagcagagatgtggatgaggagaaggagctgctggactttgtgcccaagctggaccaggtggtggagagccctgccatcccccgcatcccctgtgccatgcctgagaccgtggtgatccgctctgaggagcaggagcaggccagcaaggagtatgatgaggacagcctcatccccagcagccctgccacagagaccagtgacaacatcagccctgtggccagccctgtgcacacaggcttcctggtgtccttcatggtggatgcccggggcggctccatgaggggcagccgccacaacggcctgcgggtggtgattcctcccaggacctgtgccgcccccacccgcatcacctgccgcctggtgaagccccagaagctgagcaccccaccacccctggccgaggaggagggcctggccagccgcatcatcgccctgggccccactggagcccagttcctgagccctgtgattgtggagatcccccactttgccagccacggccgcggggaccgggagctggtggtgctgcggagtgaaaatggatctgtgtggaaggagcacaggagccgctacggggagagctacctggaccagatcctgaatggcatggatgaggagctgggcagcctggaggagctggagaagaagagggtgtgccgcatcatcaccacagacttccccctgtactttgtgatcatgagccggctgtgccaggactatgacaccatcggccctgagggcggcagcctgaagagcaagctggtgcccctggtgcaggccaccttcccagaaaatgctgtgaccaagagggtgaagctggccctgcaggcccagcctgtgcctgatgagctggtgaccaagctgctgggcaaccaggccaccttcagccccatcgtgacagtggagcccaggaggaggaagttccaccggcccatcggcctgcgcatccccctgccccccagctggacagacaacccccgggacagcggggagggggacaccaccagcctgcggctgctgtgcagcgtgattggaggaacagaccaggcccagtgggaggacatcaccggcaccaccaagctggtgtatgccaatgaatgtgccaacttcaccaccaacgtgtctgcccgcttctggctgagtgactgccccaggacagctgaggccgtgaactttgccaccctgctgtacaaggagctgacagctgtgccctacatggccaagtttgtgatctttgccaagatgaatgacccccgggagggccgcctgcgctgctactgcatgacagatgacaaggtggacaagaccctggagcagcacgagaactttgtggaggtggcccggagccgggacatcgaggtgctggagggcatgagcctgtttgctgagctgagcggcaacctggtgcctgtgaagaaggccgcccagcagaggagcttccacttccagagcttccgggagaaccggctggccatgcctgtgaaggtgcgggacagcagccgggagcccggcggcagcctgtccttcctgaggaaggccatgaagtatgaggacacccagcacatcctgtgccacctgaacatcaccatgccaccctgtgccaagggcagcggggctgaagatagaagaaggacccccacccccctggccctgcgctacagcatcctgtctgagagcaccccaggcagcctgagcggcacagagcaggccgagatgaagatggccgtcatcagcgagcacctgggcctgtcctgggccgagctggcccgggagctgcagttctctgtggaggacatcaaccgcatccgggtggagaaccccaacagcctgctggagcagagcgtggccctgctgaacctgtgggtgatccgggagggccagaatgccaacatggagaacctgtacacagccctgcagagcattgacagaggagaaattgtgaacatgctggagggcagcggccggcagagcaggaacctgaagccagacagaagacacacagaccgggactacagcctgagccccagccagatgaatggctacagcagcctgcaggatgagctgctgagccctgccagcctgggctgtgccctgagcagccccctgcgggctgaccagtactggaatgaggtggccgtgctggatgccatccccctggccgccacagaacatgacaccatgctggagatgtctgacatgcaggtgtggagcgctggcctgacccccagcctggtgacagctgaggacagcagcctggagtgcagcaaggcagaagattctgatgccaccggccacgagtggaagctggagggcgccctgtctgaggagccccggggccctgagctgggcagcctggagctggtggaggatgacacagtggacagtgatgccaccaacggcctgattgacctgctggagcaggaggagggccagaggtctgaggagaagctgcccggcagcaagaggcaggatgatgccaccggggccggccaggacagtgaaaatgaggtgtccctggtgtctggccaccagaggggccaggcccgcatcacccacagccccaccgtgtcccaggtgacagagaggagccaggaccggctgcaggactgggatgctgatggcagcatcgtgtcctacctgcaggatgctgcccagggctcctggcaggaggaggtgacccagggcccccacagcttccagggcaccagcaccatgacagagggcctggagcccggcggcagccaggagtatgagaaggtgctggtgtctgtgtctgagcacacctggacagagcagcctgaggccgagagcagccaggccgaccgggaccggcggcagcagggccaggaggagcaggtgcaggaggccaagaacaccttcacccaggtggtgcaggaccacaccagcacccccaacccctag

SEQ ID NO: 204609 - DNA, 5646 bp, Artificial Sequence
  derived and/or modified sequence
atgccctacagcgtgggcttccgggaggccgacgccgccaccagctttttgagagccgccagatccgggaaccttgataaagccctcgaccatctgaggaatggcgtcgacatcaatacgtgcaaccaaaacggactcaatggcctgcacctagcatccaaagagggacacgttaagatggtggtggagttgctacacaaggagatcatcctggagacaaccaccaaaaaaggaaataccgcgctgcatattgctgccctggctggccaggatgaggtagtaagagagttagtgaactatggggccaatgtgaacgcacagagtcaaaagggctttacccccctgtatatggcagcccaggagaaccacctggaggtggtgaaattcctgttggaaaacggtgctaatcagaacgtggccaccgaagatggatttactccactggccgtcgctcttcaacaggggcacgaaaatgtggtagcacacctgatcaactacggtacgaagggtaaggttcgtctgcctgccctgcatatagcagccaggaacgatgacacaaggactgctgcggtgcttctccagaacgatcccaaccctgatgtcctctctaagacaggcttcaccccactgcatatcgccgcgcactatgagaatttgaatgtcgcccagctgctgctcaaccgcggcgcttcagttaactttacaccgcaaaacggtattacaccactccatatcgccagccgcagaggtaatgtgatcatggttcgactgcttctggacaggggagcgcagattgagacgaagacaaaggatgagttgactccactgcattgcgccgctagaaacgggcacgtccgtatctctgaaatactgctggatcatggggctccaatccaagcaaagactaagaacggcttgagcccaatccatatggcagctcagggcgaccatctggactgtgtaaggcttctgctgcaatacgatgccgagatcgacgacattaccctggaccacctcacccctctccacgtagcggcgcattgcggccaccatcgcgtagcaaaggtcttgctcgataaaggagcaaaaccgaacagtcgggccctgaatggtttcacaccgctacatatcgcctgtaagaaaaaccacgtccgggtgatggaacttctgctcaagactggcgcgtctatagacgcggttacagagtcaggattaacacctctacacgtagcttccttcatgggacatctgccaattgtcaaaaacctgctgcaacggggcgccagccccaatgtgagcaacgttaaggtggaaactcctctgcacatggcagctcgggccggtcacaccgaagtggctaagtatctgcttcaaaacaaggctaaggttaatgccaaggctaaggacgaccagacgcccctacactgtgctgcccggattggtcacaccaatatggttaagctcctgctggagaataatgcaaatcccaacctggcaacgacagccggtcacacacctctgcacatcgcggctcgcgagggacacgtggagactgtgttggccctcctcgagaaagaagcctctcaagcttgtatgactaaaaaaggttttacaccgctccacgttgccgcaaagtatggcaaggtaagggtggccgagctgctgctggagcgggatgcccatcctaatgcagccggaaaaaatggcctgacgccactccatgtcgccgtacatcacaataatctggatattgtcaagttacttctccctaggggcgggtcaccccattcgcccgcttggaacggctatacacctctgcacatcgccgccaagcagaatcaggtggaagtggcgcgatcactgcttcagtatgggggatccgcaaatgctgagagcgttcagggggttacccccctgcacctcgctgcccaagagggacatgccgagatggttgccttattgttatccaaacaagctaatggtaacttgggcaacaagagcgggcttactccattacacctggtagcccaggaaggccacgtgcctgtggcggatgtgttaattaaacacggcgtcatggtcgatgcaacaacccgcatggggtatacacccttacacgttgcctctcactacggcaacatcaagctggttaagttcctcctccagcatcaggcggatgtgaatgctaaaaccaagttaggttattccccattacatcaagcagctcaacagggacacactgacattgtcactctgctcttgaaaaatggggcttctcctaacgaggtttcatctgatggaactactcctctagcaattgcgaaacgcctggggtacatatctgttactgacgtgctgaaagtcgtgacagacgagacttcttttgtgttggtttctgataagcatcggatgagcttccccgagaccgtggatgagatcctcgatgtgtcagaggatgagggggaagaactgataagtttcaaggcggaaaggcgtgatagccgcgacgtggatgaggaaaaagagctgttagatttcgtgccgaagcttgaccaggtggtggaatcaccagcaatccccaggatcccatgtgccatgcctgaaacggtggttattcgttccgaagagcaggagcaagctagtaaggagtatgatgaggactctttgatcccatcctccccagctaccgagaccagcgacaacattagtcctgtggcctctccggtgcatactgggtttctggtaagtttcatggtggacgctagaggagggtccatgcgagggtcccgccacaatggccttcgcgtcgttatcccacccaggacgtgcgcagccccaacacgaatcacttgccgactggtgaagccgcagaagctgtccactccccctccgttggctgaggaagagggcttagcatctagaattatcgctctgggccccaccggtgcacaattccttagccctgtaattgtcgagattccgcacttcgcctctcacggaaggggcgaccgggagctggtggtgctgcgctccgaaaacggtagcgtttggaaggaacatcgatctcgatacggagaatcatacttggaccagatcctgaatggcatggatgaagagctgggtagtttggaagagctggagaagaagcgggtctgtcgaattattactactgatttccccttgtactttgtgataatgtctcgactgtgccaggattatgacaccattggccctgaagggggttccctgaagagcaaacttgtgcccctcgtacaagctacctttcccgaaaatgccgtgaccaagcgcgttaagctggcattacaggcccaacctgtcccggatgaactggtcacaaaactccttggtaaccaggccacattctcacccatcgtgaccgtggaaccccgccggcgcaaatttcacagaccaattggcttgcggatcccactacctcccagctggactgacaatccgagggactcaggcgaaggagacaccacctctttaaggcttctttgcagcgtgattgggggaactgaccaggctcagtgggaagacatcactggcacgaccaagttggtgtatgcgaacgagtgtgccaattttaccaccaacgtttccgcacggttttggcttagtgattgccccagaacagctgaggccgtgaacttcgccaccttgctttataaggaactgaccgctgtcccttatatggccaagtttgtcatatttgcaaagatgaatgatccacgggagggacgactgagatgctattgcatgacagacgacaaagtggacaagacgttagaacagcatgaaaattttgtggaagtggctcggtctcgtgacattgaggttttggaggggatgtctttgttcgcagaactgtcagggaatcttgtccccgtgaagaaggcagctcagcagcgctcttttcacttccaatcattcagagagaatcggctcgctatgccggtgaaagtgcgagatagctcacgcgagccggggggttctttgagcttccttcgtaaagctatgaagtacgaggatactcagcatatcctctgtcacctgaatattactatgccaccctgcgccaaggggtccggagctgaggaccggcgcaggacccctacaccacttgctttaaggtattccatcctctctgagtcaacccctggcagtctttccggcacagaacaggcagagatgaagatggccgtcatatccgagcatttggggttgagctgggccgagctggctcgtgagctgcaattcagcgtggaggatatcaatcgcatccgcgtcgagaatcctaactccctgctggaacagtcagttgctctactgaatctgtgggtgattcgggaggggcagaacgctaatatggagaatctgtatactgccctgcagagtatagaccgcggcgagattgtgaatatgttagaaggtagcggcagacagtctcgaaaccttaaaccagatcgaaggcatacagaccgggattactcactgagtcctagccaaatgaacgggtactcatctctccaagatgagctgctcagcccagcatcactcgggtgcgctctctccagtcctctgcgtgcggatcagtattggaatgaggtggcagtgctcgacgcaataccgcttgcagcaactgagcacgacaccatgcttgaaatgtcagatatgcaggtctggagcgccggactgaccccatcattagtgaccgccgaggactcttctttggaatgtagtaaggccgaagattcagatgcgacagggcacgagtggaagctggagggtgcgctgtctgaggagcccagagggcctgagctcggatcactggaactcgttgaggatgatactgtcgattccgatgccacaaacggtctcatcgatctgctggaacaagaggagggtcagagaagcgaagagaaactgcccgggtctaaaaggcaagacgatgcgactggagccgggcaggactctgaaaatgaggtgtccttagtgagcggacatcagcgcggccaggctcggatcacacatagcccaaccgtgtctcaggtgacggaacgctcccaagatagactgcaggactgggacgcggacgggtctatcgtatcttacctccaggatgcagcacaagggtcctggcaggaagaagttacgcaagggcctcacagttttcagggaacatcgacaatgactgaaggcctcgaacctggtgggtcacaagaatacgagaaggtcctggttagcgtgagtgaacacacttggaccgaacaacctgaggccgagagctcacaggctgacagggatagacggcaacagggtcaggaggaacaggtgcaagaggctaagaatacttttacgcaagtggttcagggcaacgagtttcaaaacattcctggcgaacaggtcacagaagaacaatttacagacgaacagggaaacattgtcacgaagaaaatcatccggaaggtggtcagacaaatagacctgtcctccgctgacgctgcacaggaacatgaagaggtgacagtggagggcccactggaagatccatctgagctggaggtcgacatagactattttatgaagcacagtaaagatcacacgtccacgccgaacccatag

SEQ ID NO: 204610 - DNA, 4560 bp, Artificial Sequence
  derived and/or modified sequence
atgccctacagcgtgggcttccgggaggccgacgccgccaccagcttcctgcgggccgcccggtcaggaaacttggacaaagcccttgatcatctaaggaatggcgtggatattaacacctgtaaccagaatggactcaatggcttacacctggccagcaaagaggggcatgtgaaaatggtggtggaactattgcacaaagaaatcattctggagacgactacaaaaaagggaaataccgctctgcatattgcagccctagccggtcaagacgaggtggtgagagaactggtgaattatggtgcgaacgtcaatgcccaatctcagaagggattcacccccttgtacatggccgcccaggaaaaccacctggaggtggtcaagttcctgctggagaatggggccaaccagaacgtcgccacagaggacggcttcactccgctggccgtggccttgcagcagggccatgagaacgtagtggcacatttgatcaattacggaacgaagggaaaagtcaggctcccggctttacatattgccgcacggaacgatgacaccaggactgcagcagtgttgctgcaaaacgatcccaatcctgacgttcttagcaagactggattcacaccgctgcatattgcagcacactatgagaatctcaacgtggctcagctcctgttgaatcgcggagcatccgtgaacttcacccctcaaaatgggatcacacccctgcatattgcgtctaggagaggcaacgttattatggtgaggctgctgctggacaggggcgctcagatcgagacgaagaccaaggacgagttgacgcccctccactgcgccgccagaaacggacacgtacgtatatccgagatccttctcgatcatggtgcccctatccaggccaagaccaagaatggactgtcacccatccatatggcagcccaaggcgatcacctagattgcgtgcgactgctgctgcagtacgacgccgaaattgatgacatcacgctagaccatctgacgccactgcatgtggctgcccactgcggccaccatcgggtggcaaaagttctgctggacaagggggccaagccaaatagtcgcgctctaaacgggtttaccccgctgcacatcgcgtgtaaaaagaaccacgtccgtgtgatggaactgctgctgaagacgggcgcctccatcgatgccgtgaccgagtctgggctgacgcctctgcacgtggccagcttcatggggcatcttccaattgtcaagaatttactgcagaggggtgcttcgcctaacgtgagcaatgtgaaggtggagactccattacatatggcagcaagggccggacacactgaggtcgcaaagtaccttttacagaataaggctaaagtcaatgccaaggccaaggatgaccagactcctctccattgcgcagcccgcatcggacacactaacatggttaagctgcttttagaaaacaacgcgaatccgaatctggccaccaccgctggccacacccccctccacatcgccgcaagagaaggtcacgtggagacagtgctggccctcctagaaaaggaggcgagccaagcgtgcatgacgaagaaaggtttcacccccctacacgtcgccgcaaagtacggcaaagttagagtcgccgaactgcttctcgagcgcgacgcccatccaaacgcagccggaaagaatgggctgacgcctctacacgtggccgtccaccataataacttggatattgtcaaactgcttcttcccagaggaggatccccccacagccctgcctggaacgggtacaccccacttcatattgctgcaaagcaaaaccaggttgaggtcgcgcgaagccttttacagtacggtgggagcgctaacgccgagtcagtccagggcgtgacacctctccacctggctgcccaagaagggcacgccgaaatggtggccctgctcctgagtaagcaagcaaatggaaaccttggcaataaaagcggcttgaccccattacacctggtcgcccaggagggacacgtgccagtggctgatgtgctgataaagcatggagttatggtcgacgctaccactcggatgggctatactcccctccacgttgcttcgcactatgggaacatcaaactggtgaagttccttttgcagcaccaggccgatgtgaacgctaaaactaagttaggctatagtcctctccatcaagcggcacagcaagggcatactgatatcgtgacactgttactgaagaacggggcctcccctaacgaagtgagttccgacggtactactcctctggcaatcgccaagcgcctgggatatatttctgttaccgacgttctcaaagtggtaactgacgagaccagctttgtcctagttagcgataagcacaggatgagttttcctgagacagtggacgaaatcctggatgttagcgaagatgaaggagaggagttgattagctttaaagccgaacggagagacagtagggacgtagatgaggagaaagaacttttggattttgtgccaaagttggatcaggtggtggagagccccgcaattccacgtatcccctgcgcaatgcccgaaacagtggttatcagaagtgaggaacaagaacaagcttccaaggaatacgacgaggacagcttaatcccctcaagtcccgcaacagagacctcggacaacatctctccagtagcgtcgccggtacatactggcttcctggtgtcttttatggtggacgccagaggcggtagcatgcgaggcagccggcataatgggctgcgggtggttataccacctagaacttgcgccgctccaacaagaattacatgccgcctggtgaaaccgcagaagctgagcactcctcccccgcttgccgaagaagagggtctcgctagcagaatcatcgcactgggacccacaggagctcaattcttatcacctgtgatcgtggagatcccccattttgcatcacacggacgtggcgatagagagctggttgtgcttaggtcagagaacggcagtgtctggaaagaacacaggtcccggtacggggagtcctacttggaccagatcctgaacggaatggacgaggagcttggttccttagaggaattggaaaaaaaacgcgtctgtcgaatcatcaccaccgattttcctctttatttcgtgataatgtctcgcctctgtcaggactatgacacaataggacctgagggggggtcactgaagagcaagttggttcccttagtgcaggcaacgtttccggaaaatgcggtaaccaagcgggtgaaattggcactgcaggctcaacccgtgccagacgaactcgtgactaagcttttgggaaatcaagcaaccttttcaccaattgtgacagtagagccaagacgcaggaagtttcataggccaatagggttgcgcattccccttcccccaagttggactgacaatcccagggactccggcgagggtgatactacaagcctgcggctgctgtgcagcgtcatcggcggaaccgaccaagcccagtgggaggacatcaccggaaccaccaagttagtttacgccaacgaatgcgctaactttacgacgaatgtatcagcgcggttttggctgagcgactgtccgcggacagctgaggccgtgaactttgcaacactgctgtacaaggaacttacagccgtcccctacatggcgaaatttgtaatcttcgctaagatgaatgatccccgcgaaggcagactacggtgctattgtatgacagatgacaaagtggacaagaccttggaacagcacgagaacttcgtggaagttgccagaagtcgcgatattgaggttctggaggggatgtccctgttcgccgaattgagcgggaacctggtaccagtgaaaaaggccgcccaacagcgatcctttcacttccaatcatttcgggagaacaggctggcgatgccagtcaaggtaagggactcatcccgcgagcccggcggttccctgagctttctgcggaaagcaatgaagtatgaagacacccaacatatcctttgtcacttgaacatcacaatgcccccctgcgctaaaggaagcggggccgaggaccgcaggcggacacccacccctttggcactgaggtactcaatcctgtctgagtcaactcccggttctctgtctggcaccgagcaggccgaaatgaaaatggccgtaatttctgaacatctaggccttagctgggccgaacttgcgcgcgagctgcagttctctgtagaggatattaatcggatccgggtggaaaaccccaactctctgttggagcaaagcgtagcactgctgaatctgtgggtgattagggaagggcaaaacgctaacatggagaacttatatacagcattgcagagcattgatcggggcgagatcgtaaatatgttggagggctctggacggcaatcccgaaatcttaagcctgaccgacgccatacagaccgcgactatagcctttccccaagccaaatgaatggtatctcgaccaataatccatag

SEQ ID NO: 204611 - DNA, 5421 bp, Artificial Sequence
  derived and/or modified sequence
atgccctacagcgtgggcttccgggaggccgacgccgccaccagcttcctgcgcgcagcgaggtccggaaacctggataaggcactggaccacctccgcaatggggtcgatatcaatacatgcaaccagaacggactgaacggactgcacctggcctccaaagagggtcacgtgaaaatggtggtggagttactgcataaagaaatcattctggagacaactacaaagaaaggaaataccgctctacacatcgctgccctggccggccaagatgaagttgtgcgcgagctcgttaactacggggccaacgttaacgctcagtctcaaaaaggctttactcctctatatatggccgcacaggaaaatcatctcgaggtggtcaagttcctccttgaaaacggggccaatcagaatgtggccacagaagacgggtttacaccactcgcggttgctttacagcagggtcacgaaaacgtagtagcccaccttatcaattatggcacaaaaggcaaagttcgcctgcccgccctgcacatagccgccaggaatgacgacactcgtacggccgcagtgctgttacagaacgatcccaatcctgacgtgctgagtaaaaccggattcactcccctgcacatcgccgcacactatgaaaaccttaacgtggcacagctgctgcttaatcggggcgccagtgtcaatttcacccctcagaacggtataactcctctgcatatcgccagccggcgcggtaacgtcattatggtcagacttctgctggaccggggggcacagattgagacaaaaacaaaggacgagctgacaccattgcactgcgctgctaggaatggacacgtccgcataagtgaaatactcctggatcacggagccccgattcaagccaagaccaaaaatggcttatcacccatccacatggctgctcagggcgatcatctggattgcgtccggcttctcctgcagtatgatgccgaaatcgatgatattacactggatcatctcacacctctccatgtcgccgctcactgcggccatcatagggttgccaaggtgctcctggacaaaggcgctaagccaaacagtagagccctgaacggtttcactccactacacatcgcttgtaagaaaaaccatgtccgagtcatggagttgttgttgaagactggagcatctattgatgccgtaacagaaagcggacttacgcccctccatgtggcaagcttcatgggacatctgccgattgtgaagaatctgcttcagcggggagcctcaccaaatgtctccaacgtgaaagtcgaaacccccctgcatatggcagccagagccggtcataccgaggttgcaaagtatcttttgcagaacaaagccaaggtgaacgcaaaagctaaagacgaccagacaccactgcattgtgcagccaggatcggccatactaacatggtgaagcttttgctggagaacaatgctaatcctaacctggctacgaccgcagggcacacacctctacacattgcagcaagagagggacatgtggagacggtgctggcattacttgagaaggaagcctctcaggcctgtatgaccaagaaaggcttcactcctctccacgtggccgccaagtatggcaaagttagagtggcggagctccttctcgagcgcgatgcccacccaaacgcagccgggaaaaacgggctgacgccactgcacgtggcagtgcaccataacaatctggacatcgtcaagctcttactcccacggggggggtctcctcactccccagcctggaatggatatacacctttacatattgccgcaaagcagaatcaagtggaggtggcacgctctcttctccagtatggaggctcagccaatgccgagtccgttcagggggttacacctttgcacctggcagcccaggaaggacacgccgaaatggttgcgctactactgtctaaacaagcaaatggtaatttaggaaataagtcgggcttgaccccactgcatctcgtcgcacaagagggccacgtgccggtagctgatgttctcatcaaacatggtgtcatggtcgacgccaccaccagaatggggtacacccccctccatgtcgcaagccattatggcaacatcaagcttgtgaagtttctactgcagcatcaagcagatgtcaatgccaaaaccaagctgggctactctccattacaccaggctgcgcagcaaggacatacagacatcgtcaccctgctgttgaagaatggagctagccccaatgaagtctctagtgacggcactacccccctcgccatagctaaacgcttgggctacattagcgtcaccgatgttctgaaagtggttacagatgaaaccagcttcgttctggtgtccgataagcataggatgtctttccccgagactgtggacgagatcttggacgtttcagaagatgaaggtgaagagcttatttctttcaaagcagagcggcgggacagtcgggacgtcgacgaggagaaggagttacttgacttcgtgccgaaactggatcaggtggtggaaagtcccgcgattccccggatcccttgcgctatgcccgagaccgtcgtgattcgaagcgaggagcaggaacaagcgagcaaagaatacgacgaggactccctgatcccatcgtctcctgccacagagacgtcggacaacattagtccagttgcatcccctgttcacactggcttcctggtgagtttcatggtggatgctagaggcgggagtatgagaggtagccggcataacgggcttcgagtagtgatcccgccaagaacctgtgccgccccaacccgcattacctgtcgcctggtgaagcctcagaagctctccacgccgccgccattggccgaggaggaggggctggcctcaagaataatagcactcgggccaactggagcccagtttctgagtccggtgatcgtggagatcccacacttcgcctctcatggccgcggtgatcgagaactggtagtgctgaggtctgagaacggctctgtatggaaagagcaccgcagccggtacggcgagtcataccttgaccaaattctgaatggaatggatgaggaattgggctcgttggaggaactagagaagaagcgtgtatgccgcattatcacaacggactttcctctctatttcgtcattatgtccaggttgtgccaggattacgacaccatcggacccgaggggggcagcctgaaaagtaagttggtcccattggtccaggccacattccctgaaaacgccgttactaaaagagtaaaactcgctttgcaggcccagcctgtgcccgacgaattagtgaccaaactgctcgggaaccaggccaccttctccccaattgtgacggtagagcctcgtaggagaaaatttcacagacccattggtcttagaattcccctgccccccagctggacggacaatcccagagattcaggcgaaggcgacaccacaagtctccggcttctgtgctccgtgatcggcgggaccgatcaggcccagtgggaggacattaccggaacgaccaagctcgtgtacgcgaatgagtgtgcgaacttcactacaaatgtctctgccaggttttggctgtccgactgtccacgcaccgctgaagccgtcaactttgccacgctgttgtacaaagagcttaccgcagtgccttacatggcgaaattcgtgatttttgccaaaatgaacgacccccgtgaaggtagactcaggtgctactgtatgacagatgataaagtggacaagaccctggaacagcatgaaaactttgtcgaggtcgcgcgatcccgggatatagaagtgctggagggcatgtcactgttcgctgagttatcggggaatctcgttcccgtgaaaaaggctgcccaacagcggtcctttcactttcagtcttttagagagaatcggctcgccatgccggttaaagtgcgggacagttcccgggagccgggcggtagtttgagctttttgcggaaagctatgaaatatgaagatactcaacacatcctttgtcacctgaacatcacaatgccgccatgcgcaaaggggagcggcgcagaagatagacggaggacccccacccctctggcactcaggtattcaattctgagtgagtccaccccagggtcactgtctggaaccgaacaggctgaaatgaaaatggccgtgatcagcgagcatctaggactgtcttgggccgaactggctcgagaattgcagttcagcgtcgaagatattaataggatccgcgtggaaaatccgaactctctgcttgagcaatccgtggcactcctcaatctctgggtgatccgcgaagggcaaaatgccaacatggagaatctatatactgcccttcagtccattgatcgtggagaaatcgtcaacatgttagaaggcagcgggagacagagccgcaacttgaagcccgacagacgtcataccgatcgcgattattcgctctctcctagtcagatgaatgggtactccagcctgcaggatgagttgctgagtccggccagcttgggctgcgcactgtcaagtcctctgcgtgcagaccaatactggaacgaggtcgctgtgctcgacgcaattcccctcgccgctaccgagcatgataccatgctagagatgagcgatatgcaggtgtggtctgccggcctaacccccagcctagtcaccgccgaggatagcagcctggaatgcagtaaagcagaggactctgatgccaccgggcacgaatggaaactggagggagccctttcagaagaaccacgaggcccagagttagggtccctggagctagtcgaagacgacacagtggatagtgacgcgacaaacgggctgattgaccttcttgaacaggaggagggtcaacggtcagaggagaagttacctggcagtaaaaggcaagatgacgctacaggcgctggccaagactctgaaaatgaagtgagcctcgtgagtggacaccagaggggtcaggcccgtatcacacatagcccaaccgtttcacaagttaccgagcgatcccaagataggctacaggattgggacgcggacgggtcaatcgtctcctacctacaggacgcagcccagggatcctggcaagaggaggtcactcagggaccccactcattccagggcacatcaaccatgactgagggtttagagccgggtggcagtcaggaatacgagaaggtgctcgtctcagtgtccgaacatacatggactgagcagcctgaagccgaatcctcccaggcggaccgcgacagacggcagcagggacaggaggaacaggtccaggaggctaagaacactttcactcaagtcgtccaagatcacaccagtactccgaatccctag

SEQ ID NO: 204612 - DNA, 8237 bp, Artificial Sequence
  derived and/or modified sequence
agaggctgcggtgagtccgccagccccagctgctcctcctcaagcccccaaggcccttcggcgggcccctgctgaaagaccggcatgccctattctgtgggcttccgcgaagccgatgctgctaccagctttctgagagcagcaagatcaggtaacttggacaaagctttggatcacctgcggaatggggtagatattaacacctgtaaccagaatgggttgaatggcttgcatctggcttctaaggaaggccatgtgaaaatggtggttgaacttctgcacaaagaaatcattctagaaacgacaaccaagaaggggaacacggccctgcacatcgctgctctagccgggcaggatgaggtggtccgggagcttgtcaactatggagccaacgtcaacgcccagtcacagaaaggttttacacccctgtacatggcagcacaagagaaccacttggaagtggttaagtttttactggaaaatggagctaaccagaatgtagccacagaagacggcttcacgcctctggcggtagccctgcagcagggccatgagaacgtcgtcgcgcacctcatcaactacggcaccaaggggaaggtgcgcctcccggccctgcacatcgcggcccgcaacgacgacacgcgcacggctgcggtgctgctgcagaacgaccccaacccggacgtgctttccaagacgggattcacgcccctgcacattgcggctcactacgagaacctcaacgtggcccagttgctcctcaacagaggagccagcgtcaatttcacaccacagaacggcatcacgccactgcacatcgcctcccgcaggggcaacgtgatcatggtgcggctgctgctggatcggggagcccagatagaaaccaagaccaaggacgaattgacacctctccactgtgcagctcgaaatgggcacgtgcgaatctcagagatcctgctggaccacggggcaccaatccaagccaaaaccaagaacggcctgtccccaattcacatggcggctcagggagaccacctcgactgtgtccggctcctgttgcaatacgacgcagagatagacgacatcaccctggaccacctgaccccactccacgtggctgcccactgtggacaccacagggtggctaaggtccttctggataaaggggccaaacccaactccagagccctgaatggctttacccccttacacatcgcctgcaaaaagaaccacgtccgtgtcatggagctgctgctgaagacgggagcctcgatcgacgcggtcaccgagtctggcctgacacctctccacgtggcctccttcatggggcaccttcccatcgtgaagaacctcctgcagcggggggcgtcgcccaacgtctccaacgtgaaagtggagaccccgctacacatggcagccagagccgggcacacggaagtggccaaatatttactccagaacaaagccaaagtcaatgccaaggccaaggatgaccagaccccacttcactgtgcagctcgcatcggccacacaaacatggtgaagctcctgctggaaaataacgccaaccccaacctggccaccaccgccgggcacacccccctgcacattgcagcccgtgagggccatgtggaaacagtcctggcccttctggaaaaggaagcatcccaggcctgcatgaccaagaaaggatttacccctctgcacgtggcggccaagtacgggaaggtgcgggtggcagagctgctgctggagcgggacgcacacccgaatgctgccggaaaaaatggcctgacccccctgcacgtggccgtccatcacaacaacctggacatcgtcaagctgctgcttccccggggcggctccccgcacagccctgcctggaatggctacacccctttgcacatcgctgccaagcagaaccaggtggaggtggcccgtagtctgctgcagtatgggggctcagcaaacgccgagtcggtgcaaggtgtgacgccccttcacctggccgcccaggagggccacgcagagatggtggctctgctgctctcgaaacaagccaatggcaacctggggaacaagagcggactcactcccctccatctggtagcacaagaaggccacgttccagtggcagatgtgctgatcaaacacggcgtcatggtggacgccaccacccggatgggctacactcccctccatgtggccagtcactatggaaacatcaagctggtgaagtttctgctgcagcaccaggcagatgtcaatgccaagaccaagctaggatacagccccctgcaccaggcagcccagcagggacacacagacatcgtgactctgcttctgaaaaacggtgcttccccaaacgaggtcagctcggatggaaccacacctctggccatagccaagcgcttgggctacatttctgtcaccgacgtgctcaaggtcgtcacggatgaaaccagtttcgtgttagtcagtgataagcatcgaatgagtttccctgagacagttgatgagatcctggatgtctcggaagatgaaggggaagaactcatcagcttcaaggctgagaggcgggattccagggatgttgatgaagagaaggagctgctggattttgtgccgaagctagaccaagtggtggaatctccagccatccccaggattccctgtgccatgcctgagacagtggtgatcaggtcagaagagcaggagcaggcatctaaagagtatgatgaggactccctcatccccagcagcccggccaccgagacctcagacaacatcagcccggtggccagcccggtgcatacagggtttctggtgagcttcatggttgacgcccggggtggttccatgagaggaagtcgccacaacggcctgcgagtggtgatcccgccacggacgtgcgcagcgcccacccgcatcacctgccgcctggtcaagccccagaagctcagcacgccgcccccactggccgaggaggagggcctggccagcaggatcatagcactggggcccacgggggcacagttcctgagccctgtaatcgtggagatcccgcactttgcctcccatggccgtggagaccgcgagctcgtggttctgaggagcgaaaacggctccgtgtggaaggagcacaggagccgctatggagagagctacctggatcagatcctcaacgggatggacgaagagctggggagcctggaggagctagagaagaagagggtgtgccgaatcatcaccaccgacttcccgctgtacttcgtgatcatgtcacggctctgccaggactacgacaccatcggtcccgaagggggctccctgaagagcaagctggtgcccctggtacaggcaacgttcccggagaatgccgtcaccaagagagtgaagctggctctgcaggcccagcctgtcccggatgagcttgtcactaagctcctgggcaaccaggccacattcagccccattgtcaccgtggagccccggcgccggaagttccaccgccccattgggcttcggatcccactacctccttcctggaccgacaacccgagggacagcggggagggagacaccaccagcctgcgcctgctttgcagcgtcattggaggaacagaccaagcccagtgggaagacataacaggaaccaccaaacttgtatatgccaacgagtgcgccaacttcaccaccaatgtctctgccaggttttggctgtcggactgtcctcggactgctgaggctgtgaactttgccaccctgctgtacaaagagctcactgcagtgccctacatggccaaattcgtcatctttgccaagatgaatgacccccgagaggggcgcctgcgctgctactgcatgacagatgataaagtggacaagaccctggagcagcatgagaacttcgtggaggtggcccggagcagggacatagaggtgttggaaggaatgtccctgtttgcagaactctctgggaacctggtgcctgtgaagaaagctgcccagcagcggagcttccacttccagtcatttcgggagaaccgtctggccatgcctgtaaaggtgagggacagcagtcgagagccgggagggtccctgtcgtttctgcgcaaggcgatgaagtacgaggacacccagcacattctctgccacctgaacatcaccatgcccccctgcgccaagggaagtggagccgaagataggagaaggaccccgacgcccctggccctgcgatacagcattctcagtgagtccacaccaggttctctcagtgggacagagcaggcagagatgaagatggctgttatctcagagcacctcggtctcagctgggcagagttggcccgggagctgcagttcagtgtggaagacatcaacaggatccgagtggaaaatcccaactccctgttggagcagagtgtggccttgctgaacctctgggtcatccgtgaaggccaaaacgcaaacatggagaatctgtacacagccctgcagagcattgaccgtggcgagatcgtgaacatgctggagggttccggccgacagagccgcaacttgaagccagacaggcggcacaccgaccgcgactactcgctgtcaccctcccagatgaatggttactcctcactgcaggacgagctgctgtcccctgcctccctgggctgtgcactttcctctccgctacgtgcagaccagtactggaatgaggtggccgtcctagacgccatccccttggcggccacggagcatgacaccatgctggagatgtctgacatgcaggtgtggtctgcgggcctcacgccttctctggtcactgctgaggactcctctctggagtgtagcaaggctgaggactctgatgccacaggtcacgagtggaagttggagggggcactctcagaggaaccgcggggccccgagttgggctctctggaacttgtggaggacgacacagtggattcagatgccacaaatggccttatcgatttgcttgaacaggaggaaggtcagaggtcagaagagaagctgccaggttctaagaggcaggatgacgcgacaggtgcagggcaggactcagagaatgaagtgtctcttgtttcaggccatcagagggggcaagcccgaatcacacattcccccaccgtgagtcaggtgacggagaggagtcaggacagactgcaggactgggatgcagacggctcgattgtctcatacctgcaagatgctgcacaaggttcctggcaagaggaggtcacgcaaggtccacactcattccagggaacaagtaccatgactgaagggctagagcccggtggatctcaggagtacgagaaggtcctggtgtctgtaagtgagcacacgtggacagaacagcccgaggctgagagctcccaggccgacagggaccggaggcagcaaggccaagaagagcaggtgcaggaggccaagaacaccttcacccaagtggtgcaggggaatgagtttcagaatattccaggggagcaggtgacagaggagcaattcacggatgagcagggcaacattgtcaccaagaagatcattcgcaaggtggttcgacagatagacttgtccagcgccgatgccgcccaggagcacgaggaggtgactgtagaggggcccctggaggatcccagtgagctggaggtcgatattgattactttatgaaacactccaaggatcacacctcgacacccaacccctgaaccccacacactctgccatgcacacaggaggagagctggacctgagggccaccgcagcggtgcacacattcctctgggctgacggcatgacctctgtaagggactcctgctagtcccctcttggcatgaatgactgactgtagacgcatgacctccaggcttcaatcctgcctcttgcaatgacagctgatctgtcggaaccaggacacaaaagcagcaagaagcggggagagagagggatagaaaacaagcgcaggagagcctgcgaacgcaaaagtgaatgagggctttttgtggctggggatgggttttggttttggggttttttttttaaattgttttgacttcgtacagggtactttttcccaacctcatctgtcagaaatccatgtgggcttcctggaaagaaaaaaaaaaaaaagaaaactaggcatgaaatcagtttaacaccttaatcttaagccatgtcctcatctgcccaccctccccaacccacatacctccattccacttgtgacaccccctcgactccctggtgacgctcctcccagatcgctctacatgacattcaggacacacacacacacacacacacaccactcgcctccactgaatctacacacagattttactgtgacttctgaagctgtatagactctgctgtggataaattggaattttttatgttgtctctctctctgccaatttcaatacgaatcatcttccaatggaaaatcattaccttgaagagtgcattcggggttccttgtgttagggacttaagaatctgaggcgaggacccccaggcttacctgtaggactcaaagggagccaggaccccatctgaaagggtctcctctctcagttgggggacaggccggtggctgacccaggattgcaccagcatgtccatagagaagaggttttctatgtcttcaagcactatatcatagtccgtgttcaaagtgtaaactgtacagtaatcagccttgtgtatatgaaaaacaataaatactatgcaaaccaatagaaacatttagcagtacgtacagagcctgacagcgcagctcctgaggacttctgcggctgcaggagaaggagctgtggcctgtctttcagtgaaagaggaaggaaaggagtagggctagtgaatgtatctgccaggtcttagaagtcaggaccacccagggtctcccagagtgaacttggtgctctaagtccaggcagcctgcaggctggggaccctgggtgcaggtgccaggctcgaggctgttccctgtcctgcctcagtgcctcccctctgcccagcccctgtggcctcttggagaggcgagccagggggctccccggaccgcatggccggtgagagtagagtcggaggcggagagcctggacgcccagaggccggggccaggctctgggtcaaggcaggaaggagacagacagctggcagttcctcgcctcggtgccatcagggaggagccttaagttccactagagcctccggcccagggaggccagaatcagcacaatcccggccccgccctcgcggcgggcgcccccagggccaggagagagagacagggctggctcctctcgcccctggagccgcggtgtggacggcccggccccgtccgccccgccgctctgcgggagtgtcctcgggacacacttaaaccttccaagtagcacagaagccccctccacgtcagaggccccctggccgcggggcctgtgagcggagaggggccctgcttcccacacaaatccgccccggtgcacccccggccaggcaggccccggggcggcctaggcgccttgtcggccgggggtggggctgcttttgcttcctttagaggggcgggcagggagaggaagctctagctccgggcctgagtttccccgaggctgcgtcggaggagctgcagggcgagcccggacggctgccgtctccgccagaggccaccccggcccggcctccagggcgcagaggcgcccccctccatcctcccccatcccgggggccacggcaggggggccgcacagcgcggctgggaccgattcggtgacggcccaaggaagctgggctcagggctcgcctctcccgcctcgatcctgcaccttcctctcccaggtcgctgctgcagccaacccagtagcccccttagcgcccccgcggaccccgcagctccagactccgctttggcacctctgctccggctggcatggctgcacgctccggctgctagtaggagccgttaggggaggagtttggggtctccacacgatgcctagagaatgctgcagtctgcacattagacgctttttagaagttttgaaattaccttgatttttttaattgttatgaaaatggatcttttcttgactctcccacatgctctgttatgggagagaatcccctaccctactctgatgtatagaccattctcccttcaccagccgaaccaatgtcaaaattaataaagaaatggactaatggcacaggg

SEQ ID NO: 204613 - DNA, 4641 bp, Artificial Sequence
  derived and/or modified sequence
agaggctgcggtgagtccgccagccccagctgctcctcctcaagcccccaaggcccttcggcgggcccctgctgaaagaccggcatgccctattctgtgggcttccgcgaagccgatgctgctaccagctttctgagagcagcaagatcaggtaacttggacaaagctttggatcacctgcggaatggggtagatattaacacctgtaaccagaatgggttgaatggcttgcatctggcttctaaggaaggccatgtgaaaatggtggttgaacttctgcacaaagaaatcattctagaaacgacaaccaagaaggggaacacggccctgcacatcgctgctctagccgggcaggatgaggtggtccgggagcttgtcaactatggagccaacgtcaacgcccagtcacagaaaggttttacacccctgtacatggcagcacaagagaaccacttggaagtggttaagtttttactggaaaatggagctaaccagaatgtagccacagaagacggcttcacgcctctggcggtagccctgcagcagggccatgagaacgtcgtcgcgcacctcatcaactacggcaccaaggggaaggtgcgcctcccggccctgcacatcgcggcccgcaacgacgacacgcgcacggctgcggtgctgctgcagaacgaccccaacccggacgtgctttccaagacgggattcacgcccctgcacattgcggctcactacgagaacctcaacgtggcccagttgctcctcaacagaggagccagcgtcaatttcacaccacagaacggcatcacgccactgcacatcgcctcccgcaggggcaacgtgatcatggtgcggctgctgctggatcggggagcccagatagaaaccaagaccaaggacgaattgacacctctccactgtgcagctcgaaatgggcacgtgcgaatctcagagatcctgctggaccacggggcaccaatccaagccaaaaccaagaacggcctgtccccaattcacatggcggctcagggagaccacctcgactgtgtccggctcctgttgcaatacgacgcagagatagacgacatcaccctggaccacctgaccccactccacgtggctgcccactgtggacaccacagggtggctaaggtccttctggataaaggggccaaacccaactccagagccctgaatggctttacccccttacacatcgcctgcaaaaagaaccacgtccgtgtcatggagctgctgctgaagacgggagcctcgatcgacgcggtcaccgagtctggcctgacacctctccacgtggcctccttcatggggcaccttcccatcgtgaagaacctcctgcagcggggggcgtcgcccaacgtctccaacgtgaaagtggagaccccgctacacatggcagccagagccgggcacacggaagtggccaaatatttactccagaacaaagccaaagtcaatgccaaggccaaggatgaccagaccccacttcactgtgcagctcgcatcggccacacaaacatggtgaagctcctgctggaaaataacgccaaccccaacctggccaccaccgccgggcacacccccctgcacattgcagcccgtgagggccatgtggaaacagtcctggcccttctggaaaaggaagcatcccaggcctgcatgaccaagaaaggatttacccctctgcacgtggcggccaagtacgggaaggtgcgggtggcagagctgctgctggagcgggacgcacacccgaatgctgccggaaaaaatggcctgacccccctgcacgtggccgtccatcacaacaacctggacatcgtcaagctgctgcttccccggggcggctccccgcacagccctgcctggaatggctacacccctttgcacatcgctgccaagcagaaccaggtggaggtggcccgtagtctgctgcagtatgggggctcagcaaacgccgagtcggtgcaaggtgtgacgccccttcacctggccgcccaggagggccacgcagagatggtggctctgctgctctcgaaacaagccaatggcaacctggggaacaagagcggactcactcccctccatctggtagcacaagaaggccacgttccagtggcagatgtgctgatcaaacacggcgtcatggtggacgccaccacccggatgggctacactcccctccatgtggccagtcactatggaaacatcaagctggtgaagtttctgctgcagcaccaggcagatgtcaatgccaagaccaagctaggatacagccccctgcaccaggcagcccagcagggacacacagacatcgtgactctgcttctgaaaaacggtgcttccccaaacgaggtcagctcggatggaaccacacctctggccatagccaagcgcttgggctacatttctgtcaccgacgtgctcaaggtcgtcacggatgaaaccagtttcgtgttagtcagtgataagcatcgaatgagtttccctgagacagttgatgagatcctggatgtctcggaagatgaaggggaagaactcatcagcttcaaggctgagaggcgggattccagggatgttgatgaagagaaggagctgctggattttgtgccgaagctagaccaagtggtggaatctccagccatccccaggattccctgtgccatgcctgagacagtggtgatcaggtcagaagagcaggagcaggcatctaaagagtatgatgaggactccctcatccccagcagcccggccaccgagacctcagacaacatcagcccggtggccagcccggtgcatacagggtttctggtgagcttcatggttgacgcccggggtggttccatgagaggaagtcgccacaacggcctgcgagtggtgatcccgccacggacgtgcgcagcgcccacccgcatcacctgccgcctggtcaagccccagaagctcagcacgccgcccccactggccgaggaggagggcctggccagcaggatcatagcactggggcccacgggggcacagttcctgagccctgtaatcgtggagatcccgcactttgcctcccatggccgtggagaccgcgagctcgtggttctgaggagcgaaaacggctccgtgtggaaggagcacaggagccgctatggagagagctacctggatcagatcctcaacgggatggacgaagagctggggagcctggaggagctagagaagaagagggtgtgccgaatcatcaccaccgacttcccgctgtacttcgtgatcatgtcacggctctgccaggactacgacaccatcggtcccgaagggggctccctgaagagcaagctggtgcccctggtacaggcaacgttcccggagaatgccgtcaccaagagagtgaagctggctctgcaggcccagcctgtcccggatgagcttgtcactaagctcctgggcaaccaggccacattcagccccattgtcaccgtggagccccggcgccggaagttccaccgccccattgggcttcggatcccactacctccttcctggaccgacaacccgagggacagcggggagggagacaccaccagcctgcgcctgctttgcagcgtcattggaggaacagaccaagcccagtgggaagacataacaggaaccaccaaacttgtatatgccaacgagtgcgccaacttcaccaccaatgtctctgccaggttttggctgtcggactgtcctcggactgctgaggctgtgaactttgccaccctgctgtacaaagagctcactgcagtgccctacatggccaaattcgtcatctttgccaagatgaatgacccccgagaggggcgcctgcgctgctactgcatgacagatgataaagtggacaagaccctggagcagcatgagaacttcgtggaggtggcccggagcagggacatagaggtgttggaaggaatgtccctgtttgcagaactctctgggaacctggtgcctgtgaagaaagctgcccagcagcggagcttccacttccagtcatttcgggagaaccgtctggccatgcctgtaaaggtgagggacagcagtcgagagccgggagggtccctgtcgtttctgcgcaaggcgatgaagtacgaggacacccagcacattctctgccacctgaacatcaccatgcccccctgcgccaagggaagtggagccgaagataggagaaggaccccgacgcccctggccctgcgatacagcattctcagtgagtccacaccaggttctctcagtgggacagagcaggcagagatgaagatggctgttatctcagagcacctcggtctcagctgggcagagttggcccgggagctgcagttcagtgtggaagacatcaacaggatccgagtggaaaatcccaactccctgttggagcagagtgtggccttgctgaacctctgggtcatccgtgaaggccaaaacgcaaacatggagaatctgtacacagccctgcagagcattgaccgtggcgagatcgtgaacatgctggagggttccggccgacagagccgcaacttgaagccagacaggcggcacaccgaccgcgactactcgctgtcaccctcccagatgaatggcatcagcaccaataacccc

SEQ ID NO: 204614 - DNA, 8090 bp, Artificial Sequence
  derived and/or modified sequence
agaggctgcggtgagtccgccagccccagctgctcctcctcaagcccccaaggcccttcggcgggcccctgctgaaagaccggcatgccctattctgtgggcttccgcgaagccgatgctgctaccagctttctgagagcagcaagatcaggtaacttggacaaagctttggatcacctgcggaatggggtagatattaacacctgtaaccagaatgggttgaatggcttgcatctggcttctaaggaaggccatgtgaaaatggtggttgaacttctgcacaaagaaatcattctagaaacgacaaccaagaaggggaacacggccctgcacatcgctgctctagccgggcaggatgaggtggtccgggagcttgtcaactatggagccaacgtcaacgcccagtcacagaaaggttttacacccctgtacatggcagcacaagagaaccacttggaagtggttaagtttttactggaaaatggagctaaccagaatgtagccacagaagacggcttcacgcctctggcggtagccctgcagcagggccatgagaacgtcgtcgcgcacctcatcaactacggcaccaaggggaaggtgcgcctcccggccctgcacatcgcggcccgcaacgacgacacgcgcacggctgcggtgctgctgcagaacgaccccaacccggacgtgctttccaagacgggattcacgcccctgcacattgcggctcactacgagaacctcaacgtggcccagttgctcctcaacagaggagccagcgtcaatttcacaccacagaacggcatcacgccactgcacatcgcctcccgcaggggcaacgtgatcatggtgcggctgctgctggatcggggagcccagatagaaaccaagaccaaggacgaattgacacctctccactgtgcagctcgaaatgggcacgtgcgaatctcagagatcctgctggaccacggggcaccaatccaagccaaaaccaagaacggcctgtccccaattcacatggcggctcagggagaccacctcgactgtgtccggctcctgttgcaatacgacgcagagatagacgacatcaccctggaccacctgaccccactccacgtggctgcccactgtggacaccacagggtggctaaggtccttctggataaaggggccaaacccaactccagagccctgaatggctttacccccttacacatcgcctgcaaaaagaaccacgtccgtgtcatggagctgctgctgaagacgggagcctcgatcgacgcggtcaccgagtctggcctgacacctctccacgtggcctccttcatggggcaccttcccatcgtgaagaacctcctgcagcggggggcgtcgcccaacgtctccaacgtgaaagtggagaccccgctacacatggcagccagagccgggcacacggaagtggccaaatatttactccagaacaaagccaaagtcaatgccaaggccaaggatgaccagaccccacttcactgtgcagctcgcatcggccacacaaacatggtgaagctcctgctggaaaataacgccaaccccaacctggccaccaccgccgggcacacccccctgcacattgcagcccgtgagggccatgtggaaacagtcctggcccttctggaaaaggaagcatcccaggcctgcatgaccaagaaaggatttacccctctgcacgtggcggccaagtacgggaaggtgcgggtggcagagctgctgctggagcgggacgcacacccgaatgctgccggaaaaaatggcctgacccccctgcacgtggccgtccatcacaacaacctggacatcgtcaagctgctgcttccccggggcggctccccgcacagccctgcctggaatggctacacccctttgcacatcgctgccaagcagaaccaggtggaggtggcccgtagtctgctgcagtatgggggctcagcaaacgccgagtcggtgcaaggtgtgacgccccttcacctggccgcccaggagggccacgcagagatggtggctctgctgctctcgaaacaagccaatggcaacctggggaacaagagcggactcactcccctccatctggtagcacaagaaggccacgttccagtggcagatgtgctgatcaaacacggcgtcatggtggacgccaccacccggatgggctacactcccctccatgtggccagtcactatggaaacatcaagctggtgaagtttctgctgcagcaccaggcagatgtcaatgccaagaccaagctaggatacagccccctgcaccaggcagcccagcagggacacacagacatcgtgactctgcttctgaaaaacggtgcttccccaaacgaggtcagctcggatggaaccacacctctggccatagccaagcgcttgggctacatttctgtcaccgacgtgctcaaggtcgtcacggatgaaaccagtttcgtgttagtcagtgataagcatcgaatgagtttccctgagacagttgatgagatcctggatgtctcggaagatgaaggggaagaactcatcagcttcaaggctgagaggcgggattccagggatgttgatgaagagaaggagctgctggattttgtgccgaagctagaccaagtggtggaatctccagccatccccaggattccctgtgccatgcctgagacagtggtgatcaggtcagaagagcaggagcaggcatctaaagagtatgatgaggactccctcatccccagcagcccggccaccgagacctcagacaacatcagcccggtggccagcccggtgcatacagggtttctggtgagcttcatggttgacgcccggggtggttccatgagaggaagtcgccacaacggcctgcgagtggtgatcccgccacggacgtgcgcagcgcccacccgcatcacctgccgcctggtcaagccccagaagctcagcacgccgcccccactggccgaggaggagggcctggccagcaggatcatagcactggggcccacgggggcacagttcctgagccctgtaatcgtggagatcccgcactttgcctcccatggccgtggagaccgcgagctcgtggttctgaggagcgaaaacggctccgtgtggaaggagcacaggagccgctatggagagagctacctggatcagatcctcaacgggatggacgaagagctggggagcctggaggagctagagaagaagagggtgtgccgaatcatcaccaccgacttcccgctgtacttcgtgatcatgtcacggctctgccaggactacgacaccatcggtcccgaagggggctccctgaagagcaagctggtgcccctggtacaggcaacgttcccggagaatgccgtcaccaagagagtgaagctggctctgcaggcccagcctgtcccggatgagcttgtcactaagctcctgggcaaccaggccacattcagccccattgtcaccgtggagccccggcgccggaagttccaccgccccattgggcttcggatcccactacctccttcctggaccgacaacccgagggacagcggggagggagacaccaccagcctgcgcctgctttgcagcgtcattggaggaacagaccaagcccagtgggaagacataacaggaaccaccaaacttgtatatgccaacgagtgcgccaacttcaccaccaatgtctctgccaggttttggctgtcggactgtcctcggactgctgaggctgtgaactttgccaccctgctgtacaaagagctcactgcagtgccctacatggccaaattcgtcatctttgccaagatgaatgacccccgagaggggcgcctgcgctgctactgcatgacagatgataaagtggacaagaccctggagcagcatgagaacttcgtggaggtggcccggagcagggacatagaggtgttggaaggaatgtccctgtttgcagaactctctgggaacctggtgcctgtgaagaaagctgcccagcagcggagcttccacttccagtcatttcgggagaaccgtctggccatgcctgtaaaggtgagggacagcagtcgagagccgggagggtccctgtcgtttctgcgcaaggcgatgaagtacgaggacacccagcacattctctgccacctgaacatcaccatgcccccctgcgccaagggaagtggagccgaagataggagaaggaccccgacgcccctggccctgcgatacagcattctcagtgagtccacaccaggttctctcagtgggacagagcaggcagagatgaagatggctgttatctcagagcacctcggtctcagctgggcagagttggcccgggagctgcagttcagtgtggaagacatcaacaggatccgagtggaaaatcccaactccctgttggagcagagtgtggccttgctgaacctctgggtcatccgtgaaggccaaaacgcaaacatggagaatctgtacacagccctgcagagcattgaccgtggcgagatcgtgaacatgctggagggttccggccgacagagccgcaacttgaagccagacaggcggcacaccgaccgcgactactcgctgtcaccctcccagatgaatggttactcctcactgcaggacgagctgctgtcccctgcctccctgggctgtgcactttcctctccgctacgtgcagaccagtactggaatgaggtggccgtcctagacgccatccccttggcggccacggagcatgacaccatgctggagatgtctgacatgcaggtgtggtctgcgggcctcacgccttctctggtcactgctgaggactcctctctggagtgtagcaaggctgaggactctgatgccacaggtcacgagtggaagttggagggggcactctcagaggaaccgcggggccccgagttgggctctctggaacttgtggaggacgacacagtggattcagatgccacaaatggccttatcgatttgcttgaacaggaggaaggtcagaggtcagaagagaagctgccaggttctaagaggcaggatgacgcgacaggtgcagggcaggactcagagaatgaagtgtctcttgtttcaggccatcagagggggcaagcccgaatcacacattcccccaccgtgagtcaggtgacggagaggagtcaggacagactgcaggactgggatgcagacggctcgattgtctcatacctgcaagatgctgcacaaggttcctggcaagaggaggtcacgcaaggtccacactcattccagggaacaagtaccatgactgaagggctagagcccggtggatctcaggagtacgagaaggtcctggtgtctgtaagtgagcacacgtggacagaacagcccgaggctgagagctcccaggccgacagggaccggaggcagcaaggccaagaagagcaggtgcaggaggccaagaacaccttcacccaagtggtgcaggggaatgagtttcagaatattccaggggagcaggtgacagaggagcaattcacggatgagcagggcaacattgtcaccaagaaggatcacacctcgacacccaacccctgaaccccacacactctgccatgcacacaggaggagagctggacctgagggccaccgcagcggtgcacacattcctctgggctgacggcatgacctctgtaagggactcctgctagtcccctcttggcatgaatgactgactgtagacgcatgacctccaggcttcaatcctgcctcttgcaatgacagctgatctgtcggaaccaggacacaaaagcagcaagaagcggggagagagagggatagaaaacaagcgcaggagagcctgcgaacgcaaaagtgaatgagggctttttgtggctggggatgggttttggttttggggttttttttttaaattgttttgacttcgtacagggtactttttcccaacctcatctgtcagaaatccatgtgggcttcctggaaagaaaaaaaaaaaaaagaaaactaggcatgaaatcagtttaacaccttaatcttaagccatgtcctcatctgcccaccctccccaacccacatacctccattccacttgtgacaccccctcgactccctggtgacgctcctcccagatcgctctacatgacattcaggacacacacacacacacacacacaccactcgcctccactgaatctacacacagattttactgtgacttctgaagctgtatagactctgctgtggataaattggaattttttatgttgtctctctctctgccaatttcaatacgaatcatcttccaatggaaaatcattaccttgaagagtgcattcggggttccttgtgttagggacttaagaatctgaggcgaggacccccaggcttacctgtaggactcaaagggagccaggaccccatctgaaagggtctcctctctcagttgggggacaggccggtggctgacccaggattgcaccagcatgtccatagagaagaggttttctatgtcttcaagcactatatcatagtccgtgttcaaagtgtaaactgtacagtaatcagccttgtgtatatgaaaaacaataaatactatgcaaaccaatagaaacatttagcagtacgtacagagcctgacagcgcagctcctgaggacttctgcggctgcaggagaaggagctgtggcctgtctttcagtgaaagaggaaggaaaggagtagggctagtgaatgtatctgccaggtcttagaagtcaggaccacccagggtctcccagagtgaacttggtgctctaagtccaggcagcctgcaggctggggaccctgggtgcaggtgccaggctcgaggctgttccctgtcctgcctcagtgcctcccctctgcccagcccctgtggcctcttggagaggcgagccagggggctccccggaccgcatggccggtgagagtagagtcggaggcggagagcctggacgcccagaggccggggccaggctctgggtcaaggcaggaaggagacagacagctggcagttcctcgcctcggtgccatcagggaggagccttaagttccactagagcctccggcccagggaggccagaatcagcacaatcccggccccgccctcgcggcgggcgcccccagggccaggagagagagacagggctggctcctctcgcccctggagccgcggtgtggacggcccggccccgtccgccccgccgctctgcgggagtgtcctcgggacacacttaaaccttccaagtagcacagaagccccctccacgtcagaggccccctggccgcggggcctgtgagcggagaggggccctgcttcccacacaaatccgccccggtgcacccccggccaggcaggccccggggcggcctaggcgccttgtcggccgggggtggggctgcttttgcttcctttagaggggcgggcagggagaggaagctctagctccgggcctgagtttccccgaggctgcgtcggaggagctgcagggcgagcccggacggctgccgtctccgccagaggccaccccggcccggcctccagggcgcagaggcgcccccctccatcctcccccatcccgggggccacggcaggggggccgcacagcgcggctgggaccgattcggtgacggcccaaggaagctgggctcagggctcgcctctcccgcctcgatcctgcaccttcctctcccaggtcgctgctgcagccaacccagtagcccccttagcgcccccgcggaccccgcagctccagactccgctttggcacctctgctccggctggcatggctgcacgctccggctgctagtaggagccgttaggggaggagtttggggtctccacacgatgcctagagaatgctgcagtctgcacattagacgctttttagaagttttgaaattaccttgatttttttaattgttatgaaaatggatcttttcttgactctcccacatgctctgttatgggagagaatcccctaccctactctgatgtatagaccattctcccttcaccagccgaaccaatgtcaaaattaataaagaaatggactaatggc

SEQ ID NO: 204615 - DNA, 8006 bp, Artificial Sequence
  derived and/or modified sequence
agaggctgcggtgagtccgccagccccagctgctcctcctcaagcccccaaggcccttcggcgggcccctgctgaaagaccggcatgccctattctgtgggcttccgcgaagccgatgctgctaccagctttctgagagcagcaagatcaggtaacttggacaaagctttggatcacctgcggaatggggtagatattaacacctgtaaccagaatgggttgaatggcttgcatctggcttctaaggaaggccatgtgaaaatggtggttgaacttctgcacaaagaaatcattctagaaacgacaaccaagaaggggaacacggccctgcacatcgctgctctagccgggcaggatgaggtggtccgggagcttgtcaactatggagccaacgtcaacgcccagtcacagaaaggttttacacccctgtacatggcagcacaagagaaccacttggaagtggttaagtttttactggaaaatggagctaaccagaatgtagccacagaagacggcttcacgcctctggcggtagccctgcagcagggccatgagaacgtcgtcgcgcacctcatcaactacggcaccaaggggaaggtgcgcctcccggccctgcacatcgcggcccgcaacgacgacacgcgcacggctgcggtgctgctgcagaacgaccccaacccggacgtgctttccaagacgggattcacgcccctgcacattgcggctcactacgagaacctcaacgtggcccagttgctcctcaacagaggagccagcgtcaatttcacaccacagaacggcatcacgccactgcacatcgcctcccgcaggggcaacgtgatcatggtgcggctgctgctggatcggggagcccagatagaaaccaagaccaaggacgaattgacacctctccactgtgcagctcgaaatgggcacgtgcgaatctcagagatcctgctggaccacggggcaccaatccaagccaaaaccaagaacggcctgtccccaattcacatggcggctcagggagaccacctcgactgtgtccggctcctgttgcaatacgacgcagagatagacgacatcaccctggaccacctgaccccactccacgtggctgcccactgtggacaccacagggtggctaaggtccttctggataaaggggccaaacccaactccagagccctgaatggctttacccccttacacatcgcctgcaaaaagaaccacgtccgtgtcatggagctgctgctgaagacgggagcctcgatcgacgcggtcaccgagtctggcctgacacctctccacgtggcctccttcatggggcaccttcccatcgtgaagaacctcctgcagcggggggcgtcgcccaacgtctccaacgtgaaagtggagaccccgctacacatggcagccagagccgggcacacggaagtggccaaatatttactccagaacaaagccaaagtcaatgccaaggccaaggatgaccagaccccacttcactgtgcagctcgcatcggccacacaaacatggtgaagctcctgctggaaaataacgccaaccccaacctggccaccaccgccgggcacacccccctgcacattgcagcccgtgagggccatgtggaaacagtcctggcccttctggaaaaggaagcatcccaggcctgcatgaccaagaaaggatttacccctctgcacgtggcggccaagtacgggaaggtgcgggtggcagagctgctgctggagcgggacgcacacccgaatgctgccggaaaaaatggcctgacccccctgcacgtggccgtccatcacaacaacctggacatcgtcaagctgctgcttccccggggcggctccccgcacagccctgcctggaatggctacacccctttgcacatcgctgccaagcagaaccaggtggaggtggcccgtagtctgctgcagtatgggggctcagcaaacgccgagtcggtgcaaggtgtgacgccccttcacctggccgcccaggagggccacgcagagatggtggctctgctgctctcgaaacaagccaatggcaacctggggaacaagagcggactcactcccctccatctggtagcacaagaaggccacgttccagtggcagatgtgctgatcaaacacggcgtcatggtggacgccaccacccggatgggctacactcccctccatgtggccagtcactatggaaacatcaagctggtgaagtttctgctgcagcaccaggcagatgtcaatgccaagaccaagctaggatacagccccctgcaccaggcagcccagcagggacacacagacatcgtgactctgcttctgaaaaacggtgcttccccaaacgaggtcagctcggatggaaccacacctctggccatagccaagcgcttgggctacatttctgtcaccgacgtgctcaaggtcgtcacggatgaaaccagtttcgtgttagtcagtgataagcatcgaatgagtttccctgagacagttgatgagatcctggatgtctcggaagatgaaggggaagaactcatcagcttcaaggctgagaggcgggattccagggatgttgatgaagagaaggagctgctggattttgtgccgaagctagaccaagtggtggaatctccagccatccccaggattccctgtgccatgcctgagacagtggtgatcaggtcagaagagcaggagcaggcatctaaagagtatgatgaggactccctcatccccagcagcccggccaccgagacctcagacaacatcagcccggtggccagcccggtgcatacagggtttctggtgagcttcatggttgacgcccggggtggttccatgagaggaagtcgccacaacggcctgcgagtggtgatcccgccacggacgtgcgcagcgcccacccgcatcacctgccgcctggtcaagccccagaagctcagcacgccgcccccactggccgaggaggagggcctggccagcaggatcatagcactggggcccacgggggcacagttcctgagccctgtaatcgtggagatcccgcactttgcctcccatggccgtggagaccgcgagctcgtggttctgaggagcgaaaacggctccgtgtggaaggagcacaggagccgctatggagagagctacctggatcagatcctcaacgggatggacgaagagctggggagcctggaggagctagagaagaagagggtgtgccgaatcatcaccaccgacttcccgctgtacttcgtgatcatgtcacggctctgccaggactacgacaccatcggtcccgaagggggctccctgaagagcaagctggtgcccctggtacaggcaacgttcccggagaatgccgtcaccaagagagtgaagctggctctgcaggcccagcctgtcccggatgagcttgtcactaagctcctgggcaaccaggccacattcagccccattgtcaccgtggagccccggcgccggaagttccaccgccccattgggcttcggatcccactacctccttcctggaccgacaacccgagggacagcggggagggagacaccaccagcctgcgcctgctttgcagcgtcattggaggaacagaccaagcccagtgggaagacataacaggaaccaccaaacttgtatatgccaacgagtgcgccaacttcaccaccaatgtctctgccaggttttggctgtcggactgtcctcggactgctgaggctgtgaactttgccaccctgctgtacaaagagctcactgcagtgccctacatggccaaattcgtcatctttgccaagatgaatgacccccgagaggggcgcctgcgctgctactgcatgacagatgataaagtggacaagaccctggagcagcatgagaacttcgtggaggtggcccggagcagggacatagaggtgttggaaggaatgtccctgtttgcagaactctctgggaacctggtgcctgtgaagaaagctgcccagcagcggagcttccacttccagtcatttcgggagaaccgtctggccatgcctgtaaaggtgagggacagcagtcgagagccgggagggtccctgtcgtttctgcgcaaggcgatgaagtacgaggacacccagcacattctctgccacctgaacatcaccatgcccccctgcgccaagggaagtggagccgaagataggagaaggaccccgacgcccctggccctgcgatacagcattctcagtgagtccacaccaggttctctcagtgggacagagcaggcagagatgaagatggctgttatctcagagcacctcggtctcagctgggcagagttggcccgggagctgcagttcagtgtggaagacatcaacaggatccgagtggaaaatcccaactccctgttggagcagagtgtggccttgctgaacctctgggtcatccgtgaaggccaaaacgcaaacatggagaatctgtacacagccctgcagagcattgaccgtggcgagatcgtgaacatgctggagggttccggccgacagagccgcaacttgaagccagacaggcggcacaccgaccgcgactactcgctgtcaccctcccagatgaatggttactcctcactgcaggacgagctgctgtcccctgcctccctgggctgtgcactttcctctccgctacgtgcagaccagtactggaatgaggtggccgtcctagacgccatccccttggcggccacggagcatgacaccatgctggagatgtctgacatgcaggtgtggtctgcgggcctcacgccttctctggtcactgctgaggactcctctctggagtgtagcaaggctgaggactctgatgccacaggtcacgagtggaagttggagggggcactctcagaggaaccgcggggccccgagttgggctctctggaacttgtggaggacgacacagtggattcagatgccacaaatggccttatcgatttgcttgaacaggaggaaggtcagaggtcagaagagaagctgccaggttctaagaggcaggatgacgcgacaggtgcagggcaggactcagagaatgaagtgtctcttgtttcaggccatcagagggggcaagcccgaatcacacattcccccaccgtgagtcaggtgacggagaggagtcaggacagactgcaggactgggatgcagacggctcgattgtctcatacctgcaagatgctgcacaaggttcctggcaagaggaggtcacgcaaggtccacactcattccagggaacaagtaccatgactgaagggctagagcccggtggatctcaggagtacgagaaggtcctggtgtctgtaagtgagcacacgtggacagaacagcccgaggctgagagctcccaggccgacagggaccggaggcagcaaggccaagaagagcaggtgcaggaggccaagaacaccttcacccaagtggtgcaggatcacacctcgacacccaacccctgaaccccacacactctgccatgcacacaggaggagagctggacctgagggccaccgcagcggtgcacacattcctctgggctgacggcatgacctctgtaagggactcctgctagtcccctcttggcatgaatgactgactgtagacgcatgacctccaggcttcaatcctgcctcttgcaatgacagctgatctgtcggaaccaggacacaaaagcagcaagaagcggggagagagagggatagaaaacaagcgcaggagagcctgcgaacgcaaaagtgaatgagggctttttgtggctggggatgggttttggttttggggttttttttttaaattgttttgacttcgtacagggtactttttcccaacctcatctgtcagaaatccatgtgggcttcctggaaagaaaaaaaaaaaaaagaaaactaggcatgaaatcagtttaacaccttaatcttaagccatgtcctcatctgcccaccctccccaacccacatacctccattccacttgtgacaccccctcgactccctggtgacgctcctcccagatcgctctacatgacattcaggacacacacacacacacacacacaccactcgcctccactgaatctacacacagattttactgtgacttctgaagctgtatagactctgctgtggataaattggaattttttatgttgtctctctctctgccaatttcaatacgaatcatcttccaatggaaaatcattaccttgaagagtgcattcggggttccttgtgttagggacttaagaatctgaggcgaggacccccaggcttacctgtaggactcaaagggagccaggaccccatctgaaagggtctcctctctcagttgggggacaggccggtggctgacccaggattgcaccagcatgtccatagagaagaggttttctatgtcttcaagcactatatcatagtccgtgttcaaagtgtaaactgtacagtaatcagccttgtgtatatgaaaaacaataaatactatgcaaaccaatagaaacatttagcagtacgtacagagcctgacagcgcagctcctgaggacttctgcggctgcaggagaaggagctgtggcctgtctttcagtgaaagaggaaggaaaggagtagggctagtgaatgtatctgccaggtcttagaagtcaggaccacccagggtctcccagagtgaacttggtgctctaagtccaggcagcctgcaggctggggaccctgggtgcaggtgccaggctcgaggctgttccctgtcctgcctcagtgcctcccctctgcccagcccctgtggcctcttggagaggcgagccagggggctccccggaccgcatggccggtgagagtagagtcggaggcggagagcctggacgcccagaggccggggccaggctctgggtcaaggcaggaaggagacagacagctggcagttcctcgcctcggtgccatcagggaggagccttaagttccactagagcctccggcccagggaggccagaatcagcacaatcccggccccgccctcgcggcgggcgcccccagggccaggagagagagacagggctggctcctctcgcccctggagccgcggtgtggacggcccggccccgtccgccccgccgctctgcgggagtgtcctcgggacacacttaaaccttccaagtagcacagaagccccctccacgtcagaggccccctggccgcggggcctgtgagcggagaggggccctgcttcccacacaaatccgccccggtgcacccccggccaggcaggccccggggcggcctaggcgccttgtcggccgggggtggggctgcttttgcttcctttagaggggcgggcagggagaggaagctctagctccgggcctgagtttccccgaggctgcgtcggaggagctgcagggcgagcccggacggctgccgtctccgccagaggccaccccggcccggcctccagggcgcagaggcgcccccctccatcctcccccatcccgggggccacggcaggggggccgcacagcgcggctgggaccgattcggtgacggcccaaggaagctgggctcagggctcgcctctcccgcctcgatcctgcaccttcctctcccaggtcgctgctgcagccaacccagtagcccccttagcgcccccgcggaccccgcagctccagactccgctttggcacctctgctccggctggcatggctgcacgctccggctgctagtaggagccgttaggggaggagtttggggtctccacacgatgcctagagaatgctgcagtctgcacattagacgctttttagaagttttgaaattaccttgatttttttaattgttatgaaaatggatcttttcttgactctcccacatgctctgttatgggagagaatcccctaccctactctgatgtatagaccattctcccttcaccagccgaaccaatgtcaaaattaataaagaaatggactaatggc

SEQ ID NO: 204616 - DNA, 5645 bp, Artificial Sequence
  derived and/or modified sequence
atgccatactcagtgggatttagggaagcagatgctgcgacaagcttcctgcgagctgctaggagtgggaacctggacaaggcattggatcatctgagaaatggtgtagatatcaatacatgcaatcaaaacggattgaacgggttgcatctggctagcaaggaaggccacgtcaaaatggtggtggagctgctgcacaaggaaataatcctggagactacaaccaaaaagggcaataccgcactgcacatagccgcactggcaggacaggacgaggtcgttcgggagctggttaactacggagccaatgtaaacgcccagtcccagaaaggattcacaccactctatatggcggctcaggaaaatcacctcgaggtggtgaagttcttactggaaaacggggctaaccagaatgtggcgacggaggatggcttcactccattagccgttgccctgcagcagggccatgagaatgtcgtcgcacacctgatcaattacggcacgaaaggcaaagtgaggctgcctgcactccatatcgcggcacgaaacgacgacacgaggactgccgctgttttactacagaacgacccaaaccctgacgtgctgtctaagactggattcacccctctacatattgccgcacactatgagaatttgaatgtcgcacagctattactcaacaggggtgctagcgtgaacttcactcctcagaacggaatcacgccgctccacatcgcaagccgtcggggaaacgtcattatggtccgactcctgctggacagaggcgctcagatcgaaaccaaaaccaaggatgagttgactccactgcattgtgccgcaagaaatggtcacgtgcgcatttcagaaattttgctggaccacggcgctcctatccaggctaaaacaaaaaacggcctttcccctatacacatggccgcacagggagaccatctggattgcgtgagactcttgctgcagtacgatgccgaaattgacgatatcaccctggatcacctgacccccctgcatgtcgcagcgcattgcggacatcaccgggtggccaaggtgctgctcgacaaaggggcaaagccaaacagccgcgctttaaacggcttcacaccgctgcatatcgcctgtaaaaagaaccacgtccgcgttatggagctcctgctcaagacgggtgcctctatcgatgctgtgacagaatctggtctgacccctttgcatgtcgcttccttcatgggacatttgcctatcgtgaaaaaccttctgcagcgtggggcaagccctaatgtttcaaacgtgaaagtggagacccctttgcacatggctgctcgggctgggcatacagaggttgccaaatacctgctacaaaacaaagccaaagttaacgcaaaggccaaggatgaccagacgccccttcattgtgcggctaggatcgggcataccaatatggtcaagctgttgctcgagaacaacgcaaatcccaatctcgcaactaccgcaggccacaccccgttgcacatcgccgctagagaggggcatgtggagacagtgctggccctgcttgagaaagaggcctcccaagcctgcatgactaagaaaggatttaccccactccacgtcgcagcaaaatatggtaaagtaagggtggcggagctcctgctagagcgggacgcccatcctaacgctgcaggcaaaaacgggctcacaccactacatgtagccgttcaccacaacaacttggatatcgtcaagcttttgttacccaggggtggtagtccgcacagcccagcgtggaatggatacacaccccttcatattgccgcaaaacagaaccaggtcgaagtggcacggtctctcctacagtatgggggaagcgccaacgcagagagcgtgcagggggttactccactccatctggctgcccaggagggacatgccgaaatggtggctctactactgagcaagcaagccaacggaaatttgggcaacaagagcggcctgactcccctgcatcttgtggcccaggagggacacgtgcctgtggccgatgtccttataaagcatggtgtaatggtagatgctaccacgagaatgggttatactccactccacgttgcttcccattatgggaatataaagttagtcaagttcctgcttcagcaccaggccgatgttaatgccaaaacaaagttgggatactctcctcttcatcaggccgcacagcagggccatacggatatcgtgactttattattaaaaaacggtgcgtctcccaatgaggtgtccagcgatggtaccacaccactggcaatcgccaagcgcctgggttacatcagtgtcactgacgtacttaaggtggttacagacgaaaccagctttgttctcgtcagtgacaagcaccgaatgtcctttccagagacagtggatgagattttggacgtgtccgaagatgaaggtgaggagctcatcagcttcaaagcagagagaagggatagccgagacgtggacgaggagaaggagcttctcgattttgttcccaaactcgaccaagtggtagaatctccagcaattccccgtattccctgtgctatgccagagactgtggtcatcaggtctgaagagcaggaacaagcctctaaagaatacgatgaggattccctgatccccagctcgcccgcaacagaaacttccgataacataagccctgtggctagtcctgtccacaccgggtttcttgtgtcattcatggttgatgctcgaggcggtagcatgaggggatctcgacataacggattacgcgtcgtcattcctcctcgtacctgtgccgctcccaccagaattacctgtcggctggttaagcctcaaaagttgagcacccccccaccccttgccgaggaggaggggttagcaagccgtatcatcgccttaggaccaactggcgctcagtttttgagcccggttatcgtcgagataccccacttcgccagccatggacgaggggacagagagttggttgtactccggtcagaaaacggcagcgtttggaaagaacataggagccgatacggagagtcctacctggaccagatcttaaatggaatggacgaagaactcggtagtctggaggaactcgagaaaaaacgagtgtgccgtatcattacgaccgatttcccgctgtactttgtcatcatgtcgaggctgtgccaggactatgacacaattggcccagagggcggaagcctgaagtctaagttggtcccactcgttcaggccacatttcccgagaacgccgtgactaagagggtgaagctcgccttacaggcgcagcccgttccagatgaattagtcactaaattattaggtaaccaagcgaccttcagcccaatcgtcacagttgaaccacgccgtaggaaattccaccgaccaatcgggctaaggatcccgttgccccctagttggaccgacaaccctagggatagcggagaaggcgacacgacctccctccgactgctgtgcagtgttattggcggtaccgaccaagcccaatgggaggatattactggaacgaccaaactggtctacgcgaacgaatgcgctaactttaccaccaacgtttctgcccgtttctggctttcggactgtccgagaacggccgaggccgtcaatttcgcgactctgctgtacaaggagctgactgcagtgccctacatggctaagttcgtgattttcgccaagatgaatgatccaagggaagggagactccgttgctactgcatgaccgatgataaagttgacaagacactggagcagcacgagaatttcgttgaagttgcgcgtagccgagatatagaggttcttgaaggcatgtcgctgtttgcggagctctccgggaacctggttcccgtgaagaaggccgctcaacagaggagttttcattttcaatctttcagagaaaacagactggcgatgccagtgaaagttagagattcctcgagggaacccggaggtagcctgagtttcctacggaaagccatgaagtacgaagacacacagcatatactgtgccacctcaatatcacgatgcctccatgtgcaaaaggctctggtgctgaggaccgtcggagaactccgactcctctggcattacggtattctatcttgtcagaatccacgccaggaagcctgagcggcactgaacaggcggaaatgaagatggccgtcatcagcgaacatttgggcctctcttgggcagaacttgcgagagaacttcagttttctgtggaagatattaacaggatccgggtggaaaaccctaactccctcctggagcaaagtgtcgccttgttgaatctgtgggtaatccgagagggccagaatgccaacatggagaacctgtataccgccctccagtccattgacagaggtgagatcgttaacatgctggaggggagcggccgtcagagtcggaacctgaagcctgacagacggcatacggacagagactacagcttgtcaccatcgcagatgaacggttacagctccctacaggatgaactgcttagccccgcaagtcttggctgtgcattatcttcgcccctgcgggctgaccagtactggaatgaagtggcggtactcgatgcgataccccttgctgctaccgagcatgacaccatgctggagatgagcgatatgcaagtgtggagtgcaggtctcaccccttccctggtaaccgcagaagatagttctctggagtgctctaaggccgaggacagcgatgccacaggacatgagtggaagcttgagggcgcattgtcggaggagccgaggggacccgagttgggtagccttgagctggtggaggacgatactgtggatagtgacgcaacgaatggacttatagacctgctagagcaggaggagggtcagcggtctgaggaaaaactgcctgggtccaagaggcaggacgacgccactggagctggacaggattctgagaacgaggtcagcctggtgtccggccaccagcggggtcaggctcggatcacccacagtcctacggtgagccaggttacagagagaagccaagataggctacaggattgggatgctgatgggagtatcgtgagctacctgcaggacgccgcacagggaagctggcaggaggaggtcacgcaagggccacattcctttcagggcacgtctacgatgacagaagggctggaaccaggcggaagccaggagtatgagaaggttctggtctcagtttctgagcatacctggacagagcaacctgaagcggagagttcccaagcggatcgcgacagacggcagcaaggacaagaggagcaagtgcaggaggctaaaaatacattcacccaggttgtgcaaggaaacgagttccaaaatattccgggagaacaggtaactgaggaacagttcacagacgagcagggaaacattgtcacaaaaaaaattatccgcaaggttgtgagacagatagatctgagcagcgcagacgctgcccaggaacacgaggaagtgacagtggaggggcctctcgaggacccaagcgaattggaggtggacatcgattattttatgaagcacagcaaggatcatacttcgacacccaaccccta

SEQ ID NO: 204617 - DNA, 4560 bp, Artificial Sequence
  derived and/or modified sequence
atgccatactccgtcggatttcgagaggccgatgccgcaacaagtttcctcagagccgcaagatccgggaacctcgacaaggcactggaccatcttcgtaatggggtggacataaacacttgtaatcagaatggtctgaacggcctgcacttagctagtaaagagggacacgttaagatggtggttgagctactgcataaagagatcatattagaaacgacgactaagaagggaaataccgctctccacatcgcagcacttgctgggcaggacgaggtggtccgggagctggtgaattatggggcaaatgtgaatgctcagtctcagaagggatttacgcctctgtacatggcagcacaggagaatcatctggaggtcgtgaagttcctgctcgaaaatggagccaatcagaacgtcgctacagaggacggtttcaccccattggctgtggcactgcagcaggggcacgaaaatgtggtcgctcaccttatcaattatggcacaaaaggaaaagtgcgactgcctgctctccacatcgccgctaggaacgatgataccagaactgccgcagtactgctccaaaatgaccccaaccccgacgtgctgtcaaagaccggcttcacaccactccatattgccgcacattacgaaaatttgaatgtggcacagctcctgctgaacaggggcgcatccgttaattttactccacagaacgggatcactccattacacatcgcctctagacggggtaatgttattatggtgagactgctcctcgatcgtggcgctcaaattgaaacgaagactaaggacgaactgaccccactccattgtgcagcaaggaatggacacgtgcggatctccgaaatactcttagaccatggagcaccgatccaggcaaagaccaagaatggactgtcccctatccatatggcagctcagggggatcacttagactgcgttcggctgctgctgcagtatgatgctgagattgacgacatcactttggaccacctgacccctctgcacgttgccgctcactgcggccatcaccgggttgctaaagtgctccttgacaagggagctaaacccaactctagggctttaaatggctttactccattacatattgcgtgcaaaaaaaaccacgtgcgcgtcatggagctgctcctcaaaactggtgcatcaatcgatgccgtgactgaatcgggcctgacaccgcttcacgtcgcctcctttatggggcatctcccaattgtcaagaacctgctccaaaggggagcgagcccaaacgtctctaacgttaaggtagagaccccactgcacatggctgctagagccggacacacagaggtcgcgaaatatcttctgcagaacaaggcgaaggtcaatgccaaggccaaggatgatcagacaccgcttcattgtgccgcacgaatcggacacaccaatatggtcaaactcttactagagaataatgccaacccaaatctggctacaacagcagggcacactcccttacacatcgccgctagggaggggcatgtggagacagttctcgccctgctggagaaagaggccagccaggcttgtatgactaagaaaggtttcacccccttgcacgtggctgccaaatatggcaaagttcgggtcgccgagctgctgctggaaagagacgcacacccaaatgccgcaggaaaaaatggcctcactccacttcatgtggctgtgcaccacaacaatctcgatatcgttaagctgcttctgcctcgaggtggctctcctcatagcccggcttggaatgggtacacgcccctccatatcgccgcaaagcagaatcaggtggaggttgccaggagtctgttgcaatatggcggaagcgccaatgccgagagtgttcaaggagtcacgcctcttcatctggccgcacaagaagggcacgccgaaatggttgcactcttactgtccaaacaggcaaacggcaatctcggaaataaaagcggactcaccccacttcacttagtggcccaagaaggtcacgttcccgtggctgatgttttgattaaacacggtgtgatggtggatgcaacgaccagaatggggtatacccccctgcatgtcgccagccactacggcaatatcaaactggtgaagttcctgctccagcaccaggccgatgtgaatgcaaaaactaaactgggctatagtccactgcatcaggccgcacagcagggacacaccgacattgtcacactcttgttaaagaatggtgcctcccccaatgaagtctcatccgatggcacaactccactcgcaatcgctaaacgattggggtatataagcgttactgacgtgctgaaagtcgtgacagatgaaacctcattcgttcttgtgagcgacaaacacagaatgagctttcccgaaactgtagacgagatcttggatgtcagcgaggacgagggggaggaactgatcagcttcaaagcagagcggagagatagcagagatgtggacgaggaaaaggagctgttggacttcgtccccaagctggaccaggtggtggagagtccagccataccgaggataccctgtgctatgcccgaaactgtcgtaatcaggtctgaggaacaggagcaagcctcgaaggaatacgacgaagacagtttaataccatcttccccagcaacggaaacttccgataacattagccctgtcgcgtcccctgtccataccggcttcttagtctccttcatggttgacgcccgaggtgggtcaatgaggggcagcaggcacaacggccttcgcgtcgtgatcccacccaggacgtgcgccgcacccactcgcattacttgcagactcgttaaaccccaaaaactgtccaccccgcctccccttgccgaagaagaagggttggcctctcggatcatagcactaggcccaacaggcgctcagttcctcagcccagtgattgtggagatcccacacttcgctagtcatgggagaggagaccgcgagctggttgttctcagatctgagaacggtagcgtttggaaagaacatagatccaggtacggggaatcatatcttgatcagatcctgaatggtatggacgaggaattgggcagtctggaagagctcgagaagaagcgggtgtgccggataatcacgacagacttccctctatactttgtcatcatgagccgcttgtgtcaggactacgataccatcggacctgaagggggttcgctgaagtccaagcttgtgcccctcgtgcaggccacgtttccagaaaacgcagtgacaaagagagtcaaactggcgctgcaggcccagccagttcccgacgagctcgtcacaaagctgctggggaatcaggcaaccttcagcccaattgtgactgtggaaccccgtcggagaaagtttcatcgtccaatcgggctgcggattcccctgccgccaagttggactgataaccccagggattccggcgaaggggacaccaccagcttgagactactgtgtagcgtcatcggcggtactgaccaagcacagtgggaggacatcactgggaccactaagctggtgtacgccaacgagtgtgctaattttactacaaatgtttccgctcgcttttggctttcagactgcccaagaactgcggaggccgtgaatttcgcaaccctgctttacaaggagctcacagcggttccttatatggccaaatttgttatcttcgctaagatgaatgatccccgagaaggcagactgaggtgctattgcatgaccgatgataaggtcgacaaaactctggaacagcacgaaaactttgtcgaggtggcaagatcgagagacattgaggttctggagggaatgtctctttttgccgagctatcagggaatctcgttccagtgaagaaagccgcacagcagcgtagcttccacttccagagtttccgagaaaatagactggccatgccagtcaaagtgcgagacagttcccgggaacctggcggatcactaagttttctcaggaaggcaatgaaatacgaagacactcaacatatcctatgccaccttaatatcactatgcctccctgcgcgaaaggtagcggggcagaggataggcgtagaactccaacaccccttgccctgcgatattcaatactgtccgaatccacacctggaagcctcagtgggaccgagcaggcggagatgaaaatggctgtcatatctgagcatttaggtctgagctgggcagagttggctcgcgaacttcagttttccgtagaggacatcaatcgaatacgtgtcgaaaatcccaactcattgttggaacagtcagttgccctgctgaacctgtgggtcatccgggagggacaaaacgcgaacatggagaatctgtacaccgctctgcagagtatcgatcgaggggaaattgtgaatatgctcgaaggctccggccgacagtcccggaacctgaagcctgacagaagacacactgatagggactattctctgtcacctagccaaatgaacggtatctccactaataacccttag

SEQ ID NO: 204618 - DNA, 5420 bp, Artificial Sequence
  derived and/or modified sequence
atgccttattcagtcggcttccgggaagccgacgctgcaacctcttttttaagagctgctagatcaggcaacctggacaaggcactggatcacctgaggaacggggttgacattaatacatgtaatcagaatgggctgaatggattgcatctggccagcaaagaggggcatgttaagatggtggtcgagctgttacacaaggaaataattcttgagacaaccacaaaaaaggggaacacagcgcttcacatcgcagctcttgctggccaggatgaggtcgtacgggagctggtgaactatggggcaaatgtcaacgctcaatctcagaaagggtttacaccgctgtacatggcagctcaagaaaatcatttggaagtagttaagttcctgctggagaatggggcaaaccaaaacgtcgctacggaggacgggttcactcctctggccgtcgctttacagcagggccacgaaaatgttgtggcccacctgataaattacggcaccaaggggaaagttcgccttccagcgctccatatagccgcaagaaatgatgacacccgcactgcagcagttctcctgcagaacgatcctaacccagatgtcctgagtaaaactggatttactcccttgcacatagccgcacactacgaaaacctcaacgttgcccagctgctcctaaataggggagcatcagtgaacttcactccccagaatggaatcacacccctccacatcgcaagtcgtcggggaaacgttatcatggtgcgattgttgctggatcggggagctcaaatagaaacaaagacaaaagacgagcttacccccctacattgcgcggctagaaacgggcatgttagaatttccgagattctcctcgaccacggggctcccatccaggcaaaaactaaaaacggcctctctcccattcatatggcggcacagggtgatcatctggactgtgtgcgacttcttctgcagtacgacgccgaaattgatgacattactctggaccatttgacacctttacacgtggcagcccactgtgggcatcatagagttgccaaggttctccttgataagggcgcaaagccaaattccagagcactcaatggatttacaccactgcacatagcttgtaagaagaatcacgttcgggtgatggagctactgctgaaaaccggagcaagtatcgacgcagtgaccgaatctggattgacccccctacatgttgcctcatttatggggcacctgcctattgtcaaaaacctgcttcagaggggagcaagccccaacgtgagtaacgtcaaggtggagacccctctgcatatggccgctcgagccggtcatacagaagtggcaaaataccttctgcagaacaaagctaaagtgaatgcgaaagcgaaggacgatcagacccccctgcactgcgctgcacgtatcggccacacgaacatggtgaagctgctgctggaaaacaacgctaaccctaatctagcaaccaccgctgggcacaccccactccacatcgctgctcgcgagggccacgtggagaccgtgctggccctccttgaaaaagaggcaagccaagcgtgcatgactaaaaaggggtttacccccctccatgttgccgcaaaatacggaaaggtgcgcgtagctgaattgctacttgagagagatgctcaccccaacgctgcagggaaaaacggtcttacaccgctccatgtggccgtgcaccacaataacctcgacattgtgaaactccttctgcctcggggaggatcccctcacagccccgcttggaacgggtacacacctctgcatatagccgctaagcagaaccaggtggaggttgccagatcacttctccaatacgggggaagcgcgaatgccgagtccgtgcagggcgtgacccctcttcacttggctgcccaggagggacacgccgagatggtggccctgcttctctccaaacaagcaaatggcaacctgggaaacaaatccggtctcactcccctgcatctagtggcccaggagggacacgtccccgttgctgacgttttaatcaagcacggcgtcatggtagacgctactactagaatgggatatacaccgctccacgtggcctcccactacggcaatattaagctggtgaagttcttgctccagcaccaagcggatgtgaacgccaagaccaagctgggatactcacccttacaccaagctgcccagcagggccacacagatatagtcaccctgcttctgaagaacggcgcatctcccaacgaggtgagtagcgacggaaccactcctctcgcgattgcaaaaaggctggggtacatctcggtcactgacgtgttaaaggtagtcactgatgagacctcgttcgtgttggtgtctgacaaacatcgaatgtcgtttccagaaactgtcgatgaaattcttgacgtaagcgaagacgagggtgaagagctgatctctttcaaggccgagaggcgcgattcccgggacgtggacgaagagaaggaactcctcgattttgttcctaagttggatcaggtcgttgagagccccgcaataccgcgtatcccatgtgcaatgcccgagaccgttgtaattcggagcgaggagcaggaacaggccagcaaggagtatgacgaggactccctgattccaagttctccagcaaccgagacatccgataacatcagccccgtggcatccccagtgcacacaggcttcttggtttcttttatggtggacgccagaggcggatcgatgcgcggaagcagacacaatgggctgagggtggtgatacccccacgtacttgtgccgcacccacgaggattacctgtagactagtgaaaccccagaaattatcaacaccaccgcctctagctgaagaggaaggactggcctcacgcattattgctctgggacccaccggggcacagttcttgtctccagtgattgtggaaatcccacatttcgcatctcatggtaggggagatagagagcttgtggttctgcggagcgagaacggttctgtgtggaaggaacaccggtcccgctacggcgaaagctatctcgaccaaatcctgaacggaatggatgaggaattaggcagccttgaagaattggagaaaaagagagtgtgcaggatcatcactacggacttccccctatattttgtgatcatgtcccgcctatgccaggactacgatacaatcggccctgagggaggttctctgaagtctaaacttgttcccctcgtgcaggccacatttcccgagaacgcggttaccaagagagttaaactcgctttgcaagcgcagccagtccctgacgaacttgtcacgaaattacttgggaaccaagctactttcagtcccattgtcactgtagaacctagaagaagaaaatttcaccggcctatcggtctgagaattccactgcccccatcctggactgacaatcctcgcgacagcggggaaggtgacacaacctccctccgattactctgcagtgtcattgggggaacggatcaggcacagtgggaagatataaccggtaccactaagctggtctacgccaacgaatgtgctaattttacgacaaacgtaagtgcaagattttggctttccgattgccctagaaccgctgaagccgtgaattttgctacactgctatataaagagctgaccgcggttccgtacatggcaaagttcgttatcttcgcaaagatgaacgacccccgagagggaagacttcggtgttattgcatgacggacgataaagtagataagacgctggagcagcacgagaacttcgtggaagttgctagatcaagagacattgaggtgctcgagggaatgagtctgttcgcagagctgtcagggaatcttgtgccggtgaaaaaagctgctcaacagagaagctttcattttcagagtttcagggaaaataggttggccatgcctgtcaaggtccgggactccagtagggaacctggcggttcactgagcttcctgaggaaggccatgaagtatgaggacacgcagcacattctgtgccatctgaatataaccatgcccccatgtgcaaagggatccggcgctgaggacaggagacggacacccacccctctggccctacgctactccatcctgtcagaatccacccccggatccctgtcaggcacagaacaagctgagatgaagatggctgtgatcagcgaacatctgggtctgtcatgggcagagcttgcgagggagctgcagttctctgttgaggacataaatcggattagggtcgaaaatcctaactctttgctagaacaatccgtggcgctgttaaatctctgggttattcgcgaaggccaaaatgctaatatggagaatctgtatacggctttacagagcatagaccggggtgagattgtgaacatgctggaaggcagtggccgacagtctcgcaatctgaagcccgacaggcgtcacacggaccgcgactactccctctctccatctcagatgaacggctactcgtctctccaagacgagctattgagtcccgcttctctcggctgcgcccttagctctcccctgagggcagaccagtattggaacgaggtagccgtcctcgacgctattcccctcgccgctaccgagcacgacactatgttagagatgtcagatatgcaggtttggtcggccggtctgactcccagcttggtcaccgctgaggattccagcctggagtgcagcaaggctgaggatagcgacgctaccgggcatgaatggaagttggagggggcactgagtgaagaacctcgcggacccgagcttggcagcctggagttggttgaggacgacaccgtggacagtgacgcaacaaatgggctaatcgatttattagagcaggaggagggacaaaggagtgaagaaaagctgcctggctctaaacggcaggatgatgcaaccggcgctggtcaggattccgagaacgaagtctctcttgtatctgggcaccagcgtggccaggcaaggattacgcacagtcccactgtctcccaagtaactgagcgttcccaggataggttacaagactgggacgctgatgggtcaatagtaagctaccttcaggacgctgctcaaggtagctggcaggaggaagtgacgcaaggtcctcactcgtttcagggaactagtaccatgacagagggcctggaaccgggaggcagccaggaatacgagaaggtgcttgtttctgtgagcgaacatacctggaccgagcagccagaagctgagtcaagtcaggcggacagggatcgaaggcagcagggacaagaggaacaggtacaggaagctaagaatacctttacacaggtggtccaggaccacacgagtactcctaacccata

SEQ ID NO: 204619 - DNA, 5646 bp, Artificial Sequence
  derived and/or modified sequence
atgccctacagcgtgggcttcagagaggccgacgccgccaccagcttcctgagagccgccagaagcggcaacctggacaaggccctggaccacctgagaaacggcgtggacatcaacacctgcaaccagaacggcctgaacggcctgcacctggccagcaaggagggccacgtgaagatggtggtggagctgctgcacaaggagatcatcctggagaccaccaccaagaagggcaacaccgccctgcacatcgccgccctggccggccaggacgaggtggtgagagagctggtgaactacggcgccaacgtgaacgcccagagccagaagggcttcacccccctgtacatggccgcccaggagaaccacctggaggtggtgaagttcctgctggagaacggcgccaaccagaacgtggccaccgaggacggcttcacccccctggccgtggccctgcagcagggccacgagaacgtggtggcccacctgatcaactacggcaccaagggcaaggtgagactgcccgccctgcacatcgccgccagaaacgacgacaccagaaccgccgccgtgctgctgcagaacgaccccaaccccgacgtgctgagcaagaccggcttcacccccctgcacatcgccgcccactacgagaacctgaacgtggcccagctgctgctgaacagaggcgccagcgtgaacttcaccccccagaacggcatcacccccctgcacatcgccagcagaagaggcaacgtgatcatggtgagactgctgctggacagaggcgcccagatcgagaccaagaccaaggacgagctgacccccctgcactgcgccgccagaaacggccacgtgagaatcagcgagatcctgctggaccacggcgcccccatccaggccaagaccaagaacggcctgagccccatccacatggccgcccagggcgaccacctggactgcgtgagactgctgctgcagtacgacgccgagatcgacgacatcaccctggaccacctgacccccctgcacgtggccgcccactgcggccaccacagagtggccaaggtgctgctggacaagggcgccaagcccaacagcagagccctgaacggcttcacccccctgcacatcgcctgcaagaagaaccacgtgagagtgatggagctgctgctgaagaccggcgccagcatcgacgccgtgaccgagagcggcctgacccccctgcacgtggccagcttcatgggccacctgcccatcgtgaagaacctgctgcagagaggcgccagccccaacgtgagcaacgtgaaggtggagacccccctgcacatggccgccagagccggccacaccgaggtggccaagtacctgctgcagaacaaggccaaggtgaacgccaaggccaaggacgaccagacccccctgcactgcgccgccagaatcggccacaccaacatggtgaagctgctgctggagaacaacgccaaccccaacctggccaccaccgccggccacacccccctgcacatcgccgccagagagggccacgtggagaccgtgctggccctgctggagaaggaggccagccaggcctgcatgaccaagaagggcttcacccccctgcacgtggccgccaagtacggcaaggtgagagtggccgagctgctgctggagagagacgcccaccccaacgccgccggcaagaacggcctgacccccctgcacgtggccgtgcaccacaacaacctggacatcgtgaagctgctgctgcccagaggcggcagcccccacagccccgcctggaacggctacacccccctgcacatcgccgccaagcagaaccaggtggaggtggccagaagcctgctgcagtacggcggcagcgccaacgccgagagcgtgcagggcgtgacccccctgcacctggccgcccaggagggccacgccgagatggtggccctgctgctgagcaagcaggccaacggcaacctgggcaacaagagcggcctgacccccctgcacctggtggcccaggagggccacgtgcccgtggccgacgtgctgatcaagcacggcgtgatggtggacgccaccaccagaatgggctacacccccctgcacgtggccagccactacggcaacatcaagctggtgaagttcctgctgcagcaccaggccgacgtgaacgccaagaccaagctgggctacagccccctgcaccaggccgcccagcagggccacaccgacatcgtgaccctgctgctgaagaacggcgccagccccaacgaggtgagcagcgacggcaccacccccctggccatcgccaagagactgggctacatcagcgtgaccgacgtgctgaaggtggtgaccgacgagaccagcttcgtgctggtgagcgacaagcacagaatgagcttccccgagaccgtggacgagatcctggacgtgagcgaggacgagggcgaggagctgatcagcttcaaggccgagagaagagacagcagagacgtggacgaggagaaggagctgctggacttcgtgcccaagctggaccaggtggtggagagccccgccatccccagaatcccctgcgccatgcccgagaccgtggtgatcagaagcgaggagcaggagcaggccagcaaggagtacgacgaggacagcctgatccccagcagccccgccaccgagaccagcgacaacatcagccccgtggccagccccgtgcacaccggcttcctggtgagcttcatggtggacgccagaggcggcagcatgagaggcagcagacacaacggcctgagagtggtgatcccccccagaacctgcgccgcccccaccagaatcacctgcagactggtgaagccccagaagctgagcacccccccccccctggccgaggaggagggcctggccagcagaatcatcgccctgggccccaccggcgcccagttcctgagccccgtgatcgtggagatcccccacttcgccagccacggcagaggcgacagagagctggtggtgctgagaagcgagaacggcagcgtgtggaaggagcacagaagcagatacggcgagagctacctggaccagatcctgaacggcatggacgaggagctgggcagcctggaggagctggagaagaagagagtgtgcagaatcatcaccaccgacttccccctgtacttcgtgatcatgagcagactgtgccaggactacgacaccatcggccccgagggcggcagcctgaagagcaagctggtgcccctggtgcaggccaccttccccgagaacgccgtgaccaagagagtgaagctggccctgcaggcccagcccgtgcccgacgagctggtgaccaagctgctgggcaaccaggccaccttcagccccatcgtgaccgtggagcccagaagaagaaagttccacagacccatcggcctgagaatccccctgccccccagctggaccgacaaccccagagacagcggcgagggcgacaccaccagcctgagactgctgtgcagcgtgatcggcggcaccgaccaggcccagtgggaggacatcaccggcaccaccaagctggtgtacgccaacgagtgcgccaacttcaccaccaacgtgagcgccagattctggctgagcgactgccccagaaccgccgaggccgtgaacttcgccaccctgctgtacaaggagctgaccgccgtgccctacatggccaagttcgtgatcttcgccaagatgaacgaccccagagagggcagactgagatgctactgcatgaccgacgacaaggtggacaagaccctggagcagcacgagaacttcgtggaggtggccagaagcagagacatcgaggtgctggagggcatgagcctgttcgccgagctgagcggcaacctggtgcccgtgaagaaggccgcccagcagagaagcttccacttccagagcttcagagagaacagactggccatgcccgtgaaggtgagagacagcagcagagagcccggcggcagcctgagcttcctgagaaaggccatgaagtacgaggacacccagcacatcctgtgccacctgaacatcaccatgcccccctgcgccaagggcagcggcgccgaggacagaagaagaacccccacccccctggccctgagatacagcatcctgagcgagagcacccccggcagcctgagcggcaccgagcaggccgagatgaagatggccgtgatcagcgagcacctgggcctgagctgggccgagctggccagagagctgcagttcagcgtggaggacatcaacagaatcagagtggagaaccccaacagcctgctggagcagagcgtggccctgctgaacctgtgggtgatcagagagggccagaacgccaacatggagaacctgtacaccgccctgcagagcatcgacagaggcgagatcgtgaacatgctggagggcagcggcagacagagcagaaacctgaagcccgacagaagacacaccgacagagactacagcctgagccccagccagatgaacggctacagcagcctgcaggacgagctgctgagccccgccagcctgggctgcgccctgagcagccccctgagagccgaccagtactggaacgaggtggccgtgctggacgccatccccctggccgccaccgagcacgacaccatgctggagatgagcgacatgcaggtgtggagcgccggcctgacccccagcctggtgaccgccgaggacagcagcctggagtgcagcaaggccgaggacagcgacgccaccggccacgagtggaagctggagggcgccctgagcgaggagcccagaggccccgagctgggcagcctggagctggtggaggacgacaccgtggacagcgacgccaccaacggcctgatcgacctgctggagcaggaggagggccagagaagcgaggagaagctgcccggcagcaagagacaggacgacgccaccggcgccggccaggacagcgagaacgaggtgagcctggtgagcggccaccagagaggccaggccagaatcacccacagccccaccgtgagccaggtgaccgagagaagccaggacagactgcaggactgggacgccgacggcagcatcgtgagctacctgcaggacgccgcccagggcagctggcaggaggaggtgacccagggcccccacagcttccagggcaccagcaccatgaccgagggcctggagcccggcggcagccaggagtacgagaaggtgctggtgagcgtgagcgagcacacctggaccgagcagcccgaggccgagagcagccaggccgacagagacagaagacagcagggccaggaggagcaggtgcaggaggccaagaacaccttcacccaggtggtgcagggcaacgagttccagaacatccccggcgagcaggtgaccgaggagcagttcaccgacgagcagggcaacatcgtgaccaagaagatcatcagaaaggtggtgagacagatcgacctgagcagcgccgacgccgcccaggagcacgaggaggtgaccgtggagggccccctggaggaccccagcgagctggaggtggacatcgactacttcatgaagcacagcaaggaccacaccagcacccccaacccctag

SEQ ID NO: 204620 - DNA, 4560 bp, Artificial Sequence
  derived and/or modified sequence
atgccctacagcgtgggcttcagagaggccgacgccgccaccagcttcctgagagccgccagaagcggcaacctggacaaggccctggaccacctgagaaacggcgtggacatcaacacctgcaaccagaacggcctgaacggcctgcacctggccagcaaggagggccacgtgaagatggtggtggagctgctgcacaaggagatcatcctggagaccaccaccaagaagggcaacaccgccctgcacatcgccgccctggccggccaggacgaggtggtgagagagctggtgaactacggcgccaacgtgaacgcccagagccagaagggcttcacccccctgtacatggccgcccaggagaaccacctggaggtggtgaagttcctgctggagaacggcgccaaccagaacgtggccaccgaggacggcttcacccccctggccgtggccctgcagcagggccacgagaacgtggtggcccacctgatcaactacggcaccaagggcaaggtgagactgcccgccctgcacatcgccgccagaaacgacgacaccagaaccgccgccgtgctgctgcagaacgaccccaaccccgacgtgctgagcaagaccggcttcacccccctgcacatcgccgcccactacgagaacctgaacgtggcccagctgctgctgaacagaggcgccagcgtgaacttcaccccccagaacggcatcacccccctgcacatcgccagcagaagaggcaacgtgatcatggtgagactgctgctggacagaggcgcccagatcgagaccaagaccaaggacgagctgacccccctgcactgcgccgccagaaacggccacgtgagaatcagcgagatcctgctggaccacggcgcccccatccaggccaagaccaagaacggcctgagccccatccacatggccgcccagggcgaccacctggactgcgtgagactgctgctgcagtacgacgccgagatcgacgacatcaccctggaccacctgacccccctgcacgtggccgcccactgcggccaccacagagtggccaaggtgctgctggacaagggcgccaagcccaacagcagagccctgaacggcttcacccccctgcacatcgcctgcaagaagaaccacgtgagagtgatggagctgctgctgaagaccggcgccagcatcgacgccgtgaccgagagcggcctgacccccctgcacgtggccagcttcatgggccacctgcccatcgtgaagaacctgctgcagagaggcgccagccccaacgtgagcaacgtgaaggtggagacccccctgcacatggccgccagagccggccacaccgaggtggccaagtacctgctgcagaacaaggccaaggtgaacgccaaggccaaggacgaccagacccccctgcactgcgccgccagaatcggccacaccaacatggtgaagctgctgctggagaacaacgccaaccccaacctggccaccaccgccggccacacccccctgcacatcgccgccagagagggccacgtggagaccgtgctggccctgctggagaaggaggccagccaggcctgcatgaccaagaagggcttcacccccctgcacgtggccgccaagtacggcaaggtgagagtggccgagctgctgctggagagagacgcccaccccaacgccgccggcaagaacggcctgacccccctgcacgtggccgtgcaccacaacaacctggacatcgtgaagctgctgctgcccagaggcggcagcccccacagccccgcctggaacggctacacccccctgcacatcgccgccaagcagaaccaggtggaggtggccagaagcctgctgcagtacggcggcagcgccaacgccgagagcgtgcagggcgtgacccccctgcacctggccgcccaggagggccacgccgagatggtggccctgctgctgagcaagcaggccaacggcaacctgggcaacaagagcggcctgacccccctgcacctggtggcccaggagggccacgtgcccgtggccgacgtgctgatcaagcacggcgtgatggtggacgccaccaccagaatgggctacacccccctgcacgtggccagccactacggcaacatcaagctggtgaagttcctgctgcagcaccaggccgacgtgaacgccaagaccaagctgggctacagccccctgcaccaggccgcccagcagggccacaccgacatcgtgaccctgctgctgaagaacggcgccagccccaacgaggtgagcagcgacggcaccacccccctggccatcgccaagagactgggctacatcagcgtgaccgacgtgctgaaggtggtgaccgacgagaccagcttcgtgctggtgagcgacaagcacagaatgagcttccccgagaccgtggacgagatcctggacgtgagcgaggacgagggcgaggagctgatcagcttcaaggccgagagaagagacagcagagacgtggacgaggagaaggagctgctggacttcgtgcccaagctggaccaggtggtggagagccccgccatccccagaatcccctgcgccatgcccgagaccgtggtgatcagaagcgaggagcaggagcaggccagcaaggagtacgacgaggacagcctgatccccagcagccccgccaccgagaccagcgacaacatcagccccgtggccagccccgtgcacaccggcttcctggtgagcttcatggtggacgccagaggcggcagcatgagaggcagcagacacaacggcctgagagtggtgatcccccccagaacctgcgccgcccccaccagaatcacctgcagactggtgaagccccagaagctgagcacccccccccccctggccgaggaggagggcctggccagcagaatcatcgccctgggccccaccggcgcccagttcctgagccccgtgatcgtggagatcccccacttcgccagccacggcagaggcgacagagagctggtggtgctgagaagcgagaacggcagcgtgtggaaggagcacagaagcagatacggcgagagctacctggaccagatcctgaacggcatggacgaggagctgggcagcctggaggagctggagaagaagagagtgtgcagaatcatcaccaccgacttccccctgtacttcgtgatcatgagcagactgtgccaggactacgacaccatcggccccgagggcggcagcctgaagagcaagctggtgcccctggtgcaggccaccttccccgagaacgccgtgaccaagagagtgaagctggccctgcaggcccagcccgtgcccgacgagctggtgaccaagctgctgggcaaccaggccaccttcagccccatcgtgaccgtggagcccagaagaagaaagttccacagacccatcggcctgagaatccccctgccccccagctggaccgacaaccccagagacagcggcgagggcgacaccaccagcctgagactgctgtgcagcgtgatcggcggcaccgaccaggcccagtgggaggacatcaccggcaccaccaagctggtgtacgccaacgagtgcgccaacttcaccaccaacgtgagcgccagattctggctgagcgactgccccagaaccgccgaggccgtgaacttcgccaccctgctgtacaaggagctgaccgccgtgccctacatggccaagttcgtgatcttcgccaagatgaacgaccccagagagggcagactgagatgctactgcatgaccgacgacaaggtggacaagaccctggagcagcacgagaacttcgtggaggtggccagaagcagagacatcgaggtgctggagggcatgagcctgttcgccgagctgagcggcaacctggtgcccgtgaagaaggccgcccagcagagaagcttccacttccagagcttcagagagaacagactggccatgcccgtgaaggtgagagacagcagcagagagcccggcggcagcctgagcttcctgagaaaggccatgaagtacgaggacacccagcacatcctgtgccacctgaacatcaccatgcccccctgcgccaagggcagcggcgccgaggacagaagaagaacccccacccccctggccctgagatacagcatcctgagcgagagcacccccggcagcctgagcggcaccgagcaggccgagatgaagatggccgtgatcagcgagcacctgggcctgagctgggccgagctggccagagagctgcagttcagcgtggaggacatcaacagaatcagagtggagaaccccaacagcctgctggagcagagcgtggccctgctgaacctgtgggtgatcagagagggccagaacgccaacatggagaacctgtacaccgccctgcagagcatcgacagaggcgagatcgtgaacatgctggagggcagcggcagacagagcagaaacctgaagcccgacagaagacacaccgacagagactacagcctgagccccagccagatgaacggcatcagcaccaacaacccctag

SEQ ID NO: 204621 - DNA, 5421 bp, Artificial Sequence
  derived and/or modified sequence
atgccctacagcgtgggcttcagagaggccgacgccgccaccagcttcctgagagccgccagaagcggcaacctggacaaggccctggaccacctgagaaacggcgtggacatcaacacctgcaaccagaacggcctgaacggcctgcacctggccagcaaggagggccacgtgaagatggtggtggagctgctgcacaaggagatcatcctggagaccaccaccaagaagggcaacaccgccctgcacatcgccgccctggccggccaggacgaggtggtgagagagctggtgaactacggcgccaacgtgaacgcccagagccagaagggcttcacccccctgtacatggccgcccaggagaaccacctggaggtggtgaagttcctgctggagaacggcgccaaccagaacgtggccaccgaggacggcttcacccccctggccgtggccctgcagcagggccacgagaacgtggtggcccacctgatcaactacggcaccaagggcaaggtgagactgcccgccctgcacatcgccgccagaaacgacgacaccagaaccgccgccgtgctgctgcagaacgaccccaaccccgacgtgctgagcaagaccggcttcacccccctgcacatcgccgcccactacgagaacctgaacgtggcccagctgctgctgaacagaggcgccagcgtgaacttcaccccccagaacggcatcacccccctgcacatcgccagcagaagaggcaacgtgatcatggtgagactgctgctggacagaggcgcccagatcgagaccaagaccaaggacgagctgacccccctgcactgcgccgccagaaacggccacgtgagaatcagcgagatcctgctggaccacggcgcccccatccaggccaagaccaagaacggcctgagccccatccacatggccgcccagggcgaccacctggactgcgtgagactgctgctgcagtacgacgccgagatcgacgacatcaccctggaccacctgacccccctgcacgtggccgcccactgcggccaccacagagtggccaaggtgctgctggacaagggcgccaagcccaacagcagagccctgaacggcttcacccccctgcacatcgcctgcaagaagaaccacgtgagagtgatggagctgctgctgaagaccggcgccagcatcgacgccgtgaccgagagcggcctgacccccctgcacgtggccagcttcatgggccacctgcccatcgtgaagaacctgctgcagagaggcgccagccccaacgtgagcaacgtgaaggtggagacccccctgcacatggccgccagagccggccacaccgaggtggccaagtacctgctgcagaacaaggccaaggtgaacgccaaggccaaggacgaccagacccccctgcactgcgccgccagaatcggccacaccaacatggtgaagctgctgctggagaacaacgccaaccccaacctggccaccaccgccggccacacccccctgcacatcgccgccagagagggccacgtggagaccgtgctggccctgctggagaaggaggccagccaggcctgcatgaccaagaagggcttcacccccctgcacgtggccgccaagtacggcaaggtgagagtggccgagctgctgctggagagagacgcccaccccaacgccgccggcaagaacggcctgacccccctgcacgtggccgtgcaccacaacaacctggacatcgtgaagctgctgctgcccagaggcggcagcccccacagccccgcctggaacggctacacccccctgcacatcgccgccaagcagaaccaggtggaggtggccagaagcctgctgcagtacggcggcagcgccaacgccgagagcgtgcagggcgtgacccccctgcacctggccgcccaggagggccacgccgagatggtggccctgctgctgagcaagcaggccaacggcaacctgggcaacaagagcggcctgacccccctgcacctggtggcccaggagggccacgtgcccgtggccgacgtgctgatcaagcacggcgtgatggtggacgccaccaccagaatgggctacacccccctgcacgtggccagccactacggcaacatcaagctggtgaagttcctgctgcagcaccaggccgacgtgaacgccaagaccaagctgggctacagccccctgcaccaggccgcccagcagggccacaccgacatcgtgaccctgctgctgaagaacggcgccagccccaacgaggtgagcagcgacggcaccacccccctggccatcgccaagagactgggctacatcagcgtgaccgacgtgctgaaggtggtgaccgacgagaccagcttcgtgctggtgagcgacaagcacagaatgagcttccccgagaccgtggacgagatcctggacgtgagcgaggacgagggcgaggagctgatcagcttcaaggccgagagaagagacagcagagacgtggacgaggagaaggagctgctggacttcgtgcccaagctggaccaggtggtggagagccccgccatccccagaatcccctgcgccatgcccgagaccgtggtgatcagaagcgaggagcaggagcaggccagcaaggagtacgacgaggacagcctgatccccagcagccccgccaccgagaccagcgacaacatcagccccgtggccagccccgtgcacaccggcttcctggtgagcttcatggtggacgccagaggcggcagcatgagaggcagcagacacaacggcctgagagtggtgatcccccccagaacctgcgccgcccccaccagaatcacctgcagactggtgaagccccagaagctgagcacccccccccccctggccgaggaggagggcctggccagcagaatcatcgccctgggccccaccggcgcccagttcctgagccccgtgatcgtggagatcccccacttcgccagccacggcagaggcgacagagagctggtggtgctgagaagcgagaacggcagcgtgtggaaggagcacagaagcagatacggcgagagctacctggaccagatcctgaacggcatggacgaggagctgggcagcctggaggagctggagaagaagagagtgtgcagaatcatcaccaccgacttccccctgtacttcgtgatcatgagcagactgtgccaggactacgacaccatcggccccgagggcggcagcctgaagagcaagctggtgcccctggtgcaggccaccttccccgagaacgccgtgaccaagagagtgaagctggccctgcaggcccagcccgtgcccgacgagctggtgaccaagctgctgggcaaccaggccaccttcagccccatcgtgaccgtggagcccagaagaagaaagttccacagacccatcggcctgagaatccccctgccccccagctggaccgacaaccccagagacagcggcgagggcgacaccaccagcctgagactgctgtgcagcgtgatcggcggcaccgaccaggcccagtgggaggacatcaccggcaccaccaagctggtgtacgccaacgagtgcgccaacttcaccaccaacgtgagcgccagattctggctgagcgactgccccagaaccgccgaggccgtgaacttcgccaccctgctgtacaaggagctgaccgccgtgccctacatggccaagttcgtgatcttcgccaagatgaacgaccccagagagggcagactgagatgctactgcatgaccgacgacaaggtggacaagaccctggagcagcacgagaacttcgtggaggtggccagaagcagagacatcgaggtgctggagggcatgagcctgttcgccgagctgagcggcaacctggtgcccgtgaagaaggccgcccagcagagaagcttccacttccagagcttcagagagaacagactggccatgcccgtgaaggtgagagacagcagcagagagcccggcggcagcctgagcttcctgagaaaggccatgaagtacgaggacacccagcacatcctgtgccacctgaacatcaccatgcccccctgcgccaagggcagcggcgccgaggacagaagaagaacccccacccccctggccctgagatacagcatcctgagcgagagcacccccggcagcctgagcggcaccgagcaggccgagatgaagatggccgtgatcagcgagcacctgggcctgagctgggccgagctggccagagagctgcagttcagcgtggaggacatcaacagaatcagagtggagaaccccaacagcctgctggagcagagcgtggccctgctgaacctgtgggtgatcagagagggccagaacgccaacatggagaacctgtacaccgccctgcagagcatcgacagaggcgagatcgtgaacatgctggagggcagcggcagacagagcagaaacctgaagcccgacagaagacacaccgacagagactacagcctgagccccagccagatgaacggctacagcagcctgcaggacgagctgctgagccccgccagcctgggctgcgccctgagcagccccctgagagccgaccagtactggaacgaggtggccgtgctggacgccatccccctggccgccaccgagcacgacaccatgctggagatgagcgacatgcaggtgtggagcgccggcctgacccccagcctggtgaccgccgaggacagcagcctggagtgcagcaaggccgaggacagcgacgccaccggccacgagtggaagctggagggcgccctgagcgaggagcccagaggccccgagctgggcagcctggagctggtggaggacgacaccgtggacagcgacgccaccaacggcctgatcgacctgctggagcaggaggagggccagagaagcgaggagaagctgcccggcagcaagagacaggacgacgccaccggcgccggccaggacagcgagaacgaggtgagcctggtgagcggccaccagagaggccaggccagaatcacccacagccccaccgtgagccaggtgaccgagagaagccaggacagactgcaggactgggacgccgacggcagcatcgtgagctacctgcaggacgccgcccagggcagctggcaggaggaggtgacccagggcccccacagcttccagggcaccagcaccatgaccgagggcctggagcccggcggcagccaggagtacgagaaggtgctggtgagcgtgagcgagcacacctggaccgagcagcccgaggccgagagcagccaggccgacagagacagaagacagcagggccaggaggagcaggtgcaggaggccaagaacaccttcacccaggtggtgcaggaccacaccagcacccccaacccctag

SEQ ID NO: 204622 - protein, 155 aa, Artificial Sequence
  derived and/or modified sequence
MWTFVTQLLVTLVLLSFFLVSCQNVMHIVRGSLCFVLKHIHQELDKELGESEGLSDDEETISTRVVRRRVFLKGNEFQNIPGEQVTEEQFTDEQGNIVTKKIIRKVVRQIDLSSADAAQEHEEVELRGSGLQPDLIEGRKGAQIVKRASLKRGKQ

SEQ ID NO: 204623 - DNA, 468 bp, Artificial Sequence
  derived and/or modified sequence
atgtggacatttgtgacacaactgctcgtgactcttgtgctcctatctttcttcctggtctcttgtcaaaatgtcatgcacattgttaggggctctctgtgcttcgtgctgaaacatattcaccaggaactcgataaagaacttggtgaatctgagggtcttagcgacgatgaagaaacaatttccacacgagtagtcagacgtcgggtgttcttaaaaggtaatgaatttcaaaacattcccggagagcaagtaacagaggagcaattcaccgacgagcagggcaatattgttaccaagaagatcataaggaaagtagttcgacagattgacctgtcctctgcagatgcagcccaggaacacgaggaagtggagcttagaggatcaggcttgcagcctgaccttattgagggcaggaagggcgcccagatcgtgaaacgcgctagcctgaagcggggtaagcagtag

SEQ ID NO: 204624 - DNA, 468 bp, Artificial Sequence
  derived and/or modified sequence
atgtggacctttgtgacccagctgctggtgaccctggtgctgctgtccttcttcctggtgtcctgccagaatgtgatgcacatcgtgcggggcagcctgtgctttgtgctgaagcacatccaccaggagctggacaaggagctgggggagagcgagggcctgagtgatgatgaggagaccatcagcaccagggtggtgagaagaagagtcttcctgaagggaaatgagttccagaacatccctggagagcaggtgacagaggagcagttcacagatgagcagggcaacatcgtgaccaagaagatcatcaggaaggtggtgcggcagattgacctgagcagcgcagatgctgcccaggagcacgaggaggtggagctgcggggcagcggcctgcagcctgacctgattgagggcaggaagggggcccagatcgtgaagagggccagcctgaagaggggcaagcagtag

SEQ ID NO: 204625 - DNA, 468 bp, Artificial Sequence
  derived and/or modified sequence
atgtggaccttcgtgacccagctgctggtgaccctggtgctgctgagtttttttctggtgagctgtcaaaatgttatgcatatcgtgaggggtagcttgtgcttcgtgctaaagcacatccaccaggagctcgacaaggagttaggggaatccgagggcctgtctgatgatgaagaaacaatatcaactagagttgtgaggcgtcgggtgttcctcaaaggcaatgaatttcagaatatccctggtgaacaagtgacagaggaacagtttacagacgaacagggaaacattgtgaccaagaaaatcatccgaaaagtcgttcgtcagattgacttgtctagtgccgacgctgcacaagagcacgaagaagtggagctgcgtgggtctggattgcagcctgatctcatagagggcaggaagggagcccaaattgtgaagcgagccagccttaagcgggggaagcaatag

SEQ ID NO: 204626 - DNA, 1185 bp, Artificial Sequence
  derived and/or modified sequence
actcagggcagagcctggctgctgggcagaagggcacttgggccgggctgcttcagccgagagggccattcggtgtcctgcccacagagagagaaacagtgagagaccaagagagcaaaccagagagatagggagggggaatgcaaggggtccctgggggactcaggagtcccagtggagaatgagaggcaggccccccgtggtggccggggccctggctgccagaggaccgggctggtgaggaggcgaggatgtggactttcgtcacccagctgttggtcacgctggtgctgctgagcttcttcctggtcagctgtcagaacgtgatgcacattgtcagggggtccctgtgctttgtgctaaagcacatccaccaggagctggacaaggagctgggggagagcgagggcctcagtgacgacgaggagaccatctccaccagggtggtccggcggcgggtcttcctgaaggggaatgagtttcagaatattccaggggagcaggtgacagaggagcaattcacggatgagcagggcaacattgtcaccaagaagatcattcgcaaggtggttcgacagatagacttgtccagcgccgatgccgcccaggagcacgaggaggtggagctgagagggagtggcctacagccggacctgatagagggcaggaagggggcgcagatagtgaagcgggccagcctgaaaagggggaaacagtgaccccgagccgctctccttggagtagcctctcgggaggatcacacctcgacacccaacccctgaaccccacacactctgccatgcacacaggaggagagctggacctgagggccaccgcagcggtgcacacattcctctgggctgacggcatgacctctgtaagggactcctgctagtcccctcttggcatgaatgactgactgtagacgcatgacctccaggcttcaatcctgcctcttgcaatgacagctgatctgtcggaaccaggacacaaaagcagcaagaagcggggagagagagggatagaaaacaagcgcaggagagcctgcgaacgcaaaagtgaatgagggctttttgtggctggggatgggttttggttttggggttttttttttaaattgttttgacttcgtacagggtactttttcccaacctcatctgtcagaaatccatgtgggcttcctgg

SEQ ID NO: 204627 - DNA, 468 bp, Artificial Sequence
  derived and/or modified sequence
atgtggacctttgtgacccagctcctggtgaccttagttcttctgtcttttttcttagtcagttgccagaacgtgatgcatatagttaggggcagcctctgtttcgtgctgaagcacattcatcaggagctcgataaggagctgggggagtcagagggactgagcgacgacgaagagacaatctcaacccgggttgtacgaaggcgagttttcctgaagggcaacgaatttcaaaacatccctggcgaacaggtgacagaggagcagttcaccgatgagcagggtaacattgtcaccaagaaaatcatccgaaaggtggtgcggcagattgacctatcatcggcagatgctgctcaggagcacgaagaggtggagctgcgagggtctgggcttcagcccgacttgatcgaaggtcgcaagggtgctcagatcgtgaaaagggcttccctgaagagaggaaagcaatag

SEQ ID NO: 204628 - DNA, 468 bp, Artificial Sequence
  derived and/or modified sequence
atgtggaccttcgtgacccagctgctggtgaccctggtgctgctgagcttcttcctggtgagctgccagaacgtgatgcacatcgtgagaggcagcctgtgcttcgtgctgaagcacatccaccaggagctggacaaggagctgggcgagagcgagggcctgagcgacgacgaggagaccatcagcaccagagtggtgagaagaagagtgttcctgaagggcaacgagttccagaacatccccggcgagcaggtgaccgaggagcagttcaccgacgagcagggcaacatcgtgaccaagaagatcatcagaaaggtggtgagacagatcgacctgagcagcgccgacgccgcccaggagcacgaggaggtggagctgagaggcagcggcctgcagcccgacctgatcgagggcagaaagggcgcccagatcgtgaagagagccagcctgaagagaggcaagcagtag

SEQ ID NO: 204629 - protein, 109 aa, Artificial Sequence
  derived and/or modified sequence
MWTFVTQLLVTLVLLSFFLVSCQNVMHIVRGSLCFVLKHIHQELDKELGESEGLSDDEETISTRVVRRRVFLKGNEFQNIPGEQVTEEQFTDEQGNIVTKKDHTSTPNP

SEQ ID NO: 204630 - DNA, 330 bp, Artificial Sequence
  derived and/or modified sequence
atgtggacatttgtaactcagctgctggtgaccctggttctactgtcattctttctggtatcctgccagaacgtaatgcacattgtgaggggtagtctgtgctttgtattgaagcacatccaccaggagctagacaaggagctcggggaatctgagggtctttccgacgatgaggaaacgattagcaccagagtggtgcgtcggagagtgttcctgaaaggcaacgaattccagaacatcccaggcgagcaggtcactgaggagcaattcaccgacgaacagggcaatatcgtgacaaaaaaagaccacacatccacccccaacccttag

SEQ ID NO: 204631 - DNA, 330 bp, Artificial Sequence
  derived and/or modified sequence
atgtggacgttcgtaacacagttactagtgacactcgtgcttttatcttttttcctggtgagttgccagaacgtaatgcatatcgtcaggggttcgttatgtttcgtattgaaacatattcatcaagaattagacaaggaactcggcgagtccgaggggctgtccgatgatgaggagacaatttcaacgagagtggtgaggcgccgcgtctttttgaaagggaacgaatttcagaacattcccggcgaacaggtgacagaggaacagtttacagatgagcaggggaacattgtgactaaaaaggaccatacttctactcccaatccatag

SEQ ID NO: 204632 - DNA, 330 bp, Artificial Sequence
  derived and/or modified sequence
atgtggacctttgtgacccagctgctggtgaccctggtgctgctgtccttcttcctggtgtcctgccagaatgtgatgcacatcgtgcggggcagcctgtgctttgtgctgaagcacatccaccaggagctggacaaggagctgggggagagcgagggcctgagtgatgatgaggagaccatcagcaccagggtggtgagaagaagagtcttcctgaagggaaatgagttccagaacatccctggagagcaggtgacagaggagcagttcacagatgagcagggcaacatcgtgaccaagaaggaccacaccagcacccccaacccctag

SEQ ID NO: 204633 - DNA, 330 bp, Artificial Sequence
  derived and/or modified sequence
atgtggaccttcgtgacccagctgctggtgaccctggtgctgctgagctttttcctagtgtcatgtcagaacgtcatgcatatcgtgaggggatctctatgctttgtgctgaagcatattcaccaggagcttgacaaggaacttggggagagtgaaggactatccgatgatgaagaaaccatctcaacacgcgttgtaaggcggcgcgtatttctgaagggcaacgaatttcagaatattcctggtgagcaggtgaccgaggaacagtttactgatgagcagggcaacattgtgacaaagaaggaccacacttccacccccaacccctag

SEQ ID NO: 204634 - DNA, 330 bp, Artificial Sequence
  derived and/or modified sequence
atgtggaccttcgtgacccagctgctggtgaccctggtgctgctgtcatttttcttggtgtcttgtcaaaatgtgatgcacatcgtgagaggcagcctttgctttgtgcttaagcatatacaccaggaactggataaagagttaggcgaaagcgaggggctgtcagacgatgaggagaccataagtacgcgggtagtccggcgcagagtcttcctgaagggcaatgaatttcaaaatatccctggagagcaggtgaccgaagaacagtttactgacgaacaggggaatattgtgacaaaaaaggatcacacaagcactccaaatccctag

SEQ ID NO: 204635 - DNA, 579 bp, Artificial Sequence
  derived and/or modified sequence
actcagggcagagcctggctgctgggcagaagggcacttgggccgggctgcttcagccgagagggccattcggtgtcctgcccacagagagagaaacagtgagagaccaagagagcaaaccagagagatagggagggggaatgcaaggggtccctgggggactcaggagtcccagtggagaatgagaggcaggccccccgtggtggccggggccctggctgccagaggaccgggctggtgaggaggcgaggatgtggactttcgtcacccagctgttggtcacgctggtgctgctgagcttcttcctggtcagctgtcagaacgtgatgcacattgtcagggggtccctgtgctttgtgctaaagcacatccaccaggagctggacaaggagctgggggagagcgagggcctcagtgacgacgaggagaccatctccaccagggtggtccggcggcgggtcttcctgaaggggaatgagtttcagaatattccaggggagcaggtgacagaggagcaattcacggatgagcagggcaacattgtcaccaagaaggatcacacctcgacacccaacccct

SEQ ID NO: 204636 - DNA, 3094 bp, Artificial Sequence
  derived and/or modified sequence
gtcacccgggccactcagggcagagcctggctgctgggcagaagggcacttgggccgggctgcttcagccgagagggccattcggtgtcctgcccacagagagagaaacagtgagagaccaagagagcaaaccagagagatagggagggggaatgcaaggggtccctgggggactcaggagtcccagtggagaatgagaggcaggccccccgtggtggccggggccctggctgccagaggaccgggctggtgaggaggcgaggatgtggactttcgtcacccagctgttggtcacgctggtgctgctgagcttcttcctggtcagctgtcagaacgtgatgcacattgtcagggggtccctgtgctttgtgctaaagcacatccaccaggagctggacaaggagctgggggagagcgagggcctcagtgacgacgaggagaccatctccaccagggtggtccggcggcgggtcttcctgaaggggaatgagtttcagaatattccaggggagcaggtgacagaggagcaattcacggatgagcagggcaacattgtcaccaagaaggatcacacctcgacacccaacccctgaaccccacacactctgccatgcacacaggaggagagctggacctgagggccaccgcagcggtgcacacattcctctgggctgacggcatgacctctgtaagggactcctgctagtcccctcttggcatgaatgactgactgtagacgcatgacctccaggcttcaatcctgcctcttgcaatgacagctgatctgtcggaaccaggacacaaaagcagcaagaagcggggagagagagggatagaaaacaagcgcaggagagcctgcgaacgcaaaagtgaatgagggctttttgtggctggggatgggttttggttttggggttttttttttaaattgttttgacttcgtacagggtactttttcccaacctcatctgtcagaaatccatgtgggcttcctggaaagaaaaaaaaaaaaaagaaaactaggcatgaaatcagtttaacaccttaatcttaagccatgtcctcatctgcccaccctccccaacccacatacctccattccacttgtgacaccccctcgactccctggtgacgctcctcccagatcgctctacatgacattcaggacacacacacacacacacacacaccactcgcctccactgaatctacacacagattttactgtgacttctgaagctgtatagactctgctgtggataaattggaattttttatgttgtctctctctctgccaatttcaatacgaatcatcttccaatggaaaatcattaccttgaagagtgcattcggggttccttgtgttagggacttaagaatctgaggcgaggacccccaggcttacctgtaggactcaaagggagccaggaccccatctgaaagggtctcctctctcagttgggggacaggccggtggctgacccaggattgcaccagcatgtccatagagaagaggttttctatgtcttcaagcactatatcatagtccgtgttcaaagtgtaaactgtacagtaatcagccttgtgtatatgaaaaacaataaatactatgcaaaccaatagaaacatttagcagtacgtacagagcctgacagcgcagctcctgaggacttctgcggctgcaggagaaggagctgtggcctgtctttcagtgaaagaggaaggaaaggagtagggctagtgaatgtatctgccaggtcttagaagtcaggaccacccagggtctcccagagtgaacttggtgctctaagtccaggcagcctgcaggctggggaccctgggtgcaggtgccaggctcgaggctgttccctgtcctgcctcagtgcctcccctctgcccagcccctgtggcctcttggagaggcgagccagggggctccccggaccgcatggccggtgagagtagagtcggaggcggagagcctggacgcccagaggccggggccaggctctgggtcaaggcaggaaggagacagacagctggcagttcctcgcctcggtgccatcagggaggagccttaagttccactagagcctccggcccagggaggccagaatcagcacaatcccggccccgccctcgcggcgggcgcccccagggccaggagagagagacagggctggctcctctcgcccctggagccgcggtgtggacggcccggccccgtccgccccgccgctctgcgggagtgtcctcgggacacacttaaaccttccaagtagcacagaagccccctccacgtcagaggccccctggccgcggggcctgtgagcggagaggggccctgcttcccacacaaatccgccccggtgcacccccggccaggcaggccccggggcggcctaggcgccttgtcggccgggggtggggctgcttttgcttcctttagaggggcgggcagggagaggaagctctagctccgggcctgagtttccccgaggctgcgtcggaggagctgcagggcgagcccggacggctgccgtctccgccagaggccaccccggcccggcctccagggcgcagaggcgcccccctccatcctcccccatcccgggggccacggcaggggggccgcacagcgcggctgggaccgattcggtgacggcccaaggaagctgggctcagggctcgcctctcccgcctcgatcctgcaccttcctctcccaggtcgctgctgcagccaacccagtagcccccttagcgcccccgcggaccccgcagctccagactccgctttggcacctctgctccggctggcatggctgcacgctccggctgctagtaggagccgttaggggaggagtttggggtctccacacgatgcctagagaatgctgcagtctgcacattagacgctttttagaagttttgaaattaccttgatttttttaattgttatgaaaatggatcttttcttgactctcccacatgctctgttatgggagagaatcccctaccctactctgatgtatagaccattctcccttcaccagccgaaccaatgtcaaaattaataaagaaatggactaatggc

SEQ ID NO: 204637 - DNA, 330 bp, Artificial Sequence
  derived and/or modified sequence
atgtggacattcgtgacacaactgctggtgaccctcgtgcttctctccttttttctggtgtcatgccagaatgtcatgcatatcgtcaggggaagcctgtgtttcgtcctaaagcatattcaccaggagctggataaagaactcggtgagagtgaagggctcagcgatgacgaagaaacaatttccaccagagttgtgcgcagaagagttttcctgaagggtaacgagtttcaaaacatcccaggcgaacaggtaaccgaagagcaattcacggacgaacagggtaatatagtgactaaaaaagaccatacatccaccccgaatccttag

SEQ ID NO: 204638 - DNA, 330 bp, Artificial Sequence
  derived and/or modified sequence
atgtggacattcgtcacacagctgttggtaaccctggtgctgctgagtttctttcttgttagttgccagaacgttatgcacattgtacgtggttccctctgtttcgtgttgaaacacatccatcaggagcttgacaaggaattgggagaaagtgaaggactctccgatgacgaggagacaattagcaccagggtggtaaggcgacgagtgtttctgaaaggaaatgaatttcagaatatccctggcgaacaggtcactgaagaacagttcactgacgagcagggaaacatcgtgaccaaaaaagatcatactagcacaccgaacccttag

SEQ ID NO: 204639 - DNA, 330 bp, Artificial Sequence
  derived and/or modified sequence
atgtggaccttcgtgacccagctgctggtgaccctggtgctgctgagcttcttcctggtgagctgccagaacgtgatgcacatcgtgagaggcagcctgtgcttcgtgctgaagcacatccaccaggagctggacaaggagctgggcgagagcgagggcctgagcgacgacgaggagaccatcagcaccagagtggtgagaagaagagtgttcctgaagggcaacgagttccagaacatccccggcgagcaggtgaccgaggagcagttcaccgacgagcagggcaacatcgtgaccaagaaggaccacaccagcacccccaacccctag

SEQ ID NO: 204640 - protein, 179 aa, Artificial Sequence
  derived and/or modified sequence
MAALQKSVSSFLMGTLATSCLLLLALLVQGGAAAPISSHCRLDKSNFQQPYITNRTFMLAKEASLADNNTDVRLIGEKLFHGVSMSERCYLMKQVLNFTLEEVLFPQSDRFQPYMQEVVPFLARLSNRLSTCHIEGDDLHIQRNVQKLKDTVKKLGESGEIKAIGELDLLFMSLRNACI

SEQ ID NO: 204641 - DNA, 540 bp, Artificial Sequence
  derived and/or modified sequence
atggccgccctgcagaagagcgtgagcagcttcctgatgggcaccctggccaccagctgcctgctgctgctggccctgctggtgcagggcggcgccgccgcccccatcagcagccactgcagactggacaagagcaacttccagcagccctacatcaccaacagaaccttcatgctggccaaggaggccagcctggccgacaacaacaccgacgtgagactgatcggcgagaagctgttccacggcgtgagcatgagcgagagatgctacctgatgaagcaggtgctgaacttcaccctggaggaggtgctgttcccccagagcgacagattccagccctacatgcaggaggtggtgcccttcctggccagactgagcaacagactgagcacctgccacatcgagggcgacgacctgcacatccagagaaacgtgcagaagctgaaggacaccgtgaagaagctgggcgagagcggcgagatcaaggccatcggcgagctggacctgctgttcatgagcctgagaaacgcctgcatctag

SEQ ID NO: 204642 - DNA, 540 bp, Artificial Sequence
  derived and/or modified sequence
atggccgccttacagaagagcgtgtcttctttcctaatgggcaccctcgccactagctgcttgctcctcctggcactcctggtccagggtggagcagctgcgcccatcagtagccattgcaggttggacaagtctaactttcaacagccatacattacaaaccgtacgtttatgctagccaaagaagcatcactggctgacaataatacggacgtaagacttatcggagaaaaactgttccacggggtgagtatgagcgaacgctgttatctgatgaagcaggtcctcaatttcacactggaagaagtattgttcccccaatcagacagattccagccatacatgcaggaggtggtccctttcctggcgagattgtcaaatcgtttgtccacctgtcacattgagggcgatgaccttcatatccagaggaatgtgcagaagcttaaggacactgttaagaagctcggagaaagcggagaaattaaagccattggggagctggacctgttgttcatgagtctcagaaatgcctgtatctag

SEQ ID NO: 204643 - DNA, 540 bp, Artificial Sequence
  derived and/or modified sequence
atggccgccctccagaaatctgtctccagtttccttatgggtacactcgctactagttgtctgttgttgttggcgctgcttgtccaaggaggtgccgctgcgcctatctcctctcactgtaggctggacaaatcaaacttccagcaaccttatattactaaccgaacttttatgcttgcgaaagaggccagcctggctgataacaatacagacgtgaggttgattggagaaaaactgtttcatggcgtttccatgagcgagcggtgttacttgatgaaacaagtgctcaacttcacacttgaagaggtgttatttccccaatccgataggttccagccctacatgcaggaggtggtaccttttctggcccgcctctccaaccgactgagtacctgtcacattgagggtgatgatcttcatatacaacgtaatgtacagaagctaaaggacacggtgaagaaactgggggagtcaggtgagatcaaggcgatcggcgaattggacctgctttttatgagtctaagaaacgcttgtatttag

SEQ ID NO: 204644 - DNA, 540 bp, Artificial Sequence
  derived and/or modified sequence
atggccgccctgcagaagtctgtgagcagcttcctgatgggcaccctggccaccagctgcctgctgctgctggccctgctggtgcagggcggcgctgctgcccccatcagcagccactgccgcctggacaagagcaacttccagcagccctacatcaccaacagaaccttcatgctggccaaggaggccagcctggccgacaacaacacagatgtgcggctgattggagagaagctgttccatggagtgtccatgtctgagcgctgctacctgatgaagcaggtgctgaacttcaccctggaggaggtgctcttcccccagagcgaccgcttccagccctacatgcaggaggtggtgcccttcctggcccggctgagcaaccggctgagcacctgccacatcgagggagatgacctgcacatccagagaaatgtgcagaagctgaaggacacagtgaagaagctgggggagagcggggagatcaaggccatcggggagctggacctgctcttcatgagcctgagaaatgcctgcatctag

SEQ ID NO: 204645 - DNA, 540 bp, Artificial Sequence
  derived and/or modified sequence
atggccgccctgcagaagagcgtgagcagcttcctgatgggcacccttgctaccagctgtcttctgttgctggcactgttagttcagggcggagcagccgcaccaatttcgtctcattgccgtttggacaaaagcaactttcagcagccttatatcactaaccgaacgttcatgcttgctaaagaagcttctctcgccgacaacaacacggacgtgaggctgatcggggaaaagcttttccacggagtgtcaatgtccgaaagatgttacctgatgaaacaggttctcaattttacactggaggaagtgctctttccacagtccgaccggtttcaaccatacatgcaggaggtagtaccttttctggcccgcctatccaacaggctttcaacttgtcatatagaaggagatgacctgcatatacagaggaacgttcagaaactcaaagatactgttaagaagttgggagagagtggcgagattaaggccattggggagcttgacctgctgtttatgagcctgcgcaacgcctgtatatag

SEQ ID NO: 204646 - DNA, 540 bp, Artificial Sequence
  derived and/or modified sequence
atggccgccctgcagaagagcgtgagcagcttcctgatgggcacccttgcaacgtcttgtttgttgctgcttgcactgctggtgcaggggggggctgccgccccgatttcttcccattgtaggctggacaagagtaactttcagcagccctatatcaccaatcgcaccttcatgctcgcaaaggaggctagcctggctgacaataacaccgacgttcgacttatcggggagaagctgttccacggggtttccatgagtgaaagatgctatttgatgaagcaggtgctgaactttaccctggaggaagtgttgttcccccaatcagaccgcttccaaccttatatgcaggaggtggtaccatttcttgcccgcctgagtaaccggttaagcacatgtcacatcgagggggacgacctccatattcagaggaacgtccagaagttaaaggatacagtaaagaagctcggagagtcaggggagatcaaggccatcggagagctggacctactgtttatgagcctccggaacgcatgcatttag

SEQ ID NO: 204647 - DNA, 540 bp, Artificial Sequence
  derived and/or modified sequence
atggctgcactccaaaagtccgtctcatcctttctaatgggaactttggctacatcctgcctgctcctcctggcattgttagtgcagggtggagcagcggcaccaatctcttcgcactgtagactggacaaatccaattttcaacagccatatatcacaaaccgaactttcatgctggccaaggaggcttcccttgctgacaacaacaccgacgtcagactgattggggagaagctgttccacggcgtgtcgatgagcgagcggtgctacctcatgaaacaggttcttaatttcacattggaagaggtcctcttcccccagtccgacaggtttcagccatatatgcaggaggtcgtcccattcctcgccaggctcagcaatagacttagcacttgccatatagagggagacgaccttcatattcagcggaatgtccagaagctcaaggacaccgtcaaaaagttaggcgagagtggagagataaaagccatcggggagctcgatctgctcttcatgagcctccggaacgcctgcatctag

SEQ ID NO: 204648 - DNA, 540 bp, Artificial Sequence
  derived and/or modified sequence
atggctgcacttcagaaaagcgtaagttcattcctgatgggcacactcgccactagttgcttgctactgctggcactgttggtgcagggcggagccgcagctcccatctcttctcactgccgtctggataaatcaaatttccagcagccctacatcactaaccggaccttcatgctagctaaggaagcttctctggcagacaacaacaccgacgtgagactgatcggcgagaaattgtttcacggggtgagcatgagcgaaaggtgctacctgatgaagcaagtcttgaactttaccctggaggaggtactatttccacaatcagaccgctttcagccctacatgcaggaagtggtgccattcctagcacggcttagcaaccggttgagcacctgtcacatagagggcgatgacctgcacattcagagaaacgttcagaaattaaaggacaccgtcaagaaattgggcgagtcaggcgagattaaagcaataggggaactcgacttgcttttcatgagtctgagaaatgcctgcatttag

SEQ ID NO: 204649 - DNA, 1147 bp, Artificial Sequence
  derived and/or modified sequence
cgaccaggttctccttccccagtcaccagttgctcgagttagaattgtctgcaatggccgccctgcagaaatctgtgagctctttccttatggggaccctggccaccagctgcctccttctcttggccctcttggtacagggaggagcagctgcgcccatcagctcccactgcaggcttgacaagtccaacttccagcagccctatatcaccaaccgcaccttcatgctggctaaggaggctagcttggctgataacaacacagacgttcgtctcattggggagaaactgttccacggagtcagtatgagtgagcgctgctatctgatgaagcaggtgctgaacttcacccttgaagaagtgctgttccctcaatctgataggttccagccttatatgcaggaggtggtgcccttcctggccaggctcagcaacaggctaagcacatgtcatattgaaggtgatgacctgcatatccagaggaatgtgcaaaagctgaaggacacagtgaaaaagcttggagagagtggagagatcaaagcaattggagaactggatttgctgtttatgtctctgagaaatgcctgcatttgaccagagcaaagctgaaaaatgaataactaaccccctttccctgctagaaataacaattagatgccccaaagcgattttttttaaccaaaaggaagatgggaagccaaactccatcatgatgggtggattccaaatgaacccctgcgttagttacaaaggaaaccaatgccacttttgtttataagaccagaaggtagactttctaagcatagatatttattgataacatttcattgtaactggtgttctatacacagaaaacaatttattttttaaataattgtctttttccataaaaaagattactttccattcctttaggggaaaaaacccctaaatagcttcatgtttccataatcagtactttatatttataaatgtatttattattattataagactgcattttatttatatcattttattaatatggatttatttatagaaacatcattcgatattgctacttgagtgtaaggctaatattgatatttatgacaataattatagagctataacatgtttatttgacctcaataaacacttggatatcc

SEQ ID NO: 204650 - DNA, 1168 bp, Artificial Sequence
  derived and/or modified sequence
gtcacaagcagaatcttcagaacaggttctccttccccagtcaccagttgctcgagttagaattgtctgcaatggccgccctgcagaaatctgtgagctctttccttatggggaccctggccaccagctgcctccttctcttggccctcttggtacagggaggagcagctgcgcccatcagctcccactgcaggcttgacaagtccaacttccagcagccctatatcaccaaccgcaccttcatgctggctaaggaggctagcttggctgataacaacacagacgttcgtctcattggggagaaactgttccacggagtcagtatgagtgagcgctgctatctgatgaagcaggtgctgaacttcacccttgaagaagtgctgttccctcaatctgataggttccagccttatatgcaggaggtggtgcccttcctggccaggctcagcaacaggctaagcacatgtcatattgaaggtgatgacctgcatatccagaggaatgtgcaaaagctgaaggacacagtgaaaaagcttggagagagtggagagatcaaagcaattggagaactggatttgctgtttatgtctctgagaaatgcctgcatttgaccagagcaaagctgaaaaatgaataactaaccccctttccctgctagaaataacaattagatgccccaaagcgattttttttaaccaaaaggaagatgggaagccaaactccatcatgatgggtggattccaaatgaacccctgcgttagttacaaaggaaaccaatgccacttttgtttataagaccagaaggtagactttctaagcatagatatttattgataacatttcattgtaactggtgttctatacacagaaaacaatttattttttaaataattgtctttttccataaaaaagattactttccattcctttaggggaaaaaacccctaaatagcttcatgtttccataatcagtactttatatttataaatgtatttattattattataagactgcattttatttatatcattttattaatatggatttatttatagaaacatcattcgatattgctacttgagtgtaaggctaatattgatatttatgacaataattatagagctataacatgtttatttgacctcaataaacacttggatatcctaa

SEQ ID NO: 204651 - protein, 351 aa, Artificial Sequence
  derived and/or modified sequence
LSPGDAFWAPSVLPHSTLSTLSHHPQPQFGRRMESKVSEGGLNVTLTIRLLMHGKVRGAAIVSKGETVKKMREESGARINISEGNCPERIVTITGPTDAIFKAFAMIAYKFEEDIINSMSNSPATSKPPVTLRLVVPASQCGSLIGKGGSKIKEIRESTGAQVQVAGDMLPNSTERAVTISGTPDAIIQCVKQICVVMLESPPKGATIPYRPKPASTPVIFAGGQAYTIQGQYAIPHPDQLTKLHQLAMQQTPFPPLGQTNPAFPGLDASPPASTHELTIPNDLIGCIIGRQGTKINEIRQMSGAQIKIANATEGSSERQITITGTPANISLAQYLINARLTSEVTGMGTL

SEQ ID NO: 204652 - protein, 370 aa, Artificial Sequence
  derived and/or modified sequence
MGEGDAFWAPSVLPHSTLSTLSHHPQPQFGRRMESKVSEGGLNVTLTIRLLMHGKEVGSIIGKKGETVKKMREESGARINISEGNCPERIVTITGPTDAIFKAFAMIAYKFEEDIINSMSNSPATSKPPVTLRLVVPASQCGSLIGKGGSKIKEIRESTGAQVQVAGDMLPNSTERAVTISGTPDAIIQCVKQICVVMLESPPKGATIPYRPKPASTPVIFAGGQAYTIQGQYAIPHPDLTKLHQLAMQQTPFPPLGQTNPAFPGEKLPLHSSEEAQNLMGQSSGLDASPPASTHELTIPNDLIGCIIGRQGTKINEIRQMSGAQIKIANATEGSSERQITITGTPANISLAQYLINARLTSEVTGMGTL

SEQ ID NO: 204653 - protein, 351 aa, Artificial Sequence
  derived and/or modified sequence
MGEGDAFWAPSVLPHSTLSTLSHHPQPQFGRRMESKVSEGGLNVTLTIRLLMHGKEVGSIIGKKGETVKKMREESGARINISEGNCPERIVTITGPTDAIFKAFAMIAYKFEEDIINSMSNSPATSKPPVTLRLVVPASQCGSLIGKGGSKIKEIRESTGAQVQVAGDMLPNSTERAVTISGTPDAIIQCVKQICVVMLESPPKGATIPYRPKPASTPVIFAGGQAYTIQGQYAIPHPDQLTKLHQLAMQQTPFPPLGQTNPAFPGLDASPPASTHELTIPNDLIGCIIGRQGTKINEIRQMSGAQIKIANATEGSSERQITITGTPANISLAQYLINARLTSEVTGMGTL

SEQ ID NO: 204654 - protein, 371 aa, Artificial Sequence
  derived and/or modified sequence
MGEGDAFWAPSVLPHSTLSTLSHHPQPQFGRRMESKVSEGGLNVTLTIRLLMHGKEVGSIIGKKGETVKKMREESGARINISEGNCPERIVTITGPTDAIFKAFAMIAYKFEEDIINSMSNSPATSKPPVTLRLVVPASQCGSLIGKGGSKIKEIRESTGAQVQVAGDMLPNSTERAVTISGTPDAIIQCVKQICVVMLESPPKGATIPYRPKPASTPVIFAGGQAYTIQGQYAIPHPDQLTKLHQLAMQQTPFPPLGQTNPAFPGEKLPLHSSEEAQNLMGQSSGLDASPPASTHELTIPNDLIGCIIGRQGTKINEIRQMSGAQIKIANATEGSSERQITITGTPANISLAQYLINARLTSEVTGMGTL

SEQ ID NO: 204655 - DNA, 1056 bp, Artificial Sequence
  derived and/or modified sequence
ttgtctccaggggacgctttctgggcaccaagcgtcctgccacactcgactctatcgacactgtcccatcatcctcagccccagttcggcagaagaatggaaagcaaagtgagcgaaggcggcttaaacgttaccctgacaataagactactgatgcacgggaaagtccggggcgccgccatcgttagcaaaggggagaccgtgaagaagatgagagaggaaagtggcgcacggatcaacatctcggagggcaactgtcctgagaggatagtcaccataactggcccaaccgacgcaatatttaaggcctttgccatgatagcctataaattcgaggaagacataatcaatagtatgagtaacagcccagctacatccaaaccgcccgttacactgcggctagttgtccctgcgtctcaatgcgggtctctgattggcaagggaggcagcaagatcaaagaaattcgggagtcgacaggcgctcaggttcaagtcgccggcgacatgctgcccaattcaacggaacgggcggttaccatctcaggcacacctgatgcgatcattcagtgtgtgaaacaaatctgcgtcgtgatgcttgagtctcctcctaagggagctaccatcccttaccgtccgaagcccgcctcaacaccggtaattttcgccgggggacaagcatacaccattcaggggcaatacgcaatacctcacccagatcagctcacaaagctgcaccagcttgctatgcagcagactccgttcccaccgctggggcaaaccaaccctgccttcccgggcctggacgcttctcctcctgcgtcaacgcacgaactaactatccccaatgatcttatcgggtgcattattggccgccagggaactaaaatcaacgagatcaggcagatgtccggggcgcaaatcaaaatcgccaacgctactgagggaagttccgagcggcagatcaccatcacaggtacccctgcaaatatttccctggcccaatatctgatcaatgcccgattgacgtccgaagttactggcatggggacactttag

SEQ ID NO: 204656 - DNA, 1113 bp, Artificial Sequence
  derived and/or modified sequence
atgggggagggggatgccttttgggccccttcagttctgccccactcaacattatctaccctgtctcatcatcctcagccccagtttgggagaaggatggagtcaaaggtgtctgagggggggctgaacgtaaccctgactatccgacttttaatgcacggtaaggaggtgggcagcatcattggaaaaaaaggcgaaacggttaaaaagatgagggaagaatccggggcccggattaacatttccgagggtaactgccccgagcggatcgtaactatcaccggtccaaccgatgctatctttaaggctttcgcgatgatcgcctataaatttgaggaagatataattaactccatgagcaattcaccggctaccagtaagccacctgtgacacttcgcctggtcgtaccagcttcccaatgtggtagtctgatcggcaagggggggtccaagatcaaggagataagagaatctacaggggcacaggtccaggtggcgggcgacatgcttcctaacagtactgagcgcgctgtaactatttctggaacgcctgatgccataattcagtgtgtgaagcaaatctgtgttgtcatgctggaaagcccaccgaagggtgctaccattccatatagaccaaaacctgcttcaactcctgtcatttttgctggcggacaggcctacactatccagggccagtatgccataccacatcctgatctgactaagctccatcagctagccatgcagcaaaccccatttcccccactcggccagacaaaccccgcgtttccgggcgagaagctgcctttgcacagttccgaggaggcgcagaatctaatgggacagtcgagtggcctggatgcctccccccccgcttctacccatgagttaacaatccccaacgacttgattggttgtattattggccgccaggggaccaagattaatgagatccgccagatgagtggagcacagataaagattgccaacgccacagaaggtagctcagagcgacaaatcaccatcacaggcacaccggctaacattagtcttgctcaatatttgattaatgccaggctcacctccgaagtgaccgggatgggaacactctag

SEQ ID NO: 204657 - DNA, 1056 bp, Artificial Sequence
  derived and/or modified sequence
atgggagaaggagatgccttttgggcaccgtctgtgctccctcattcaactctgtctacactttctcaccaccctcagccacagttcggccggcgaatggaatccaaggtttcagagggcggactcaatgtgaccctcaccatcagactattaatgcacggaaaagaagttggttctataataggtaaaaagggcgagacagtgaaaaaaatgagagaagagtcaggcgccaggataaacattagtgagggtaattgcccggaacgaatagttacaatcacaggccccacagatgccatttttaaggcctttgccatgatcgcctataagtttgaagaggacattataaactctatgagcaactcccctgctacaagcaaacctcccgtgacactccgactggtggtgcctgcttcccagtgcgggtctctgattgggaagggtggtagcaaaataaaggagataagagagtccacaggagcgcaggtgcaggtggccggcgacatgctcccgaatagcaccgagcgggcagttactatctccgggacacctgatgccattattcagtgcgtcaagcagatatgcgtggtgatgctcgagtcaccccctaagggagccaccattccctatcgccccaagcctgcctccactcctgtgatctttgccggcggtcaggcatatacaatccaggggcagtacgcgatcccacacccagaccaactgactaagctccatcagttagccatgcaacagacccccttccctccccttggacagaccaaccctgctttcccaggcttggacgcgagccctcctgcttccacccacgagctcacaatccctaatgacctcataggctgtatcattgggcgccagggcaccaaaatcaacgagattagacagatgtccggagctcaaattaagattgcaaatgcaaccgagggatcatccgaacgtcagatcacgatcaccggtacgccagctaatatctctctcgcccagtacctgatcaatgcacgtcttaccagcgaagtcactggcatgggcaccctttag

SEQ ID NO: 204658 - DNA, 1116 bp, Artificial Sequence
  derived and/or modified sequence
atgggtgagggggatgctttctgggccccttccgttttgcctcacagcacactgagcaccctgtctcaccatccacagcctcagtttggtcggcggatggaatctaaggttagcgaaggtgggctgaatgtcaccctgacaattagactgctgatgcatggcaaagaagtgggctctatcatcggcaaaaaaggagaaaccgtgaagaagatgcgagaagagagcggcgccagaattaacatttctgagggcaactgccctgaacggatcgttacgattaccgggccaaccgatgcaatctttaaggcttttgcgatgatcgcctacaaattcgaagaagacatcatcaattcaatgtccaattctccggctacctccaagccccctgtgacactacggctcgtggtccctgcgtcccaatgcgggtctctgattggcaaaggaggctcaaaaatcaaggagattcgtgaatctacgggagctcaagttcaggttgcaggagacatgctgcccaattcaaccgaaagggcagtgaccatatccggcactccagacgccattatacagtgcgttaagcaaatatgcgtggtgatgttagaaagcccccctaaaggagccacaatcccgtacagacccaaaccagcatccacccccgtcatcttcgcaggaggacaggcctacactatacagggccagtacgctatcccgcaccccgatcagctgactaaactacatcaactggctatgcagcagaccccctttcctcccctaggtcagacaaaccctgccttccctggggagaaactccccctgcattcatctgaggaagcccagaatcttatgggccagagcagtggattggatgcttccccccccgcatcaacccacgagctgaccatccctaatgatcttatcggatgtatcattggaaggcaggggactaaaattaatgagatcaggcagatgagtggtgctcaaattaagatagcaaatgcaacagaggggtctagcgaacggcagataactattaccggcacaccggcgaatataagcttggcccaatatctcatcaacgccaggttaacttctgaggtcaccgggatgggtactttgtag

SEQ ID NO: 204659 - DNA, 1116 bp, Artificial Sequence
  derived and/or modified sequence
atgggggaaggtgacgcattctgggctccaagtgtgctcccccactccacattaagcacactttctcatcatcctcagccacaatttggcagacggatggaatctaaggtaagcgagggagggttgaacgtcactttaaccatccgcctgcttatgcacggcaaggaagtaggttccattatcggaaagaaaggggaaactgtgaagaagatgagggaggaatctggcgctcgaataaacatctccgagggcaactgtccagagagaattgttacaattactgggccaactgacgccatttttaaagcattcgctatgatcgcctacaagttcgaagaagacatcattaactctatgagcaattccccagcaacttccaagcctcccgtcactttgcgacttgtggtgcccgcatcgcagtgcggcagtctgattggcaagggggggtccaagatcaaggagattcgcgagagtactggagcccaggttcaggtggccggagatatgctcccgaactccacggagagggctgttaccatttcagggacccccgacgctattattcagtgcgtgaaacaaatatgtgtcgttatgcttgagtcacccccaaaaggcgctacgattccctatcggcccaagccagcaagtacacccgtgatttttgctggcggccaggcatacaccatccagggacagtacgctatcccccatccggatcagttgacaaaactgcaccagttggcaatgcagcaaaccccattccctccactgggccaaactaaccctgcctttcccggcgaaaagctcccactgcattcctccgaagaagcccaaaatttgatgggccagtcaagtggtctggacgctagtccccccgcaagcacccacgagttgactattccaaatgacttgatcggctgcattattggcaggcagggcacgaagatcaacgagatcagacagatgtccggcgcacagataaagatcgctaatgcaactgaagggagcagcgagcgccagataactatcaccgggactcccgccaacatttcactggcccagtatttaataaacgctaggcttaccagcgaagtcactggcatgggaacactctag

SEQ ID NO: 204660 - DNA, 1056 bp, Artificial Sequence
  derived and/or modified sequence
ctgagccctggagatgccttctgggcccccagcgtgctgccccacagcaccctgagcaccctgagccaccacccccagccccagtttggaagaaggatggagagcaaggtgtctgagggcggcctgaatgtgaccctgaccatccggctgctgatgcacggcaaggtgagaggagctgccatcgtgtccaagggggagaccgtgaagaagatgagggaggagagcggggcccgcatcaacatcagcgagggcaactgcccagagcgcatcgtgaccatcaccggccccacagatgccatcttcaaggcctttgccatgattgcctacaagtttgaggaggacatcatcaacagcatgagcaacagccctgccaccagcaagccccctgtgaccctgcggctggtggtgcctgccagccagtgtggcagcctgattggaaaaggaggcagcaagatcaaggagatccgggagagcactggagcccaggtgcaggtggccggggacatgctgcccaacagcacagaaagagctgtgaccatcagcggcaccccagatgccatcatccagtgtgtgaagcagatctgtgtggtgatgctggagagcccccccaagggggccaccatcccctaccggcccaagccagccagcacccctgtgatctttgctgggggccaggcctacaccatccagggccagtatgccatcccccacccagaccagctgaccaagctgcaccagctggccatgcagcagacccccttcccccccctgggccagaccaacccagccttccctggcctggatgccagccccccagccagcacccatgagctgaccatccccaatgacctgattggctgcatcatcggccggcagggcaccaagatcaatgagatccggcagatgtctggggcccagatcaagatcgccaatgccacagagggcagcagcgagcggcagatcaccatcaccggcaccccagccaacatcagcctggcccagtacctgatcaatgcccggctgaccagcgaggtgacaggcatgggcaccctgtag

SEQ ID NO: 204661 - DNA, 1113 bp, Artificial Sequence
  derived and/or modified sequence
atgggagaaggagatgccttctgggcccccagcgtgctgccccacagcaccctgagcaccctgagccaccacccccagccccagtttggaagaaggatggagagcaaggtgtctgagggcggcctgaatgtgaccctgaccatccggctgctgatgcacggcaaggaggtgggcagcatcatcggcaagaagggggagaccgtgaagaagatgagggaggagagcggggcccgcatcaacatcagcgagggcaactgcccagagcgcatcgtgaccatcaccggccccacagatgccatcttcaaggcctttgccatgattgcctacaagtttgaggaggacatcatcaacagcatgagcaacagccctgccaccagcaagccccctgtgaccctgcggctggtggtgcctgccagccagtgtggcagcctgattggaaaaggaggcagcaagatcaaggagatccgggagagcactggagcccaggtgcaggtggccggggacatgctgcccaacagcacagaaagagctgtgaccatcagcggcaccccagatgccatcatccagtgtgtgaagcagatctgtgtggtgatgctggagagcccccccaagggggccaccatcccctaccggcccaagccagccagcacccctgtgatctttgctgggggccaggcctacaccatccagggccagtatgccatcccccacccagacctgaccaagctgcaccagctggccatgcagcagacccccttcccccccctgggccagaccaacccagccttccctggagagaagctgcccctgcacagcagcgaggaggcccagaacctgatgggccagagcagcggcctggatgccagccccccagccagcacccatgagctgaccatccccaatgacctgattggctgcatcatcggccggcagggcaccaagatcaatgagatccggcagatgtctggggcccagatcaagatcgccaatgccacagagggcagcagcgagcggcagatcaccatcaccggcaccccagccaacatcagcctggcccagtacctgatcaatgcccggctgaccagcgaggtgacaggcatgggcaccctgtag

SEQ ID NO: 204662 - DNA, 1056 bp, Artificial Sequence
  derived and/or modified sequence
atgggagaaggagatgccttctgggcccccagcgtgctgccccacagcaccctgagcaccctgagccaccacccccagccccagtttggaagaaggatggagagcaaggtgtctgagggcggcctgaatgtgaccctgaccatccggctgctgatgcacggcaaggaggtgggcagcatcatcggcaagaagggggagaccgtgaagaagatgagggaggagagcggggcccgcatcaacatcagcgagggcaactgcccagagcgcatcgtgaccatcaccggccccacagatgccatcttcaaggcctttgccatgattgcctacaagtttgaggaggacatcatcaacagcatgagcaacagccctgccaccagcaagccccctgtgaccctgcggctggtggtgcctgccagccagtgtggcagcctgattggaaaaggaggcagcaagatcaaggagatccgggagagcactggagcccaggtgcaggtggccggggacatgctgcccaacagcacagaaagagctgtgaccatcagcggcaccccagatgccatcatccagtgtgtgaagcagatctgtgtggtgatgctggagagcccccccaagggggccaccatcccctaccggcccaagccagccagcacccctgtgatctttgctgggggccaggcctacaccatccagggccagtatgccatcccccacccagaccagctgaccaagctgcaccagctggccatgcagcagacccccttcccccccctgggccagaccaacccagccttccctggcctggatgccagccccccagccagcacccatgagctgaccatccccaatgacctgattggctgcatcatcggccggcagggcaccaagatcaatgagatccggcagatgtctggggcccagatcaagatcgccaatgccacagagggcagcagcgagcggcagatcaccatcaccggcaccccagccaacatcagcctggcccagtacctgatcaatgcccggctgaccagcgaggtgacaggcatgggcaccctgtag

SEQ ID NO: 204663 - DNA, 1116 bp, Artificial Sequence
  derived and/or modified sequence
atgggagaaggagatgccttctgggcccccagcgtgctgccccacagcaccctgagcaccctgagccaccacccccagccccagtttggaagaaggatggagagcaaggtgtctgagggcggcctgaatgtgaccctgaccatccggctgctgatgcacggcaaggaggtgggcagcatcatcggcaagaagggggagaccgtgaagaagatgagggaggagagcggggcccgcatcaacatcagcgagggcaactgcccagagcgcatcgtgaccatcaccggccccacagatgccatcttcaaggcctttgccatgattgcctacaagtttgaggaggacatcatcaacagcatgagcaacagccctgccaccagcaagccccctgtgaccctgcggctggtggtgcctgccagccagtgtggcagcctgattggaaaaggaggcagcaagatcaaggagatccgggagagcactggagcccaggtgcaggtggccggggacatgctgcccaacagcacagaaagagctgtgaccatcagcggcaccccagatgccatcatccagtgtgtgaagcagatctgtgtggtgatgctggagagcccccccaagggggccaccatcccctaccggcccaagccagccagcacccctgtgatctttgctgggggccaggcctacaccatccagggccagtatgccatcccccacccagaccagctgaccaagctgcaccagctggccatgcagcagacccccttcccccccctgggccagaccaacccagccttccctggagagaagctgcccctgcacagcagcgaggaggcccagaacctgatgggccagagcagcggcctggatgccagccccccagccagcacccatgagctgaccatccccaatgacctgattggctgcatcatcggccggcagggcaccaagatcaatgagatccggcagatgtctggggcccagatcaagatcgccaatgccacagagggcagcagcgagcggcagatcaccatcaccggcaccccagccaacatcagcctggcccagtacctgatcaatgcccggctgaccagcgaggtgacaggcatgggcaccctgtag

SEQ ID NO: 204664 - DNA, 1056 bp, Artificial Sequence
  derived and/or modified sequence
ctgagccccggcgacgccttctgggcccccagcgtgctgccccactctactctctcaacgctgagtcatcacccccagcctcagtttggtcgccgcatggagtcgaaagtttcggagggcggactgaacgtgacgttgaccattcgactgcttatgcacggtaaggtcagaggagcagctatagtttccaaaggagagacagtcaagaaaatgcgggaggaatcaggcgcccgcatcaatatcagtgaggggaattgtcctgagcggatagtgactatcacaggacccactgatgccattttcaaggcatttgccatgatcgcttacaaatttgaagaagacatcattaactcgatgtccaacagcccagccacgagtaaaccccccgtaaccctcaggctagtggtgcctgcttcacagtgcgggagcctgatcggaaagggagggagtaaaattaaggagattagggagagtactggggcacaagtgcaggtggccggagacatgctgcccaattcgaccgaaagagctgttaccatcagcgggactcccgatgcaatcattcaatgtgtcaaacagatatgcgtggtgatgctggagtctccgccgaagggcgccaccattccctaccgacccaaacccgcctctacccctgtgatctttgcgggggggcaggcctacactattcaggggcagtatgccataccacaccccgaccagctgacaaagcttcaccagctggctatgcagcaaactccttttcccccactgggacagacaaatcctgcttttcccggattggacgcctccccacctgcctccactcacgagttaaccatccctaacgacctgatagggtgcatcatcggccgccagggaaccaaaatcaatgagatccgccaaatgagtggtgcccagatcaagattgcgaatgctacagaaggcagttccgaaagacagatcaccatcaccgggacaccagccaacatctcactggctcagtacctgattaacgctcgcttgacaagcgaggtaaccggcatggggacactctag

SEQ ID NO: 204665 - DNA, 1113 bp, Artificial Sequence
  derived and/or modified sequence
atgggcgagggcgacgccttctgggcccccagcgtgctgccccacagtactctcagtaccctgtcccaccacccccagccgcagtttggacgaaggatggagtcaaaagtaagcgagggcggactcaacgtcacgctgacaattcgactgctcatgcatggcaaagaagtcggttccataatcggcaaaaaaggcgaaaccgtgaaaaaaatgagagaggaatccggcgccagaattaacatcagcgagggcaattgcccagagcgaatcgttactataactggcccaactgacgccatattcaaagctttcgccatgatcgcctacaaatttgaagaagacattatcaactcgatgagcaattctcccgcaacctctaaaccaccagtcaccctgcggctcgtggtgccggcctcacaatgcggcagccttattggcaagggaggaagtaagatcaaggagattcgggaaagcaccggcgcacaggtccaggtcgctggagacatgctgcccaacagcaccgagagggctgttacaattagtggcactcccgatgcaatcattcaatgcgtaaaacaaatctgcgtggttatgctggagagtccccctaagggggccaccattccgtataggccgaagccggcaagtactccagtaatttttgccggcgggcaggcttatacaatccagggccaatatgccatcccgcaccccgacctgaccaagctgcaccaactggccatgcagcagacgccatttccccccctgggccaaactaatccggcattccctggcgagaaattgcctctgcacagctctgaggaggcccagaatttgatgggtcagtcatctggactggatgcatctcctccagcctctacacatgaactcactatacccaatgacctcataggatgtataatagggaggcaggggacaaagatcaatgaaatccgccagatgtcaggggcgcagattaaaattgcaaatgcaaccgaaggttccagcgagcgccaaatcacgatcactggcacacctgctaatatcagtctcgcacaatacctaattaacgctcggctaactagtgaggttaccgggatgggcaccctgtag

SEQ ID NO: 204666 - DNA, 1056 bp, Artificial Sequence
  derived and/or modified sequence
atgggcgagggcgacgccttctgggcccccagcgtgctgccccactccacactctctaccctgagccatcaccctcagccccagttcggacgtagaatggagagcaaggtgagcgaaggcggcctcaacgtcaccctgacgattcgtttgttgatgcatgggaaggaagtgggctccatcatcggtaaaaaaggcgaaaccgtcaagaaaatgcgcgaagagtctggcgctcgtattaacatttctgaagggaattgtccggagagaatcgtgacaataactgggccaactgacgcgatcttcaaagcatttgctatgatcgcatacaagttcgaggaggacatcattaactccatgtccaattcccccgctacgtcaaagccgcctgtcactctccgtttggtggtccccgcaagtcaatgtggcagcttgatcgggaagggaggttcaaaaatcaaggaaattagagaaagcactggcgcccaggtccaggtggctggtgatatgctgccgaatagtacagagagagccgtcaccatctccggcacccctgacgccataatccaatgtgtcaaacagatctgcgtcgtgatgctggagagtccccccaaaggggccaccatcccttatagacctaaaccagcctccactcctgttatattcgcaggtggccaggcctatacgatacaggggcagtatgctatccctcaccctgaccagctgactaaactgcaccagctcgcaatgcagcagactccatttccgcctctggggcagaccaatccggctttccccgggctggacgccagcccacctgcctcgacccacgaactgacgataccaaatgatctgatagggtgtatcataggccgccaagggaccaaaatcaatgaaattcgtcagatgagtggcgcacagattaaaatagccaacgccactgagggcagctccgaacggcagattactattaccggaactcccgctaacatatctcttgctcagtaccttattaacgctcggttaactagtgaagtgacgggaatggggactctatag

SEQ ID NO: 204667 - DNA, 1116 bp, Artificial Sequence
  derived and/or modified sequence
atgggcgagggcgacgccttctgggcccccagcgtgctgccccactccactctctctaccttgtcgcaccatccccaaccccaattcgggcgccggatggagtccaaagtcagtgaaggaggcctgaatgttacgctgacaattagattactaatgcacggcaaagaggtgggctcaattattggcaagaaaggggaaacagtgaaaaagatgcgcgaggagtctggcgcaagaatcaacatctccgaggggaactgccccgagaggatcgtcacaatcaccggacccacagatgccatcttcaaggccttcgctatgatcgcctacaaatttgaggaagacattatcaacagtatgtccaacagcccagctacaagcaagccacctgtcacactgaggctcgtagtacctgcctcacagtgtggctcccttatcggcaaggggggctctaaaatcaaagaaattagggagtcaacaggggcgcaggtgcaggtcgcgggtgacatgcttcccaacagcaccgaaagagctgtgacaatctcaggcactccagatgcgatcatccagtgcgtgaaacaaatttgcgtcgtgatgctcgaatcaccccccaagggcgccacaatcccttacagacccaagcccgccagcactccggtgatcttcgctggggggcaggcctatacaatccaaggccagtatgctatcccccaccctgatcagctgactaaattacaccagcttgccatgcagcagacaccattcccccctctcggtcagacaaatccagctttccccggggaaaaactacccttgcacagtagcgaggaggcccaaaacttgatggggcagtcttcagggttagatgcatctccaccggcgagtacccatgaacttacaattccaaacgacttaataggttgcataatcgggaggcagggcacaaagattaatgagatacggcagatgtccggagcccagattaaaatcgctaacgccacggaaggatcaagcgaacgccagattacaatcacagggactcctgccaatatcagccttgcgcagtacctgattaatgcccggctaacgtctgaggtcacagggatgggtaccctctag

SEQ ID NO: 204668 - DNA, 1116 bp, Artificial Sequence
  derived and/or modified sequence
atgggcgagggcgacgccttctgggcccccagcgtgctgccccactccactttaagcacactctcccaccatccccaacctcaattcggccgacgaatggagagcaaggttagcgagggcgggctaaatgtgacactgacaatcagactcctgatgcacggaaaggaggtgggaagcattatcggaaaaaaaggggagaccgttaaaaagatgagggaggagtccggcgcacgaatcaatatttccgagggcaactgtcccgagagaatcgtgaccatcactggtcccaccgatgctatcttcaaagcatttgctatgatcgcttataagtttgaagaagatataatcaacagtatgtctaatagccctgccacaagcaagccgcctgtcacactacggttagtggttccagcctctcagtgcgggagcctgataggcaaaggcggatcaaagattaaagagatccgcgagtccaccggggctcaggttcaggtcgctggcgatatgttaccaaatagtaccgaacgtgctgtgacaataagcggcaccccggacgcgatcattcagtgcgtgaaacagatctgtgttgtgatgttagagtccccgcctaagggagcaaccatcccataccggccaaaaccagcctccacccccgtcattttcgcgggtgggcaagcttacacaatacaggggcagtacgcgatcccacaccccgatcagctcactaagcttcatcagctggccatgcagcagaccccattccccccattgggacagaccaaccccgccttccccggggagaaattgccactccatagtagcgaggaagcccagaacttgatgggccagtcttccggacttgacgcaagcccaccggcatccacgcatgaactgaccattcccaacgatctgatcggatgcatcattggtaggcaaggcaccaaaattaatgagatccggcaaatgtccggcgcccagatcaagattgctaatgccacggaaggttcttcagaacggcagatcactatcaccgggactcccgccaacatctcactggcacagtatttgattaatgccaggttgacatctgaggtcacaggaatgggcaccctgtag

SEQ ID NO: 204669 - DNA, 1772 bp, Artificial Sequence
  derived and/or modified sequence
ctctctccaggtgacgccttctgggccccatctgtccttcctcacagcaccctcagcaccttaagccaccaccctcagccacaatttggcagaaggatggagtccaaggtctcagaaggtggcctgaatgtgaccctcaccatccgcctgctgatgcatggaaaggtaagaggagccgccattgtctctaaaggagaaactgtgaagaagatgcgtgaggagagtggtgcaaggatcaacatctcagagggaaactgcccagagaggattgtgaccatcacaggccccacagacgccatcttcaaggcctttgccatgatcgcatacaagtttgaggaggatatcatcaactccatgagcaacagccctgccaccagcaagcccccagtgacgctgaggctggtggtgcctgccagccagtgtgggtccctgatcggcaaaggaggctccaagatcaaggagatcagggagtccacaggtgcccaggtgcaggtggctggggacatgctgcccaactccacggagcgagcggtgaccatctcggggaccccagatgccatcatccagtgcgtcaagcagatctgtgtggtcatgctggagtccccaccgaaaggtgccaccattccctaccgcccaaagcccgcctccacccctgtcatttttgcaggtggtcaggcctacacaatccagggacagtatgccatccctcacccggatcagttgaccaagctccaccagttggccatgcagcaaaccccctttcctcccctcggacagaccaaccccgctttccccggtctggacgccagcccaccggccagcactcatgagctcaccattcccaatgatctaataggctgcataattggacgccaagggaccaaaatcaatgaaattcgacagatgtctggagctcagatcaaaatcgccaacgccacggaagggtcctcagagcgtcagatcaccatcacggggaccccggccaacatcagccttgcccagtatctcatcaacgccaggctgacgtccgaggtcaccgggatgggcacgctgtaatcctacccagcacccttcccccgcgtcacccacctgccagagcctaaggcccccggctctcgcactctgtacagcccaccttccctgcctcacagataccaatagagaggttttcttaattaacaaaaggacgtatgccatggagaaacacacccgcgcacacagctgctctctacagaggctgcaggctccgccgagtcccccctcagtgttattttatttatgacttacgctcccgtctgcccatgcaccggcatgcagtggtaattattttagaaatattgttccttggtgtcagcgtagctgtctgtcttaggagctgggtcggcgttccgacagcacttcctgtccgcccttctcctctgccatccagaaccgtccagaactgttgcctgagacccctcctctctcacacagccctgccatgctgactcggtttcccctcagagccattgttgtctgggctcgagtttctgccccaggttgtgtgctggaatcggggggtggctctcctgccacccatggggagcgccaggagaggagggtcatggaggatgttggggctctgaccccaggagtggggtggagggcggagcctgctgggggccctgccttcacagagatgccgcgtgctgggaaggctcttggggtcccctgagcgtcttccagggtggctggagagcacagacgcgccagggagccccctctgtgctcct

SEQ ID NO: 204670 - DNA, 1986 bp, Artificial Sequence
  derived and/or modified sequence
gtcggtaggctccacgacaaaagtcaacccttctgtaaatcacctgctgtggttatgatgctctgagttcaatacgtctgaacctttgctgtctatggatctgctctaaaccttatagcctgcttatgggggaaggtgacgccttctgggccccatctgtccttcctcacagcaccctcagcaccttaagccaccaccctcagccacaatttggcagaaggatggagtccaaggtctcagaaggtggcctgaatgtgaccctcaccatccgcctgctgatgcatggaaaggaagttggaagcatcatcgggaagaaaggagaaactgtgaagaagatgcgtgaggagagtggtgcaaggatcaacatctcagagggaaactgcccagagaggattgtgaccatcacaggccccacagacgccatcttcaaggcctttgccatgatcgcatacaagtttgaggaggatatcatcaactccatgagcaacagccctgccaccagcaagcccccagtgacgctgaggctggtggtgcctgccagccagtgtgggtccctgatcggcaaaggaggctccaagatcaaggagatcagggagtccacaggtgcccaggtgcaggtggctggggacatgctgcccaactccacggagcgagcggtgaccatctcggggaccccagatgccatcatccagtgcgtcaagcagatctgtgtggtcatgctggagtccccaccgaaaggtgccaccattccctaccgcccaaagcccgcctccacccctgtcatttttgcaggtggtcaggcctacacaatccagggacagtatgccatccctcacccggatttgaccaagctccaccagttggccatgcagcaaaccccctttcctcccctcggacagaccaaccccgctttccccggagaaaagctgcctttacactcctccgaagaagctcaaaatctgatgggccagtcatcaggtctggacgccagcccaccggccagcactcatgagctcaccattcccaatgatctaataggctgcataattggacgccaagggaccaaaatcaatgaaattcgacagatgtctggagctcagatcaaaatcgccaacgccacggaagggtcctcagagcgtcagatcaccatcacggggaccccggccaacatcagccttgcccagtatctcatcaacgccaggctgacgtccgaggtcaccgggatgggcacgctgtaatcctacccagcacccttcccccgcgtcacccacctgccagagcctaaggcccccggctctcgcactctgtacagcccaccttccctgcctcacagataccaatagagaggttttcttaattaacaaaaggacgtatgccatggagaaacacacccgcgcacacagctgctctctacagaggctgcaggctccgccgagtcccccctcagtgttattttatttatgacttacgctcccgtctgcccatgcaccggcatgcagtggtaattattttagaaatattgttccttggtgtcagcgtagctgtctgtcttaggagctgggtcggcgttccgacagcacttcctgtccgcccttctcctctgccatccagaaccgtccagaactgttgcctgagacccctcctctctcacacagccctgccatgctgactcggtttcccctcagagccattgttgtctgggctcgagtttctgccccaggttgtgtgctggaatcggggggtggctctcctgccacccatggggagcgccaggagaggagggtcatggaggatgttggggctctgaccccaggagtggggtggagggcggagcctgctgggggccctgccttcacagagatgccgcgtgctgggaaggctcttggggtcccctgagcgtcttccagggtggctggagagcacagacgcgccagggagccccctctgtgctcctcagagttcaataaatgtcgtggcccctcctca

SEQ ID NO: 204671 - DNA, 2168 bp, Artificial Sequence
  derived and/or modified sequence
gtacacgccatggtgtgggagcagcctgaccatcgggactcaggagcttacagaattttctggggtttcgatactctagaggtttcccctggttacttggcgaatattctatgaaaatgaagagaatgaagtgaagtcagagtcatttactcagaatgcaccctactgtaaatggagaggatgctacttggagtgtgtggtctgtataaatggagaggatgcatatgaagttacaaagggtcggtaggctccacgacaaaagtcaacccttctgtaaatcacctgctgtggttatgatgctctgagttcaatacgtctgaacctttgctgtctatggatctgctctaaaccttatagcctgcttatgggggaaggtgacgccttctgggccccatctgtccttcctcacagcaccctcagcaccttaagccaccaccctcagccacaatttggcagaaggatggagtccaaggtctcagaaggtggcctgaatgtgaccctcaccatccgcctgctgatgcatggaaaggaagttggaagcatcatcgggaagaaaggagaaactgtgaagaagatgcgtgaggagagtggtgcaaggatcaacatctcagagggaaactgcccagagaggattgtgaccatcacaggccccacagacgccatcttcaaggcctttgccatgatcgcatacaagtttgaggaggatatcatcaactccatgagcaacagccctgccaccagcaagcccccagtgacgctgaggctggtggtgcctgccagccagtgtgggtccctgatcggcaaaggaggctccaagatcaaggagatcagggagtccacaggtgcccaggtgcaggtggctggggacatgctgcccaactccacggagcgagcggtgaccatctcggggaccccagatgccatcatccagtgcgtcaagcagatctgtgtggtcatgctggagtccccaccgaaaggtgccaccattccctaccgcccaaagcccgcctccacccctgtcatttttgcaggtggtcaggcctacacaatccagggacagtatgccatccctcacccggatcagttgaccaagctccaccagttggccatgcagcaaaccccctttcctcccctcggacagaccaaccccgctttccccggtctggacgccagcccaccggccagcactcatgagctcaccattcccaatgatctaataggctgcataattggacgccaagggaccaaaatcaatgaaattcgacagatgtctggagctcagatcaaaatcgccaacgccacggaagggtcctcagagcgtcagatcaccatcacggggaccccggccaacatcagccttgcccagtatctcatcaacgccaggctgacgtccgaggtcaccgggatgggcacgctgtaatcctacccagcacccttcccccgcgtcacccacctgccagagcctaaggcccccggctctcgcactctgtacagcccaccttccctgcctcacagataccaatagagaggttttcttaattaacaaaaggacgtatgccatggagaaacacacccgcgcacacagctgctctctacagaggctgcaggctccgccgagtcccccctcagtgttattttatttatgacttacgctcccgtctgcccatgcaccggcatgcagtggtaattattttagaaatattgttccttggtgtcagcgtagctgtctgtcttaggagctgggtcggcgttccgacagcacttcctgtccgcccttctcctctgccatccagaaccgtccagaactgttgcctgagacccctcctctctcacacagccctgccatgctgactcggtttcccctcagagccattgttgtctgggctcgagtttctgccccaggttgtgtgctggaatcggggggtggctctcctgccacccatggggagcgccaggagaggagggtcatggaggatgttggggctctgaccccaggagtggggtggagggcggagcctgctgggggccctgccttcacagagatgccgcgtgctgggaaggctcttggggtcccctgagcgtcttccagggtggctggagagcacagacgcgccagggagccccctctgtgctcctcagagttcaataaatgtcgtggcccctcctca

SEQ ID NO: 204672 - DNA, 2202 bp, Artificial Sequence
  derived and/or modified sequence
tcgggctggagcgcctgaagccgcgaccgccgcctcagccgcctcagccgcggtcgccgccgcttcggctgacttaggctccgccgccgcctcctcacccgcctcgccccgaccccgcccgggcctcccggcctctccccgccggcccgcgggctcgccgtccggcgcagggcaggactgtctacaagagagaagctccccacgtggttccgtgtcggtaggctccacgacaaaagtcaacccttctgtaaatcacctgctgtggttatgatgctctgagttcaatacgtctgaacctttgctgtctatggatctgctctaaaccttatagcctgcttatgggggaaggtgacgccttctgggccccatctgtccttcctcacagcaccctcagcaccttaagccaccaccctcagccacaatttggcagaaggatggagtccaaggtctcagaaggtggcctgaatgtgaccctcaccatccgcctgctgatgcatggaaaggaagttggaagcatcatcgggaagaaaggagaaactgtgaagaagatgcgtgaggagagtggtgcaaggatcaacatctcagagggaaactgcccagagaggattgtgaccatcacaggccccacagacgccatcttcaaggcctttgccatgatcgcatacaagtttgaggaggatatcatcaactccatgagcaacagccctgccaccagcaagcccccagtgacgctgaggctggtggtgcctgccagccagtgtgggtccctgatcggcaaaggaggctccaagatcaaggagatcagggagtccacaggtgcccaggtgcaggtggctggggacatgctgcccaactccacggagcgagcggtgaccatctcggggaccccagatgccatcatccagtgcgtcaagcagatctgtgtggtcatgctggagtccccaccgaaaggtgccaccattccctaccgcccaaagcccgcctccacccctgtcatttttgcaggtggtcaggcctacacaatccagggacagtatgccatccctcacccggatcagttgaccaagctccaccagttggccatgcagcaaaccccctttcctcccctcggacagaccaaccccgctttccccggagaaaagctgcctttacactcctccgaagaagctcaaaatctgatgggccagtcatcaggtctggacgccagcccaccggccagcactcatgagctcaccattcccaatgatctaataggctgcataattggacgccaagggaccaaaatcaatgaaattcgacagatgtctggagctcagatcaaaatcgccaacgccacggaagggtcctcagagcgtcagatcaccatcacggggaccccggccaacatcagccttgcccagtatctcatcaacgccaggctgacgtccgaggtcaccgggatgggcacgctgtaatcctacccagcacccttcccccgcgtcacccacctgccagagcctaaggcccccggctctcgcactctgtacagcccaccttccctgcctcacagataccaatagagaggttttcttaattaacaaaaggacgtatgccatggagaaacacacccgcgcacacagctgctctctacagaggctgcaggctccgccgagtcccccctcagtgttattttatttatgacttacgctcccgtctgcccatgcaccggcatgcagtggtaattattttagaaatattgttccttggtgtcagcgtagctgtctgtcttaggagctgggtcggcgttccgacagcacttcctgtccgcccttctcctctgccatccagaaccgtccagaactgttgcctgagacccctcctctctcacacagccctgccatgctgactcggtttcccctcagagccattgttgtctgggctcgagtttctgccccaggttgtgtgctggaatcggggggtggctctcctgccacccatggggagcgccaggagaggagggtcatggaggatgttggggctctgaccccaggagtggggtggagggcggagcctgctgggggccctgccttcacagagatgccgcgtgctgggaaggctcttggggtcccctgagcgtcttccagggtggctggagagcacagacgcgccagggagccccctctgtgctcctcagagttcaataaatgtcgtggcccctcctca

SEQ ID NO: 204673 - DNA, 1988 bp, Artificial Sequence
  derived and/or modified sequence
gtcggtaggctccacgacaaaagtcaacccttctgtaaatcacctgctgtggttatgatgctctgagttcaatacgtctgaacctttgctgtctatggatctgctctaaaccttatagcctgcttatgggggaaggtgacgccttctgggccccatctgtccttcctcacagcaccctcagcaccttaagccaccaccctcagccacaatttggcagaaggatggagtccaaggtctcagaaggtggcctgaatgtgaccctcaccatccgcctgctgatgcatggaaaggaagttggaagcatcatcgggaagaaaggagaaactgtgaagaagatgcgtgaggagagtggtgcaaggatcaacatctcagagggaaactgcccagagaggattgtgaccatcacaggccccacagacgccatcttcaaggcctttgccatgatcgcatacaagtttgaggaggatatcatcaactccatgagcaacagccctgccaccagcaagcccccagtgacgctgaggctggtggtgcctgccagccagtgtgggtccctgatcggcaaaggaggctccaagatcaaggagatcagggagtccacaggtgcccaggtgcaggtggctggggacatgctgcccaactccacggagcgagcggtgaccatctcggggaccccagatgccatcatccagtgcgtcaagcagatctgtgtggtcatgctggagtccccaccgaaaggtgccaccattccctaccgcccaaagcccgcctccacccctgtcatttttgcaggtggtcaggcctacacaatccagggacagtatgccatccctcacccggatcagttgaccaagctccaccagttggccatgcagcaaaccccctttcctcccctcggacagaccaaccccgctttccccggagaaaagctgcctttacactcctccgaagaagctcaaaatctgatgggccagtcatcaggtctggacgccagcccaccggccagcactcatgagctcaccattcccaatgatctaataggctgcataattggacgccaagggaccaaaatcaatgaaattcgacagatgtctggagctcagatcaaaatcgccaacgccacggaagggtcctcagagcgtcagatcaccatcacggggaccccggccaacatcagccttgcccagtatctcatcaacgccaggctgacgtccgaggtcaccgggatgggcacgctgtaatcctacccagcacccttcccccgcgtcacccacctgccagagcctaaggcccccggctctcgcactctgtacagcccaccttccctgcctcacagataccaatagagaggttttcttaattaacaaaaggacgtatgccatggagaaacacacccgcgcacacagctgctctctacagaggctgcaggctccgccgagtcccccctcagtgttattttatttatgacttacgctcccgtctgcccatgcaccggcatgcagtggtaattattttagaaatattgttccttggtgtcagcgtagctgtctgtcttaggagctgggtcggcgttccgacagcacttcctgtccgcccttctcctctgccatccagaaccgtccagaactgttgcctgagacccctcctctctcacacagccctgccatgctgactcggtttcccctcagagccattgttgtctgggctcgagtttctgccccaggttgtgtgctggaatcggggggtggctctcctgccacccatggggagcgccaggagaggagggtcatggaggatgttggggctctgaccccaggagtggggtggagggcggagcctgctgggggccctgccttcacagagatgccgcgtgctgggaaggctcttggggtcccctgagcgtcttccagggtggctggagagcacagacgcgccagggagccccctctgtgctcctcagagttcaataaatgtcgtggcccctcctc

SEQ ID NO: 204674 - DNA, 1056 bp, Artificial Sequence
  derived and/or modified sequence
ctgagccccggtgacgctttctgggctccatccgtgctaccccactcaacactgtcaacactctctcaccacccacagccccaatttgggaggcgtatggaaagcaaagtgtctgagggcggacttaacgtgactctcaccattaggctcctcatgcatgggaaggtgcgcggagcggcaatagtgtctaagggcgaaactgtcaagaagatgagggaagagagcggtgcccgaatcaacattagtgaaggaaactgtccagaaagaatcgtcaccattaccggaccgacagatgccatcttcaaggcgttcgccatgatcgcgtataaatttgaggaggacatcatcaacagcatgagcaactctcccgctactagcaagccgccagtgacattgcgcctggtcgtgccggcttctcaatgtgggagcctgatcggcaaggggggaagcaaaattaaagagatccgggagagcacaggagcccaggtccaggtagccggtgatatgctccccaacagtacggaacgtgcggtgactatatccggtacacccgacgccatcattcagtgtgtcaagcaaatttgcgtggttatgttggagtcgccgcctaagggagcaaccataccataccgaccaaaaccagcatctacccccgtgatttttgcgggaggccaagcctataccattcaggggcaatatgcaattcctcaccccgatcagctgacaaagttacaccagctggccatgcagcagaccccgttccccccacttggacagaccaaccctgcctttccaggcctggatgcgagtccccctgcatctacacacgagctgacaattcccaacgatttaattgggtgtattatcggacggcagggaacgaaaattaatgagattcgccaaatgtccggcgcacagataaagatcgccaatgctacagaaggtagctctgagcgtcaaattacgatcacaggcactcccgcaaatattagcctggcccaatacctgatcaacgctaggcttacttcagaggtgacggggatgggcactctctag

SEQ ID NO: 204675 - DNA, 1113 bp, Artificial Sequence
  derived and/or modified sequence
atgggcgagggtgatgccttctgggcaccttcagtccttccccacagtactctgagcaccctgtcacaccatcctcagccacagttcggccgacgcatggagtccaaggtatcagaggggggacttaatgtgaccctcacaatacgtctgctgatgcacggaaaggaagtcggctccatcatcggcaaaaagggcgagaccgtcaagaaaatgcgggaggaatccggggctcgaatcaatatctctgaaggaaactgtcctgagcgaattgtgaccatcaccgggcctacagatgcgatcttcaaggcatttgcaatgatagcatacaaatttgaagaggacataatcaactctatgtccaatagtccggctacgtctaagcctcccgtgactctgagactcgtcgtgcctgcatctcagtgtgggagcctaatagggaaagggggttccaaaattaaggaaatacgggaatccacgggtgcccaggtacaagttgctggcgatatgctgcctaacagcacggagagagccgtaaccatctcgggtacacctgatgccatcattcagtgcgtcaagcagatttgtgtggtgatgctcgagagcccgccaaagggcgctactattccttaccggcctaagcccgcttccactccggtgatatttgctgggggacaagcttacactatccagggccagtatgccattccccatccagatctgaccaagttacaccagctggcaatgcaacagacacccttccctccattgggtcagacaaacccagcatttccaggcgaaaagctccccctgcattcaagcgaggaggcccagaatctgatgggccagagcagtggacttgacgcatcaccccctgccagtacccatgagttgaccatccctaacgatctgatagggtgtatcattggtcgacaaggaacgaagatcaatgagatacggcagatgagcggcgctcagatcaaaatcgccaatgctacggaaggctcctccgagagacaaataaccatcacaggaacaccagccaacatctcccttgcacaatacctgatcaatgccagattgacttcagaagtgacaggcatgggaaccttgtag

SEQ ID NO: 204676 - DNA, 1056 bp, Artificial Sequence
  derived and/or modified sequence
atgggtgaaggcgatgcattctgggcaccaagtgtgctgcctcactcaacattgtctaccctgtcccatcaccctcaaccacagttcggacgccgaatggagtctaaggtgagcgaagggggtttgaacgtcactctcaccataagattattgatgcatggaaaagaggtgggaagtatcattgggaagaagggagaaacggtgaagaagatgcgggaggagagcggtgcacgtattaacatctctgaggggaattgcccagaacgtatcgtcaccatcactggccctacagacgcgattttcaaggcctttgctatgattgcctataaatttgaggaggacattataaatagtatgagcaatagcccagcaactagtaagcctcccgtgaccttgcgccttgtggtacctgcctcccagtgtggctctctgataggcaaaggtgggagcaagatcaaggagatcagggaaagtacaggagctcaggtacaggtcgccggtgacatgctcccgaacagcacagagcgggctgtgaccattagtggaacgccggacgcaatcatccagtgcgtgaaacagatctgcgtggtcatgctggaaagtccgccaaagggcgcaaccataccatacagacccaagccagcgagtaccccagtcatttttgcgggaggccaggcctacactatccagggccagtacgctattccacatcccgatcagctgaccaagcttcatcagcttgccatgcagcagaccccctttcctcccttagggcagactaaccctgcctttcctgggttagacgcatctccacccgcttccacacacgagctcacaatacctaacgatctgattggatgcatcatcggtcgacaggggacaaagattaacgagatccgtcagatgagtggagcacagatcaagatcgcaaatgcaacggagggctcttcggagcgtcagattacaattactggtacacctgcaaatatctccctcgcacaatacctcatcaacgcacgcctgacaagtgaagtgacaggaatgggcaccctgtag

SEQ ID NO: 204677 - DNA, 1116 bp, Artificial Sequence
  derived and/or modified sequence
atgggagagggtgacgccttctgggccccttcagttcttccccactccaccctcagcaccctctcacaccaccctcagccccagtttgggcgtcggatggagagcaaggtttcagaggggggacttaacgtgactctgactattcgcctgcttatgcacggaaaggaggtgggcagcattattgggaagaaaggggagactgtcaagaagatgagggaggaaagcggagcaagaattaatattagcgaagggaactgcccagaaaggattgtcaccattactggtcccactgatgctatctttaaagcatttgcaatgattgcctacaagtttgaggaggacatcatcaactcgatgagcaactcaccagcaacttctaaaccgccagtgacactaagattggttgtacccgcttctcagtgtggctccctgataggcaagggaggatcaaagatcaaagagatacgcgaatcaaccggggcacaagtccaggtcgctggagatatgcttcccaacagcacagagagagcagtgactataagtggcacccctgatgcaatcatccagtgcgtgaagcaaatctgcgtggttatgctcgaatcaccccctaagggagccacaataccataccgacccaaaccagcaagtaccccagtgatcttcgcgggaggtcaggcctacactatccagggccagtacgctatccctcaccccgatcagttgacaaagctccaccaattagccatgcagcagactccgttcccacctctggggcagaccaatccggcattccctggagagaagcttcccttacatagctcagaggaagctcagaatcttatgggtcagagctcagggttggatgcgtccccgccagcttcaacccacgaattaaccatacctaatgacttaatcggatgcatcattggaaggcaggggacgaaaatcaacgaaatccggcaaatgtctggtgcacaaatcaagattgccaatgccaccgagggatcctcagagcgccagatcacaatcactggaaccccagcaaacatttctctcgcacagtatcttattaatgccaggctgacctctgaggtgacgggcatgggtaccctgtag

SEQ ID NO: 204678 - DNA, 1116 bp, Artificial Sequence
  derived and/or modified sequence
atgggagaaggagatgcgttctgggcaccatctgttcttccacatagcaccctctcaactctgagtcaccacccacagcctcaattcggcaggcgcatggagtccaaagtcagtgaaggcggactgaatgtgacactcaccatcaggttactgatgcacggtaaggaggttgggtccattatcggtaaaaaaggcgaaacggttaagaagatgagggaagagtctggagccagaattaacatctcagagggaaattgtcctgagagaatcgtgactatcactggtcctactgacgccatttttaaagccttcgccatgatagcctacaagtttgaagaagacatcatcaattccatgagcaacagtccggcaacctccaaacctccagtgaccctccgtctggtcgtgcccgcttctcaatgtggatccctgataggtaaaggcggatctaaaatcaaagagattagggagtctaccggcgctcaagtccaggtggccggtgacatgcttcccaattctaccgaacgcgcagtcaccattagcgggacccctgatgctatcatccaatgtgtcaaacagatttgcgtcgtcatgttagaatcgccaccaaaaggagctacaataccctatcggcctaagccagcgtccactcctgtcatattcgccggaggtcaggcttataccatccaggggcagtacgcgatcccacatcctgaccagctgacaaaattgcatcagttggccatgcagcaaacacctttccctccactcgggcagaccaatccggcttttcctggggagaagctccccttgcatagttccgaggaagctcagaatcttatgggtcagtcttcaggtcttgatgctagccccccagcaagtacccatgagttaactatacctaatgacctgatcgggtgcattattggcagacagggcacaaagattaacgagattagacagatgtccggggcacagatcaagatagccaacgcaaccgagggtagttccgaacgtcagatcactattacaggaacccctgctaatatatccctagcccagtatctgatcaatgcacgcctcaccagcgaggtcaccgggatgggcaccctctag

SEQ ID NO: 204679 - DNA, 1056 bp, Artificial Sequence
  derived and/or modified sequence
ctgagccccggcgacgccttctgggcccccagcgtgctgccccacagcaccctgagcaccctgagccaccacccccagccccagttcggcagaagaatggagagcaaggtgagcgagggcggcctgaacgtgaccctgaccatcagactgctgatgcacggcaaggtgagaggcgccgccatcgtgagcaagggcgagaccgtgaagaagatgagagaggagagcggcgccagaatcaacatcagcgagggcaactgccccgagagaatcgtgaccatcaccggccccaccgacgccatcttcaaggccttcgccatgatcgcctacaagttcgaggaggacatcatcaacagcatgagcaacagccccgccaccagcaagccccccgtgaccctgagactggtggtgcccgccagccagtgcggcagcctgatcggcaagggcggcagcaagatcaaggagatcagagagagcaccggcgcccaggtgcaggtggccggcgacatgctgcccaacagcaccgagagagccgtgaccatcagcggcacccccgacgccatcatccagtgcgtgaagcagatctgcgtggtgatgctggagagcccccccaagggcgccaccatcccctacagacccaagcccgccagcacccccgtgatcttcgccggcggccaggcctacaccatccagggccagtacgccatcccccaccccgaccagctgaccaagctgcaccagctggccatgcagcagacccccttcccccccctgggccagaccaaccccgccttccccggcctggacgccagcccccccgccagcacccacgagctgaccatccccaacgacctgatcggctgcatcatcggcagacagggcaccaagatcaacgagatcagacagatgagcggcgcccagatcaagatcgccaacgccaccgagggcagcagcgagagacagatcaccatcaccggcacccccgccaacatcagcctggcccagtacctgatcaacgccagactgaccagcgaggtgaccggcatgggcaccctgtag

SEQ ID NO: 204680 - DNA, 1113 bp, Artificial Sequence
  derived and/or modified sequence
atgggcgagggcgacgccttctgggcccccagcgtgctgccccacagcaccctgagcaccctgagccaccacccccagccccagttcggcagaagaatggagagcaaggtgagcgagggcggcctgaacgtgaccctgaccatcagactgctgatgcacggcaaggaggtgggcagcatcatcggcaagaagggcgagaccgtgaagaagatgagagaggagagcggcgccagaatcaacatcagcgagggcaactgccccgagagaatcgtgaccatcaccggccccaccgacgccatcttcaaggccttcgccatgatcgcctacaagttcgaggaggacatcatcaacagcatgagcaacagccccgccaccagcaagccccccgtgaccctgagactggtggtgcccgccagccagtgcggcagcctgatcggcaagggcggcagcaagatcaaggagatcagagagagcaccggcgcccaggtgcaggtggccggcgacatgctgcccaacagcaccgagagagccgtgaccatcagcggcacccccgacgccatcatccagtgcgtgaagcagatctgcgtggtgatgctggagagcccccccaagggcgccaccatcccctacagacccaagcccgccagcacccccgtgatcttcgccggcggccaggcctacaccatccagggccagtacgccatcccccaccccgacctgaccaagctgcaccagctggccatgcagcagacccccttcccccccctgggccagaccaaccccgccttccccggcgagaagctgcccctgcacagcagcgaggaggcccagaacctgatgggccagagcagcggcctggacgccagcccccccgccagcacccacgagctgaccatccccaacgacctgatcggctgcatcatcggcagacagggcaccaagatcaacgagatcagacagatgagcggcgcccagatcaagatcgccaacgccaccgagggcagcagcgagagacagatcaccatcaccggcacccccgccaacatcagcctggcccagtacctgatcaacgccagactgaccagcgaggtgaccggcatgggcaccctgtag

SEQ ID NO: 204681 - DNA, 1056 bp, Artificial Sequence
  derived and/or modified sequence
atgggcgagggcgacgccttctgggcccccagcgtgctgccccacagcaccctgagcaccctgagccaccacccccagccccagttcggcagaagaatggagagcaaggtgagcgagggcggcctgaacgtgaccctgaccatcagactgctgatgcacggcaaggaggtgggcagcatcatcggcaagaagggcgagaccgtgaagaagatgagagaggagagcggcgccagaatcaacatcagcgagggcaactgccccgagagaatcgtgaccatcaccggccccaccgacgccatcttcaaggccttcgccatgatcgcctacaagttcgaggaggacatcatcaacagcatgagcaacagccccgccaccagcaagccccccgtgaccctgagactggtggtgcccgccagccagtgcggcagcctgatcggcaagggcggcagcaagatcaaggagatcagagagagcaccggcgcccaggtgcaggtggccggcgacatgctgcccaacagcaccgagagagccgtgaccatcagcggcacccccgacgccatcatccagtgcgtgaagcagatctgcgtggtgatgctggagagcccccccaagggcgccaccatcccctacagacccaagcccgccagcacccccgtgatcttcgccggcggccaggcctacaccatccagggccagtacgccatcccccaccccgaccagctgaccaagctgcaccagctggccatgcagcagacccccttcccccccctgggccagaccaaccccgccttccccggcctggacgccagcccccccgccagcacccacgagctgaccatccccaacgacctgatcggctgcatcatcggcagacagggcaccaagatcaacgagatcagacagatgagcggcgcccagatcaagatcgccaacgccaccgagggcagcagcgagagacagatcaccatcaccggcacccccgccaacatcagcctggcccagtacctgatcaacgccagactgaccagcgaggtgaccggcatgggcaccctgtag

SEQ ID NO: 204682 - DNA, 1116 bp, Artificial Sequence
  derived and/or modified sequence
atgggcgagggcgacgccttctgggcccccagcgtgctgccccacagcaccctgagcaccctgagccaccacccccagccccagttcggcagaagaatggagagcaaggtgagcgagggcggcctgaacgtgaccctgaccatcagactgctgatgcacggcaaggaggtgggcagcatcatcggcaagaagggcgagaccgtgaagaagatgagagaggagagcggcgccagaatcaacatcagcgagggcaactgccccgagagaatcgtgaccatcaccggccccaccgacgccatcttcaaggccttcgccatgatcgcctacaagttcgaggaggacatcatcaacagcatgagcaacagccccgccaccagcaagccccccgtgaccctgagactggtggtgcccgccagccagtgcggcagcctgatcggcaagggcggcagcaagatcaaggagatcagagagagcaccggcgcccaggtgcaggtggccggcgacatgctgcccaacagcaccgagagagccgtgaccatcagcggcacccccgacgccatcatccagtgcgtgaagcagatctgcgtggtgatgctggagagcccccccaagggcgccaccatcccctacagacccaagcccgccagcacccccgtgatcttcgccggcggccaggcctacaccatccagggccagtacgccatcccccaccccgaccagctgaccaagctgcaccagctggccatgcagcagacccccttcccccccctgggccagaccaaccccgccttccccggcgagaagctgcccctgcacagcagcgaggaggcccagaacctgatgggccagagcagcggcctggacgccagcccccccgccagcacccacgagctgaccatccccaacgacctgatcggctgcatcatcggcagacagggcaccaagatcaacgagatcagacagatgagcggcgcccagatcaagatcgccaacgccaccgagggcagcagcgagagacagatcaccatcaccggcacccccgccaacatcagcctggcccagtacctgatcaacgccagactgaccagcgaggtgaccggcatgggcaccctgtag

SEQ ID NO: 204683 - protein, 317 aa, Artificial Sequence
  derived and/or modified sequence
MFQAAERPQEWAMEGPRDGLKKERLLDDRHDSGLDSMKDEEYEQMVKELQEIRLEPQEVPRGSEPWKQQLTEDGDSFLHLAIIHEEKALTMEVIRQVKGDLAFLNFQNNLQQTPLHLAVITNQPEIAEALLGAGCDPELRDFRGNTPLHLACEQGCLASVGVLTQSCTTPHLHSILKATNYNGHTCLHLASIHGYLGIVELLVSLGADVNAQEPCNGRTALHLAVDLQNPDLVSLLLKCGADVNRVTYQGYSPYQLTWGRPSTRIQQQLGQLTLENLQMLPESEDEESYDTESEFTEFTEDELPYDDCVFGGQRLTL

SEQ ID NO: 204684 - DNA, 1558 bp, Artificial Sequence
  derived and/or modified sequence
gcagtccgtgccgccgtcccgcccgccagcgccccagcgaggaagcagcgcgcagcccgcggcccagcgcacccgcagcagcgcccgcagctcgtccgcgccatgttccaggcggccgagcgcccccaggagtgggccatggagggcccccgcgacgggctgaagaaggagcggctactggacgaccgccacgacagcggcctggactccatgaaagacgaggagtacgagcagatggtcaaggagctgcaggagatccgcctcgagccgcaggaggtgccgcgcggctcggagccctggaagcagcagctcaccgaggacggggactcgttcctgcacttggccatcatccatgaagaaaaggcactgaccatggaagtgatccgccaggtgaagggagacctggccttcctcaacttccagaacaacctgcagcagactccactccacttggctgtgatcaccaaccagccagaaattgctgaggcacttctgggagctggctgtgatcctgagctccgagactttcgaggaaatacccccctacaccttgcctgtgagcagggctgcctggccagcgtgggagtcctgactcagtcctgcaccaccccgcacctccactccatcctgaaggctaccaactacaatggccacacgtgtctacacttagcctctatccatggctacctgggcatcgtggagcttttggtgtccttgggtgctgatgtcaatgctcaggagccctgtaatggccggactgcccttcacctcgcagtggacctgcaaaatcctgacctggtgtcactcctgttgaagtgtggggctgatgtcaacagagttacctaccagggctattctccctaccagctcacctggggccgcccaagcacccggatacagcagcagctgggccagctgacactagaaaaccttcagatgctgccagagagtgaggatgaggagagctatgacacagagtcagagttcacggagttcacagaggacgagctgccctatgatgactgtgtgtttggaggccagcgtctgacgttatgagcgcaaaggggctgaaagaacatggacttgtatatttgtacaaaaaaaaagttttatttttctaaaaaaagaaaaaagaagaaaaaatttaaagggtgtacttatatccacactgcacactgcctggcccaaaacgtcttattgtggtaggatcagccctcattttgttgcttttgtgaactttttgtaggggacgagaaagatcattgaaattctgagaaaacttcttttaaacctcacctttgtggggtttttggagaaggttatcaaaaatttcatggaaggaccacattttatatttattgtgcttcgagtgactgaccccagtggtatcctgtgacatgtaacagccaggagtgttaagcgttcagtgatgtggggtgaaaagttactacctgtcaaggtttgtgttaccctcctgtaaatggtgtacataatgtattgttggtaattattttggtacttttatgatgtatatttattaaacagatttttacaaatg

SEQ ID NO: 204685 - DNA, 954 bp, Artificial Sequence
  derived and/or modified sequence
atgttccaggccgccgagagaccccaggagtgggccatggagggccccagagacggcctgaagaaggagagactgctggacgacagacacgacagcggcctggacagcatgaaggacgaggagtacgagcagatggtgaaggagctgcaggagatcagactggagccccaggaggtgcccagaggcagcgagccctggaagcagcagctgaccgaggacggcgacagcttcctgcacctggccatcatccacgaggagaaggccctgaccatggaggtgatcagacaggtgaagggcgacctggccttcctgaacttccagaacaacctgcagcagacccccctgcacctggccgtgatcaccaaccagcccgagatcgccgaggccctgctgggcgccggctgcgaccccgagctgagagacttcagaggcaacacccccctgcacctggcctgcgagcagggctgcctggccagcgtgggcgtgctgacccagagctgcaccaccccccacctgcacagcatcctgaaggccaccaactacaacggccacacctgcctgcacctggccagcatccacggctacctgggcatcgtggagctgctggtgagcctgggcgccgacgtgaacgcccaggagccctgcaacggcagaaccgccctgcacctggccgtggacctgcagaaccccgacctggtgagcctgctgctgaagtgcggcgccgacgtgaacagagtgacctaccagggctacagcccctaccagctgacctggggcagacccagcaccagaatccagcagcagctgggccagctgaccctggagaacctgcagatgctgcccgagagcgaggacgaggagagctacgacaccgagagcgagttcaccgagttcaccgaggacgagctgccctacgacgactgcgtgttcggcggccagagactgaccctgtag

SEQ ID NO: 204686 - DNA, 954 bp, Artificial Sequence
  derived and/or modified sequence
atgttccaagccgcggagcggccccaggaatgggccatggaggggccccgcgacggattaaaaaaggagagactgctggatgatagacacgactccggcctcgacagcatgaaggatgaggagtacgagcaaatggtcaaggaacttcaggaaatacgtctcgagccacaagaggtacccagaggtagtgaaccatggaaacaacaactcacagaggatggagattcattcttgcacttggccatcattcatgaggagaaggcactcacaatggaggtgattagacaagtcaaaggcgacctggcattcctgaattttcagaataacctgcagcagactcccctccacctggccgtcattactaatcagcctgaaatcgcagaggccttgctgggcgcagggtgcgacccagagctgcgggactttaggggaaatacgccactccacttagcttgtgagcagggatgcttggcatcagtgggtgtcttaactcagtcttgcaccacgccccacctgcacagtatcctgaaagctaccaactacaatggacatacatgtctgcacttagctagcattcatggctacctggggatcgtagagctccttgtgtccctcggagcagacgtgaacgcgcaggaaccatgcaacggaaggaccgcactgcatcttgcggtggatctgcagaatccagatttggtttcactcctcctgaaatgtggcgcggatgtgaaccgggtgacctatcagggctactcaccataccagctgacttgggggaggccgtcaacaaggatccagcagcaattgggacagctcactctggaaaatttacagatgctgcctgaatcagaagatgaagaatcctacgatacagagtcagagtttacggagttcacggaggacgaactgccttatgatgactgtgttttcggcggacagcgcctcactctgtag

SEQ ID NO: 204687 - DNA, 954 bp, Artificial Sequence
  derived and/or modified sequence
atgttccaggccgctgagcggccccaggagtgggccatggagggccccagagatggcctgaagaaggagcggctgctggatgacagacatgacagcggcctggacagcatgaaggatgaggagtatgagcagatggtgaaggagctgcaggagatccggctggagccccaggaggtgccccggggcagcgagccctggaagcagcagctgacagaagatggagacagcttcctgcacctggccatcatccacgaggagaaggccctgaccatggaggtgatccggcaggtgaagggggacctggccttcctgaacttccagaacaacctgcagcagacccccctgcacctggccgtcatcaccaaccagcctgagattgctgaggccctgctgggcgccggctgtgaccctgagctgcgggacttccggggcaacacccccctgcacctggcctgtgagcagggctgcctggcctctgtgggcgtgctgacccagagctgcaccaccccccacctgcacagcatcctgaaggccaccaactacaacggccacacctgcctgcacctggccagcatccacggctacctgggcatcgtggagctgctggtgtccctgggcgcagatgtgaatgcccaggagccctgcaatggccgcacagccctgcacctggccgtggacctgcagaacccagacctggtgtccctgctgctgaagtgtggggctgatgtgaacagagtgacctaccagggctacagcccctaccagctgacctggggccggcccagcacccgcatccagcagcagctgggccagctgaccctggagaacctgcagatgctgcctgagagtgaagatgaggagagctatgacacagaaagtgagttcacagagttcacagaagatgagctgccctatgatgactgtgtgtttggaggccagaggctgaccctgtag

SEQ ID NO: 204688 - DNA, 954 bp, Artificial Sequence
  derived and/or modified sequence
atgttccaggccgccgagcggccccaggagtgggccatggagggccccagggatgggctcaaaaaagagaggttgttggatgaccgccacgactccggactcgacagtatgaaagatgaggagtatgaacagatggtgaaggagcttcaggagatcaggctggaacctcaggaagtcccacggggtagcgagccttggaaacaacaacttaccgaggacggtgactccttcctgcatctcgccatcatccacgaggaaaaagccctcactatggaagttattagacaggtgaaaggcgacctggccttcctgaattttcagaataatttgcagcagactccccttcacttggccgtcatcaccaaccagcccgaaatcgctgaagccctcttaggagcgggctgcgaccccgaactgcgtgatttcaggggaaacacacccctccatctagcgtgcgagcaggggtgtttggcgagcgtcggtgtgctcacccagtcttgcacgaccccacacctacactcaatcttgaaggccactaactacaacggccatacatgcctacatctggcctcaattcacgggtaccttgggattgtggagcttctggtcagtctgggagccgatgtgaatgcccaggagccctgcaacggacggacagctttgcatctggccgttgatctccaaaatcccgacctcgtgtctctgttactcaagtgtggtgccgatgtgaacagggtcacctatcaggggtattcgccataccagctaacctggggaaggccatccacgcggatacaacagcagctcggacagctgaccctcgagaacctgcagatgttacccgagagcgaggatgaggaatcctacgacacagagtcagagttcaccgaattcaccgaagacgagttaccctacgacgattgtgttttcggcggacagcgattaaccttgtag

SEQ ID NO: 204689 - DNA, 954 bp, Artificial Sequence
  derived and/or modified sequence
atgtttcaggccgctgagcggccacaggaatgggccatggaggggccaagagatggtttgaagaaagagagactcctggatgatcgacacgattctgggctggactccatgaaggacgaggagtacgaacagatggtgaaagagctgcaggagatcagattggagccacaagaagtccccagaggcagtgagccttggaagcagcagctgactgaggacggggattccttccttcatttagctattatccatgaggaaaaagcacttacgatggaggtaatccggcaggtgaagggggacttagcgttcctgaactttcaaaataacttgcagcagacacctctccatctggcggtcattaccaatcaacctgaaatcgcagaggctctgctcggggctggatgcgatcccgagctcagggattttcgtggaaatacccctctccacctcgcctgcgagcaggggtgcctcgcaagtgttggggtccttacgcagagttgcactactcctcacctacatagcatccttaaggctaccaactataatggccacacctgcctgcatctcgctagtattcacggttatcttggaattgtcgagctgcttgttagcttgggagctgacgtgaacgcacaggaaccatgcaacggtaggacagccctccatctggcagtggacctgcaaaacccggacctagtgtcactcctgttgaaatgcggcgctgatgtgaatcgggtaacgtatcaggggtatagtccttatcagctgacctggggacgaccgtctacacgcatccaacaacagctgggacagttgactctggaaaacctacagatgctcccagagagcgaggatgaggagagctatgatacagaatccgagttcactgagtttactgaggacgaactgccttacgacgactgcgtctttgggggacaacggttaacactgtag

SEQ ID NO: 204690 - protein, 252 aa, Artificial Sequence
  derived and/or modified sequence
MGVLLTQRTLLSLVLALLFPSMASMAAIGSCSKEYRVLLGQLQKQTDLMQDTSRLLDPYIRIQGLDVPKLREHCRERPGAFPSEETLRGLGRRGFLQTLNATLGCVLHRLADLEQRLPKAQDLERSGLNIEDLEKLQMARPNILGLRNNIYCMAQLLDNSDTAEPTKAGRGASQPPTPTPASDAFQRKLEGCRFLHGYHRFMHSVGRVFSKWGESPNRSRRHSPHQALRKGVRRTRPSRKGKRLMTRGQLPR

SEQ ID NO: 204691 - protein, 231 aa, Artificial Sequence
  derived and/or modified sequence
MASMAAIGSCSKEYRVLLGQLQKQTDLMQDTSRLLDPYIRIQGLDVPKLREHCRERPGAFPSEETLRGLGRRGFLQTLNATLGCVLHRLADLEQRLPKAQDLERSGLNIEDLEKLQMARPNILGLRNNIYCMAQLLDNSDTAEPTKAGRGASQPPTPTPASDAFQRKLEGCRFLHGYHRFMHSVGRVFSKWGESPNRSRRHSPHQALRKGVRRTRPSRKGKRLMTRGQLPR

SEQ ID NO: 204692 - DNA, 759 bp, Artificial Sequence
  derived and/or modified sequence
atgggcgtgctgctgacccagagaaccctgctgagcctggtgctggccctgctgttccccagcatggccagcatggccgccatcggcagctgcagcaaggagtacagagtgctgctgggccagctgcagaagcagaccgacctgatgcaggacaccagcagactgctggacccctacatcagaatccagggcctggacgtgcccaagctgagagagcactgcagagagagacccggcgccttccccagcgaggagaccctgagaggcctgggcagaagaggcttcctgcagaccctgaacgccaccctgggctgcgtgctgcacagactggccgacctggagcagagactgcccaaggcccaggacctggagagaagcggcctgaacatcgaggacctggagaagctgcagatggccagacccaacatcctgggcctgagaaacaacatctactgcatggcccagctgctggacaacagcgacaccgccgagcccaccaaggccggcagaggcgccagccagccccccacccccacccccgccagcgacgccttccagagaaagctggagggctgcagattcctgcacggctaccacagattcatgcacagcgtgggcagagtgttcagcaagtggggcgagagccccaacagaagcagaagacacagcccccaccaggccctgagaaagggcgtgagaagaaccagacccagcagaaagggcaagagactgatgaccagaggccagctgcccagatag

SEQ ID NO: 204693 - DNA, 759 bp, Artificial Sequence
  derived and/or modified sequence
atgggcgtcttgttgacccagcggaccctgcttagtcttgtgctggctctccttttcccatcgatggcctcaatggcagcaattggaagttgctcaaaggaatatcgcgtcttactggggcagctgcaaaaacaaacagatctgatgcaggacacgtctagactcctagacccttatatccgaattcagggccttgatgtgcctaagctgcgtgagcattgtagagagcggcctggggcctttccttccgaggagacattaagaggtttagggcgccgggggttcctacagacgctgaatgctacccttggttgcgtgttacatcggttggccgacctggagcagcggttaccgaaagcacaggatctcgaacgtagcggactcaacatcgaagacctagagaaacttcagatggctagaccgaatatcttaggcctccggaacaatatctactgtatggctcagttgctggacaactccgataccgccgagcctaccaaggctggccgcggggcatctcaaccacctacaccgactcccgccagcgacgcctttcaaagaaaactcgagggctgtcgcttcctgcatgggtatcaccgttttatgcactctgtggggagggtgttctccaaatggggcgagtctcccaaccgatcgcggcgccacagccctcaccaggccctccggaagggagtccgccggactcggccgtcccgtaagggaaagcgcctgatgacgcgagggcagctgcctagatag

SEQ ID NO: 204694 - DNA, 759 bp, Artificial Sequence
  derived and/or modified sequence
atgggcgtgctgctgacccagaggaccctgctgagcctggtgctggccctgctcttccccagcatggcctccatggccgccatcggcagctgcagcaaggagtacagagtgctgctgggccagctgcagaagcagacagacctgatgcaggacaccagccggctgctggacccctacatccgcatccagggcctggatgtgcccaagctgcgggagcactgccgggagaggcctggggccttccccagcgaggagaccctgcggggcctgggccggcggggcttcctgcagaccctgaatgccaccctgggctgtgtgctgcaccggctggccgacctggagcagaggctgcccaaggcccaggacctggagaggagcggcctgaacatcgaggacctggagaagctgcagatggcccggcccaacatcctgggcctgaggaacaacatctactgcatggcccagctgctggacaacagcgacacagctgagcccaccaaggccggccgcggggccagccagccccccacccccaccccagccagtgatgccttccagaggaagctggagggctgccgcttcctgcacggctaccaccgcttcatgcacagcgtgggccgggtcttcagcaagtggggcgagagccccaacagaagccgccgccacagcccccaccaggccctgaggaagggcgtgcggaggacccggcccagcaggaagggcaagaggctgatgacccggggccagctgcccaggtag

SEQ ID NO: 204695 - DNA, 759 bp, Artificial Sequence
  derived and/or modified sequence
atgggcgtgctgctgacccagcggaccctgctgagcctggtgctggcactcttatttccttccatggcctctatggcagccatcgggagctgtagcaaagaatacagagttttactggggcagctgcaaaaacaaacagatctcatgcaagacacttcccgcctgctagatccgtatattcggatccagggcctcgatgtacctaagctacgggagcactgccgggagaggcccggcgcatttccaagtgaagagaccctccgaggattgggcagacgcggcttcctgcagacactaaacgcgaccttggggtgtgtgcttcaccggttagctgatctggagcagcgcctcccaaaggctcaggatcttgagaggtctggcctcaatattgaagacttggaaaagctccagatggcccgcccaaacatcctcggtctacgaaataatatctactgtatggcacaattacttgacaacagcgacaccgccgagcctaccaaggctggtcggggggctagccaacctccaactcctacacccgcctcagacgcatttcagagaaaactagaagggtgccgctttctccacgggtaccatcgcttcatgcactctgtgggtagagtttttagcaagtggggcgagagtcccaaccgatctagacggcattcaccccaccaagccttgcgcaaaggtgtccgccgcactagaccctctaggaaaggtaaaagactcatgactcgcggacaactgccaagatag

SEQ ID NO: 204696 - DNA, 1854 bp, Artificial Sequence
  derived and/or modified sequence
gtcacccccagcgggcgcgggccggagcacgggcacccagcatgggggtactgctcacacagaggacgctgctcagtctggtccttgcactcctgtttccaagcatggcgagcatggcggctataggcagctgctcgaaagagtaccgcgtgctccttggccagctccagaagcagacagatctcatgcaggacaccagcagactcctggacccctatatacgtatccaaggcctggatgttcctaaactgagagagcactgcagggagcgccccggggccttccccagtgaggagaccctgagggggctgggcaggcggggcttcctgcagaccctcaatgccacactgggctgcgtcctgcacagactggccgacttagagcagcgcctccccaaggcccaggatttggagaggtctgggctgaacatcgaggacttggagaagctgcagatggcgaggccgaacatcctcgggctcaggaacaacatctactgcatggcccagctgctggacaactcagacacggctgagcccacgaaggctggccggggggcctctcagccgcccacccccacccctgcctcggatgcttttcagcgcaagctggagggctgcaggttcctgcatggctaccatcgcttcatgcactcagtggggcgggtcttcagcaagtggggggagagcccgaaccggagccggagacacagcccccaccaggccctgaggaagggggtgcgcaggaccagaccctccaggaaaggcaagagactcatgaccaggggacagctgccccggtagcctcgagagcaccccttgccggtgaaggatgcggcaggtgctctgtggatgagaggaaccatcgcaggatgacagctcccgggtccccaaacctgttcccctctgctactagccactgagaagtgcactttaagaggtgggagctgggcagacccctctacctcctccaggctgggagacagagtcaggctgttgcgctcccacctcagccccaagttccccaggcccagtggggtggccgggcgggccacgcgggaccgactttccattgattcaggggtctgatgacacaggctgactcatggccgggctgactgcccccctgccttgctccccgaggcctgccggtccttccctctcatgacttgcagggccgttgcccccagacttcctcctttccgtgtttctgaaggggaggtcacagcctgagctggcctcctatgcctcatcatgtcccaaaccagacacctggatgtctgggtgacctcactttaggcagctgtaacagcggcagggtgtcccaggagccctgatccgggggtccagggaatggagctcaggtcccaggccagccccgaagtcgccacgtggcctggggcaggtcactttacctctgtggacctgttttctctttgtgaagctagggagttagaggctgtacaaggcccccactgcctgtcggttgcttggattccctgacgtaaggtggatattaaaaatctgtaaatcaggacaggtggtgcaaatggcgctgggaggtgtacacggaggtctctgtaaaagcagacccacctcccagcgccgggaagcccgtcttgggtcctcgctgctggctgctccccctggtggtggatcctggaattttctcacgcaggagccattgctctcctagagggggtctcagaaactgcgaggccagttccttggagggacatgactaatttatcgatttttatcaatttttatcagttttatatttataagccttatttatgatgtatatttaatgttaatattgtgcaaacttatatttaaaacttgcctggtttctaaa

SEQ ID NO: 204697 - DNA, 1000 bp, Artificial Sequence
  derived and/or modified sequence
ggagggaggcaagagaggtcaggggagagccctggccttgtgtgacctgagtaggaccttctcctgagacttggtttacctgtcaggaaagtggggacatggactggaaggtcttccacatctgttccaggctgcacctctggttgaaaaggcagcctctcctggttctagacagagctgaggacacaagctgctcccgggctgcctgccctgaagccctctcaggcccatctacctggatggccagagcagctgacaaggtctggtccttgcactcctgtttccaagcatggcgagcatggcggctataggcagctgctcgaaagagtaccgcgtgctccttggccagctccagaagcagacagatctcatgcaggacaccagcagactcctggacccctatatacgtatccaaggcctggatgttcctaaactgagagagcactgcagggagcgccccggggccttccccagtgaggagaccctgagggggctgggcaggcggggcttcctgcagaccctcaatgccacactgggctgcgtcctgcacagactggccgacttagagcagcgcctccccaaggcccaggatttggagaggtctgggctgaacatcgaggacttggagaagctgcagatggcgaggccgaacatcctcgggctcaggaacaacatctactgcatggcccagctgctggacaactcagacacggctgagcccacgaaggctggccggggggcctctcagccgcccacccccacccctgcctcggatgcttttcagcgcaagctggagggctgcaggttcctgcatggctaccatcgcttcatgcactcagtggggcgggtcttcagcaagtggggggagagcccgaaccggagccggagacacagcccccaccaggccctgaggaagggggtgcgcaggaccagaccctccaggaaaggcaagagactcatgaccaggggacagctgccccggtagcctcgagagcacccc

SEQ ID NO: 204698 - DNA, 759 bp, Artificial Sequence
  derived and/or modified sequence
atgggagtgctgctgactcagaggaccctgctttccctggtgctggctttgctgtttccttcgatggcctccatggccgctatcggatcctgttcaaaggagtaccgtgttctgttgggtcagctgcagaagcagacagacctgatgcaagacacgtctcgtctgttggatccctatatccgcattcagggattagatgttcccaaactgagagagcactgtcgcgaacgacccggagcctttccaagcgaagagacactgaggggccttgggcgaagggggtttttgcaaacactcaatgccaccctcgggtgtgtgttacatcggctggccgatttggagcagcgcttgccaaaggcacaagacttggagaggtctggcctgaatattgaggatctggagaagcttcagatggccagacccaatatcctgggacttagaaacaatatctactgtatggcacaactgctggataacagcgatacggccgagccaacaaaagccggacgtggtgcctcccagcctcctacacctactcctgccagcgacgcctttcagcggaaattagagggctgtcggttcctgcacggctaccacaggttcatgcatagcgtggggcgagtgttctctaagtggggggagtctcccaaccgtagtcggaggcatagtccccaccaggctctgagaaagggcgtacggagaactcgtccatccaggaaggggaagcgactaatgacacgaggtcagctacctagatag

SEQ ID NO: 204699 - DNA, 759 bp, Artificial Sequence
  derived and/or modified sequence
atgggtgttcttttgacacagcgcacactgctttccctcgttctcgccctgcttttccccagtatggccagtatggctgccatagggtcttgttcaaaggagtatcgcgtgttgctcggtcagttacagaagcagaccgacctcatgcaggacacaagcagattactagacccatacatccgcattcagggactcgacgtgcccaaactgcgggagcattgtcgcgaaaggcccggcgcttttcctagtgaggaaacactgcgggggctgggacgacgcggattcctccagacattgaatgctactctcggctgcgttctgcatcgcttggctgatttagaacagaggttgccgaaggcacaggacctggagagaagcggtctcaatatcgaagatttggagaagctccagatggctcgccccaatattctgggactaaggaataacatttactgcatggcccagttactggataattctgataccgccgagcctacgaaagccggtagaggagcctctcagccaccaacccctactcctgcatcagacgctttccagcgaaaactcgagggctgccgctttctgcacggatatcacagattcatgcattccgtggggagggtattttctaagtggggtgaatcacccaatcggtcgaggagacattcgccccaccaagcacttcgcaaaggcgtgagacggactagacccagtagaaaaggaaagagactgatgaccaggggccagctgccccgttag

SEQ ID NO: 204700 - DNA, 759 bp, Artificial Sequence
  derived and/or modified sequence
atgggcgtacttcttactcagcgcactctcctttccctcgtattagcattactatttccatcaatggcctctatggctgcaatcgggagctgctccaaagagtacagagtactgctgggtcaactacagaagcagaccgaccttatgcaggacacatctcgactgttggacccatatattaggatccaaggcctggatgtgcccaagctgcgggagcattgtcgtgaaaggccaggcgcatttcccagcgaagagaccctccgaggactgggccggcgaggttttctacagaccttgaacgccacattgggttgtgttctgcatcgcctagcagacttggaacagagattgcccaaggctcaggatctggagagatcggggttaaacatcgaggacctggagaagctgcaaatggccaggccaaacattctcggcctcagaaataatatttattgcatggcccaactgcttgacaacagtgacaccgcagaacccacaaaagctggaaggggcgcatcacagccacccacccccacacccgcaagcgatgcttttcagaggaaactggagggatgtaggtttctgcacggttaccatagatttatgcactccgtgggacgagtgttcagcaaatggggcgagtccccaaacagatcccgcaggcattctccacatcaggctttgagaaaaggtgtccggcgaacccgtccttcgagaaaaggaaaaaggcttatgactagaggccagctgccacggtag

SEQ ID NO: 204701 - protein, 1192 aa, Artificial Sequence
  derived and/or modified sequence
MEDLDQSPLVSSSDSPPRPQPAFKYQFVREPEDEEEEEEEEEEDEDEDLEELEVLERKPAAGLSAAPVPTAPAAGAPLMDFGNDFVPPAPRGPLPAAPPVAPERQPSWDPSPVSSTVPAPSPLSAAAVSPSKLPEDDEPPARPPPPPPASVSPQAEPVWTPPAPAPAAPPSTPAAPKRRGSSGSVDETLFALPAASEPVIRSSAENMDLKEQPGNTISAGQEDFPSVLLETAASLPSLSPLSAASFKEHEYLGNLSTVLPTEGTLQENVSEASKEVSEKAKTLLIDRDLTEFSELEYSEMGSSFSVSPKAESAVIVANPREEIIVKNKDEEEKLVSNNILHNQQELPTALTKLVKEDEVVSSEKAKDSFNEKRVAVEAPMREEYADFKPFERVWEVKDSKEDSDMLAAGGKIESNLESKVDKKCFADSLEQTNHEKDSESSNDDTSFPSTPEGIKDRSGAYITCAPFNPAATESIATNIFPLLGDPTSENKTDEKKIEEKKAQIVTEKNTSTKTSNPFLVAAQDSETDYVTTDNLTKVTEEVVANMPEGLTPDLVQEACESELNEVTGTKIAYETKMDLVQTSEVMQESLYPAAQLCPSFEESEATPSPVLPDIVMEAPLNSAVPSAGASVIQPSSSPLEASSVNYESIKHEPENPPPYEEAMSVSLKKVSGIKEEIKEPENINAALQETEAPYISIACDLIKETKLSAEPAPDFSDYSEMAKVEQPVPDHSELVEDSSPDSEPVDLFSDDSIPDVPQKQDETVMLVKESLTETSFESMIEYENKEKLSALPPEGGKPYLESFKLSLDNTKDTLLPDEVSTLSKKEKIPLQMEELSTAVYSNDDLFISKEAQIRETETFSDSSPIEIIDEFPTLISSKTDSFSKLAREYTDLEVSHKSEIANAPDGAGSLPCTELPHDLSLKNIQPKVEEKISFSDDFSKNGSATSKVLLLPPDVSALATQAEIESIVKPKVLVKEAEKKLPSDTEKEDRSPSAIFSAELSKTSVVDLLYWRDIKKTGVVFGASLFLLLSLTVFSIVSVTAYIALALLSVTISFRIYKGVIQAIQKSDEGHPFRAYLESEVAISEELVQKYSNSALGHVNCTIKELRRLFLVDDLVDSLKFAVLMWVFTYVGALFNGLTLLILALISLFSVPVIYERHQAQIDHYLGLANKNVKDAMAKIQAKIPGLKRKAE

SEQ ID NO: 204702 - DNA, 3579 bp, Artificial Sequence
  derived and/or modified sequence
atggaggatcttgatcaatcacccttggtcagttcctcagacagcccgccgcgtccacaacccgcttttaaatatcagttcgtgcgcgaaccggaggatgaggaggaagaggaggaggaggaggaggaggatgaggacgaagacctggaggaactggaagtccttgagagaaaacccgccgccgggttatccgcagcacctgttccgactgctcctgcggccggcgcaccacttatggatttcggtaatgattttgtcccacccgcgcctagagggccattaccggccgcccctcctgtagccccggaaaggcagccttcatgggacccatctcccgtttctagtacggtccctgccccctcccccctgtcagcagctgccgtgtccccttctaaactgccggaggatgatgagccccctgcccgacctccacctcccccacccgcaagtgtaagtccacaggccgaacccgtgtggaccccaccagcccctgcacccgccgcaccaccgtcaactccggctgctcccaagaggcgtgggtcttctgggagtgtggatgaaaccctgttcgccttgcccgcagcatcggagccagttataaggagcagcgctgagaatatggatcttaaggagcagccaggaaataccatctctgccggccaggaggatttcccgagcgtcctgcttgaaaccgctgccagccttccgagcttaagtcctttatccgcagctagcttcaaggaacacgagtacttgggcaacttgtctacagtgctacccacagaagggaccctccaggagaacgtcagcgaggcctcaaaagaggtcagcgagaaggccaaaacgctcctgatcgatagagatcttaccgaattctctgaactggaatactctgaaatgggtagttccttttctgtgagcccaaaagcagaatctgccgttattgttgctaaccccagggaggagatcatcgtgaaaaacaaagatgaggaagaaaagctggtctctaataatattctgcataaccagcaagaattgccaactgcactgacaaagctcgttaaagaggatgaagtggtctcctcggagaaagccaaagactcctttaatgaaaagagggtcgcggtggaagcccctatgcgcgaagagtacgccgatttcaagcctttcgaacgtgtgtgggaggtgaaggatagtaaggaagacagcgacatgctggctgcggggggaaaaatcgagagtaacctggagagcaaggtggataaaaagtgtttcgctgactccctagagcaaacaaaccacgagaaagatagcgaatcctctaatgacgacaccagttttccttcaactcccgagggtatcaaggatcgaagcggcgcctatattacatgtgcccccttcaaccccgccgctactgaaagcatcgccacaaatatctttcctctgctcggcgacccaacgagtgagaataagaccgatgagaagaaaattgaggaaaagaaagcccaaattgtgactgagaaaaatacttctacaaagacatcaaacccttttctggtcgcagctcaggatagcgaaactgactatgttacaacagacaatcttacaaaagttacagaggaagtcgtagcaaatatgccggaagggctgacacccgatctggtgcaggaagcctgtgaatccgagctgaatgaggtgaccggcactaagattgcatacgaaactaagatggatcttgtccaaaccagtgaagttatgcaggagagtctgtaccctgccgctcagctctgccctagttttgaagaaagtgaagcaactccatcacccgtgttgccagatatcgtcatggaagccccactgaactcagccgtgccaagcgctggagcaagtgtcatacagccttcctcatctcctcttgaagcttccagtgtgaactacgaatccatcaagcacgagcccgagaatcctcccccctacgaagaggcaatgtcagtgtcactgaagaaggtttctggtatcaaggaggagataaaggaacctgagaatataaacgcggctctgcaggagaccgaagcaccatatattagcatagcatgtgacctcataaaagaaacaaaactgagcgccgagcccgcccctgatttttcggattactctgagatggcaaaggtggagcagcccgtccctgaccactcagaactggtagaggatagctcaccagattccgagcctgtggaccttttctctgacgattctattccagatgtaccgcagaaacaggacgagactgtgatgctggtgaaggagagcctcacggaaaccagttttgagtccatgatcgagtatgagaataaggaaaagttgagcgcattgccccccgagggaggcaagccttatctggagtcttttaagctgagcctggataacactaaggataccctcctgcccgacgaagtatcaaccctctccaaaaaagagaagatccccctgcagatggaggagctctccaccgcggtctactctaacgacgacctgttcattagtaaggaagcgcagatcagagaaaccgagacattcagcgattccagtcccatagagatcatcgatgaatttccaactctgattagttctaaaacagatagtttctctaaactggcccgagaatataccgacctggaagtctcccacaaaagtgaaatcgctaatgcgccggatggcgcaggcagtctgccgtgcactgagctgccccacgatctctcactgaagaacatccaacccaaagttgaggaaaagatcagcttttcagacgacttttctaagaatggttccgccacatcaaaggtgctcctgttgccccccgacgtctccgcactggcaacccaagctgaaatcgagagcatagttaaacctaaggtactagtaaaagaagccgagaagaagcttccttcagacacagaaaaagaggataggtcaccttcagccatcttttccgctgagctgagcaagacaagcgttgtggacctcctgtattggagggatatcaagaaaactggtgttgtcttcggggcttccctgttcctgctcttgtctctgactgtctttagcatcgtgagcgtcaccgcctacattgccctcgctctactgagtgtaactatctcctttaggatctataagggggtcattcaggccattcaaaagtcagacgaaggtcatccatttagagcgtatttagagtccgaggtagccatctcggaggagctggttcagaaatatagcaattctgccctaggccacgtgaattgcaccatcaaggagttaagacgactgttcctcgtggacgatctcgtcgattcattgaagttcgctgtactcatgtgggtcttcacttacgttggagccttgttcaacggcttaacactgctaatattggcgctgatctcactcttcagcgtgccggtgatctatgagcggcatcaggctcagatcgaccactacttggggctggccaacaagaatgtcaaggatgcaatggccaagatccaggccaagatccccggcctcaaaagaaaggccgagtag

SEQ ID NO: 204703 - DNA, 3579 bp, Artificial Sequence
  derived and/or modified sequence
atggaggacctggaccagagccccctggtgagcagcagtgacagccccccccggccccagcctgccttcaagtaccagtttgtgcgggagccagaagatgaggaggaggaggaggaggaggaggaggaggatgaagatgaggacctggaggagctggaggtgctggagaggaagccagctgctggcctgtctgctgcccctgtgcccacagccccagctgctggggcccccctgatggactttggaaatgactttgtgcccccagccccccggggccccctgcctgctgcccctcctgtggcccctgagcggcagcccagctgggaccccagccctgtgagcagcacagtgcctgcccccagccccctgtctgctgctgctgtgagccccagcaagctgcctgaagatgatgagcccccagcccggcccccacctcctcctccagcctctgtgagcccccaggccgagcctgtgtggaccccaccagccccagccccagctgccccacccagcaccccagctgcccccaagaggcggggcagcagcggctctgtggatgagaccctgtttgccctgcctgctgccagcgagcccgtcatccgcagcagcgctgagaacatggacctgaaggagcagcccggcaacaccatctctgctggccaggaggacttccccagcgtgctgctggagacagctgccagcctgcccagcctgagccccctgtctgctgccagcttcaaggagcacgagtacctgggcaacctgagcacagtgctgcccacagagggcaccctgcaggagaatgtgtctgaggccagcaaggaggtgtctgagaaggccaagaccctgctgattgaccgggacctgacagagttcagcgagctggagtacagcgagatgggcagcagcttctctgtgagccccaaggccgagagcgctgtgattgtggccaacccccgggaggagatcatcgtgaagaacaaggatgaggaggagaagctggtgagcaacaacatcctgcacaaccagcaggagctgcccacagccctgaccaagctggtgaaggaggatgaggtggtgagcagcgagaaggccaaggacagcttcaatgagaagagggtggccgtggaggcccccatgagggaggagtatgctgacttcaagccctttgagcgggtgtgggaggtgaaggacagcaaagaagattctgacatgctggccgccggcggcaagattgagagcaacctggagagcaaggtggacaagaagtgctttgctgacagcctggagcagaccaaccacgagaaggacagcgagagcagcaatgatgacaccagcttccccagcaccccagagggcatcaaggacagaagtggggcctacatcacctgtgcccccttcaacccagctgccacagagagcatcgccaccaacatcttccccctgctgggggaccccaccagcgagaacaagacagatgagaagaagattgaggagaagaaggcccagatcgtgacagagaagaacaccagcaccaagaccagcaaccccttcctggtggccgcccaggacagcgagacagattatgtgaccacagacaacctgaccaaggtgacagaggaggtggtggccaacatgcctgagggcctgaccccagacctggtgcaggaggcctgtgagagcgagctgaatgaggtgacaggcaccaagatcgcctatgagaccaagatggacctggtgcagaccagcgaggtgatgcaggagagcctgtacccagctgcccagctgtgccccagctttgaggagagcgaggccacccccagccctgtgctgcctgacatcgtgatggaggcccccctgaacagcgctgtgcccagcgctggggccagcgtcatccagcccagcagcagccccctggaggccagctctgtgaactatgagagcatcaagcatgagcctgagaaccccccaccctatgaggaggccatgtctgtgtccctgaagaaggtgtctggcatcaaggaggagatcaaggagcctgagaacatcaatgctgccctgcaggagacagaggccccctacatcagcatcgcctgtgacctgatcaaggagaccaagctgtctgctgagcccgccccagacttcagtgactacagcgagatggccaaggtggagcagcctgtgcctgaccacagcgagctggtggaggacagcagcccagacagcgagcctgtggacctcttcagtgatgacagcatcccagatgtgccccagaagcaggatgaaacagtgatgctggtgaaggagagcctgacagagaccagctttgagagcatgattgaatatgagaacaaggagaagctgagcgccctgcccccagagggcggcaagccctacctggagagcttcaagctgagcctggacaacaccaaggacaccctgctgcctgatgaggtgtccaccctgagcaagaaggagaagatccccctgcagatggaggagctgagcacagctgtgtacagcaatgatgacctcttcatcagcaaggaggcccagatccgggagacagagaccttcagtgacagcagccccatcgagatcattgatgagttccccaccctcatcagcagcaagacagacagcttcagcaagctggcccgggagtacacagacctggaggtgagccacaagtctgagatcgccaatgccccagatggagctggcagcctgccctgcacagagctgccccatgacctgagcctgaagaacatccagcccaaggtggaggagaagatctccttcagtgatgacttcagcaagaatggaagtgccaccagcaaggtgctgctgctgcccccagatgtgtctgccctggccacccaggccgagattgagagcatcgtgaagcccaaggtgctggtgaaggaggccgagaagaagctgcccagcgacacagagaaggaggacaggagccccagcgccatcttctctgctgagctgagcaagacctctgtggtggacctgctgtactggagggacatcaagaagacaggagtggtgtttggagccagcctcttcctgctgctgagcctgaccgtcttcagcatcgtgtctgtgacagcctacatcgccctggccctgctgtctgtgaccatctccttccgcatctacaagggcgtcatccaggccatccagaagagtgatgagggccaccccttccgggcctacctggagagcgaggtggccatcagcgaggagctggtgcagaagtacagcaacagcgccctgggccacgtgaactgcaccatcaaggagctgcggcggctcttcctggtggatgacctggtggacagcctgaagtttgctgtgctgatgtgggtgttcacctacgtgggcgccctcttcaacggcctgaccctgctgatcctggccctgatcagcctcttctctgtgcctgtgatctatgagcggcaccaggcccagattgaccactacctgggcctggccaacaagaatgtgaaggatgccatggccaagatccaggccaagatccctggcctgaagaggaaggccgagtag

SEQ ID NO: 204704 - DNA, 3579 bp, Artificial Sequence
  derived and/or modified sequence
atggaggacctggaccagagccccctggtgagcagcagcgacagcccacctaggccccagccagccttcaaataccagttcgtgagggagcctgaagatgaggaggaagaagaggaggaagaagaggaggacgaggatgaggacctggaagagctggaagtgctagagagaaaacccgccgcggggctgtcagctgctccagtccctacggccccggcagctggcgctccactaatggactttggcaatgacttcgtgccccctgccccccgcggtccactccctgctgctcccccggtggcgccggaaagacagccatcctgggatcctagtccagtatcttcaactgtgcctgctcccagtccactttcggctgccgccgtttccccgtcaaaacttcccgaagacgatgaaccgcccgctcggccacctcccccaccacccgcctcagtctccccccaggcagaacccgtgtggacaccgcccgctcctgctccagccgccccaccaagtacccccgccgctcccaagcgaagggggagttctggctctgttgatgagacgctgttcgccctgccagccgcctcagaacccgtcattcgatcaagcgcagaaaacatggatctgaaggagcagccagggaataccatatcagccggccaggaggacttccccagcgtcctgcttgaaacagccgcgtccctccccagcctaagccccctctcggcagcgtcttttaaggagcacgaatatctaggcaacctgtccaccgtgctgcccactgagggtacactccaagagaatgtgtctgaagcgtcaaaggaggtgagcgagaaggctaagaccttgctgatcgaccgcgatctgaccgagttttccgagcttgagtatagtgagatggggagctcttttagcgtgagcccaaaggctgagtcagcagttattgtcgctaatcctcgtgaggagattatcgtgaagaataaggatgaggaggagaagttggtgagcaacaatatcctccataatcaacaggagctgcctactgccctgaccaagctcgtgaaagaagacgaggtcgttagttctgaaaaagcaaaggattctttcaatgagaagcgcgtcgccgtggaggccccaatgagagaggagtacgccgactttaaacccttcgagcgcgtctgggaggtaaaggatagtaaggaagacagtgacatgcttgccgctggcggaaaaatcgaatccaacctagagagtaaagtcgacaagaagtgttttgccgattcactcgaacaaacaaaccatgaaaaagacagcgagagctcaaatgatgacacctcatttccgtctactcctgagggcattaaggacaggagtggagcttacatcacctgtgcacctttcaatccagctgccaccgaatcaatagccaccaatattttccccctgcttggcgacccaacatccgagaataaaacagatgaaaagaagatagaggagaagaaggcacaaattgtcacagagaaaaacacttctacaaaaacctccaatccttttctggtcgccgctcaagactctgaaaccgactatgtgacaaccgataacctgaccaaagtcactgaagaggtcgtggctaacatgcctgaaggcctaaccccggacctcgtccaggaagcctgcgaaagcgagcttaacgaggtcaccggcaccaaaatcgcgtatgagacaaagatggatctagtgcagacctcagaagtgatgcaggagtctctctatccagccgctcaactctgcccatcttttgaagagagtgaggcaacaccgtcgcctgtcctgcccgacatagtgatggaggccccattaaacagtgcggtcccctccgccggagcctccgtcatccaaccctccagctctcctctggaggcaagcagcgttaattatgaatccatcaagcacgaacccgagaaccctcccccctacgaagaagcaatgtcagtctccctcaagaaagtgtccggaatcaaagaagaaatcaaagagccggaaaacatcaatgcggctctccaagagaccgaggctccatatatcagcattgcatgtgacttaatcaaggagactaagttgagtgcagagcccgcaccagactttagcgactactccgagatggctaaagtggagcaacccgtgccggaccactctgaactggtggaggattcttcacccgattctgagcccgtggatttgttttccgatgattccatccctgatgtgccacagaagcaggacgagaccgtgatgctggtcaaggagtcattgactgaaacaagctttgagtcgatgattgagtatgaaaacaaagagaaattgagcgccctccctcccgagggggggaagccatatctcgaaagctttaaattgagccttgacaataccaaagataccctgctgcccgacgaagtcagcacgctctctaagaaggaaaaaattcctctgcagatggaggagttgtcgacggctgtctactctaatgacgatctgttcatatccaaagaagcacagatccgggagacagaaacgttcagtgatagctcaccaatcgaaatcatcgatgagtttcccacacttattagttccaaaaccgactctttttcgaagttagctcgtgagtacactgatttggaggtgagccacaaatctgaaatagcaaatgcccctgatggcgctgggagtctcccctgtacagagctgccgcatgatctctcactgaaaaacattcagcctaaagtggaggagaagataagttttagtgacgacttcagtaagaatggatcagccacatctaaagttttgctactcccaccagacgtctcagccctcgccactcaggcagagatcgaatcaattgtgaaacccaaagttctagtgaaagaagctgagaagaagctgccgtccgatacagaaaaagaggatcgatccccctcagcgattttctcggccgagctctctaagacaagcgtggtggacctcctgtattggagggacatcaaaaaaaccggagtggtgtttggagccagccttttcctcttgctgagcctgacagtgttttctatcgtcagtgtgactgcctacatagccctcgctctcctttcagtgaccatcagctttagaatttataagggggttatacaggccatccagaaatcagacgagggccatccttttagagcttatctcgaatccgaggtggcaatcagtgaagagctggttcagaagtactccaattccgccctaggccacgtgaactgcacaatcaaagagctgcgccgcctgttcttagtggacgacctagtggactcactgaagttcgctgtgctcatgtgggtttttacctatgtaggagcgctgtttaatggactcacactcttgattctcgccttaattagcctttttagcgtgcccgtcatttacgagcgccaccaggcacagattgatcattacttgggcctcgccaacaaaaatgtcaaagacgcgatggcaaagatccaggcaaagatccccggccttaaacgtaaggccgaatag

SEQ ID NO: 204705 - DNA, 3579 bp, Artificial Sequence
  derived and/or modified sequence
atggaagatcttgaccagtccccgcttgtttcgtccagcgactccccaccacgccctcaaccagccttcaaatatcagtttgtgcgggagccagaagacgaggaagaggaagaagaggaagaggaggaggatgaagacgaggacctcgaggagctggaggtgctcgagaggaaaccggctgccggtctttccgcagcccctgttcccactgcacctgcggcaggcgctcctctgatggattttggaaacgactttgtccctccagctcccaggggaccgctgcctgctgcacccccagtagcacctgaaaggcagccctcatgggatccaagccctgtgtcttctaccgtgcccgcaccctctccactttctgccgcagctgtatccccttcgaagctgcctgaagatgacgagccacccgcacgtcccccaccacctcctccagcgagcgtatctccccaggccgagccagtctggactcccccagcccctgccccagcagcgcctccatccacaccagcagcccctaaaaggcggggaagctcaggatcagtggatgaaaccctgtttgcactgcctgccgcatccgagcccgtgatccggtcctccgctgagaacatggatttgaaagagcagccgggtaatacgatttccgctggccaggaagatttccccagtgtgctgctggagactgcagctagcctgcctagtttatctccactgagtgctgcaagtttcaaggaacacgaatacctgggtaatctgtccactgtgctgcctaccgaaggtaccctgcaggaaaatgtctctgaggcctcgaaggaagtgtcagaaaaggcaaaaacacttcttattgatcgtgacctgactgaattttcagaactcgagtactccgagatgggcagcagcttctcagtgtctcctaaagcagaatctgcagttattgtcgcgaaccccagagaagaaataatcgtgaagaataaggatgaagaggagaagttagtctccaataatattttgcacaatcagcaggagctgcctaccgcccttacaaagctggttaaggaggatgaagtggtgtcatcggaaaaggccaaggacagcttcaatgaaaagagagtcgcggtggaggcaccaatgcgggaggagtacgccgatttcaagccttttgagagagtgtgggaagtcaaggactctaaagaggactctgatatgctggccgcaggcggaaagattgagtctaatttagagtccaaggtagataagaaatgctttgccgacagcctggaacaaacgaatcatgagaaagactccgaaagcagcaacgacgatacatccttcccatccacgcctgagggaattaaggatcggtctggagcctacattacgtgcgccccatttaaccccgctgcaacggaatctatcgctacaaatatattcccactgctgggtgatcccacatcagagaacaagacagatgagaagaagatcgaagaaaaaaaagcccagatcgtcaccgaaaagaacacctcaaccaagacctcaaatcccttcctcgtggcagcccaggattccgagacagattatgtcaccaccgataatctcacgaaagttacggaggaagtggttgccaatatgccagaaggacttaccccagatttagttcaggaggcgtgcgaaagcgaattgaacgaagtgacagggaccaaaattgcctatgaaacaaagatggacttggtgcagacatcagaggtgatgcaagaatcattataccccgcagcgcagttgtgtccttctttcgaagaatcggaggctactccatctcccgtcctcccggacattgttatggaggctcctttgaattccgccgtccctagcgccggagcttccgtgatacaaccatctagctctcctctcgaagcttccagcgtcaactatgaatccatcaaacatgagccagaaaacccacctccctacgaggaggccatgagtgtgtctcttaagaaggtctccggcattaaggaagagattaaggaacctgagaacatcaacgccgcactccaagaaacagaggcaccttacatatccatcgcttgcgatctgatcaaggagaccaagctctctgcggaacccgctcccgacttcagcgattattccgaaatggcgaaggtagaacagccggtgcctgatcacagcgaactagttgaggacagctccccagactctgaacctgtggatctgttctccgatgatagcattccggatgtgccccagaaacaggatgaaacagtgatgttagttaaggagagcctaactgaaacatctttcgaatcaatgattgagtacgagaacaaggagaagttgtccgctctccctcccgagggaggcaagccctatctcgagtctttcaagctgagcctcgataatactaaggatacgctgttgccggacgaggtttcaacattaagtaagaaggaaaagatccccctgcaaatggaagagctcagcaccgcagtctattctaatgacgatctatttattagcaaagaggcccagattcgcgagactgaaacattcagcgactccagtcccatcgagattatagacgagtttccaacgctgatttcctctaaaacagacagtttcagcaaattggcgcgagaatacactgacctagaggttagtcacaaaagcgagattgctaacgccccagacggggctggtagcttgccttgtaccgaattgccccacgatctgtctctgaagaacattcagcctaaggtggaggagaagattagcttctctgatgatttctccaagaacggttctgccacttctaaagtactcctcctccctccagatgtgagtgccctggcaacacaggccgagattgaatcgattgtaaaacccaaagtcctggttaaggaggctgaaaaaaagctgccgtccgacactgaaaaggaggaccgcagtccctcagcgatcttcagcgcagagctgtcaaaaacttctgtcgtggacctgttatactggagggacataaaaaagacaggggtagtgtttggggcatccttgtttttgctacttagcctgaccgtcttcagtattgtaagcgtcaccgcctacatcgccttagcccttctgagtgtcactatatcctttaggatttacaaaggggtgatccaggctatccagaaatctgacgaaggccaccctttcagggcatatctggagagcgaggtggccatctctgaggaattagttcaaaagtactcgaattctgctctaggacacgtgaactgtacgattaaagagctgaggcgcctattccttgtggacgatttggtggattcattaaaatttgcagtgctgatgtgggtattcacatacgtcggagccctgtttaacggacttacgctcttaatccttgcattaatctctctattctctgttccagtaatttacgaacggcaccaagcgcagatcgaccactatctcgggctggccaacaaaaatgtgaaagacgccatggccaagatacaagccaagattcctggtctgaagcgtaaggccgagtag

SEQ ID NO: 204706 - DNA, 4790 bp, Artificial Sequence
  derived and/or modified sequence
gctggcctcactcctagctcatctgggcggcggcggcaagtggggacagggcgggtggcgcatcaccggcgcggaggcaggaggagcagtctcattgttccgggagccgtcaccacagtaggtccctcggctcagtcggcccagcccctctcagtcctccccaacccccacaaccgcccgcggctctgagacgcggccccggcggcggcggcagcagctgcagcatcatctccaccctccagccatggaagacctggaccagtctcctctggtctcgtcctcggacagcccaccccggccgcagcccgcgttcaagtaccagttcgtgagggagcccgaggacgaggaggaagaagaggaggaggaagaggaggacgaggacgaagacctggaggagctggaggtgctggagaggaagcccgccgccgggctgtccgcggccccagtgcccaccgcccctgccgccggcgcgcccctgatggacttcggaaatgacttcgtgccgccggcgccccggggacccctgccggccgctccccccgtcgccccggagcggcagccgtcttgggacccgagcccggtgtcgtcgaccgtgcccgcgccatccccgctgtctgctgccgcagtctcgccctccaagctccctgaggacgacgagcctccggcccggcctccccctcctcccccggccagcgtgagcccccaggcagagcccgtgtggaccccgccagccccggctcccgccgcgcccccctccaccccggccgcgcccaagcgcaggggctcctcgggctcagtggatgagaccctttttgctcttcctgctgcatctgagcctgtgatacgctcctctgcagaaaatatggacttgaaggagcagccaggtaacactatttcggctggtcaagaggatttcccatctgtcctgcttgaaactgctgcttctcttccttctctgtctcctctctcagccgcttctttcaaagaacatgaataccttggtaatttgtcaacagtattacccactgaaggaacacttcaagaaaatgtcagtgaagcttctaaagaggtctcagagaaggcaaaaactctactcatagatagagatttaacagagttttcagaattagaatactcagaaatgggatcatcgttcagtgtctctccaaaagcagaatctgccgtaatagtagcaaatcctagggaagaaataatcgtgaaaaataaagatgaagaagagaagttagttagtaataacatccttcataatcaacaagagttacctacagctcttactaaattggttaaagaggatgaagttgtgtcttcagaaaaagcaaaagacagttttaatgaaaagagagttgcagtggaagctcctatgagggaggaatatgcagacttcaaaccatttgagcgagtatgggaagtgaaagatagtaaggaagatagtgatatgttggctgctggaggtaaaatcgagagcaacttggaaagtaaagtggataaaaaatgttttgcagatagccttgagcaaactaatcacgaaaaagatagtgagagtagtaatgatgatacttctttccccagtacgccagaaggtataaaggatcgttcaggagcatatatcacatgtgctccctttaacccagcagcaactgagagcattgcaacaaacatttttcctttgttaggagatcctacttcagaaaataagaccgatgaaaaaaaaatagaagaaaagaaggcccaaatagtaacagagaagaatactagcaccaaaacatcaaacccttttcttgtagcagcacaggattctgagacagattatgtcacaacagataatttaacaaaggtgactgaggaagtcgtggcaaacatgcctgaaggcctgactccagatttagtacaggaagcatgtgaaagtgaattgaatgaagttactggtacaaagattgcttatgaaacaaaaatggacttggttcaaacatcagaagttatgcaagagtcactctatcctgcagcacagctttgcccatcatttgaagagtcagaagctactccttcaccagttttgcctgacattgttatggaagcaccattgaattctgcagttcctagtgctggtgcttccgtgatacagcccagctcatcaccattagaagcttcttcagttaattatgaaagcataaaacatgagcctgaaaaccccccaccatatgaagaggccatgagtgtatcactaaaaaaagtatcaggaataaaggaagaaattaaagagcctgaaaatattaatgcagctcttcaagaaacagaagctccttatatatctattgcatgtgatttaattaaagaaacaaagctttctgctgaaccagctccggatttctctgattattcagaaatggcaaaagttgaacagccagtgcctgatcattctgagctagttgaagattcctcacctgattctgaaccagttgacttatttagtgatgattcaatacctgacgttccacaaaaacaagatgaaactgtgatgcttgtgaaagaaagtctcactgagacttcatttgagtcaatgatagaatatgaaaataaggaaaaactcagtgctttgccacctgagggaggaaagccatatttggaatcttttaagctcagtttagataacacaaaagataccctgttacctgatgaagtttcaacattgagcaaaaaggagaaaattcctttgcagatggaggagctcagtactgcagtttattcaaatgatgacttatttatttctaaggaagcacagataagagaaactgaaacgttttcagattcatctccaattgaaattatagatgagttccctacattgatcagttctaaaactgattcattttctaaattagccagggaatatactgacctagaagtatcccacaaaagtgaaattgctaatgccccggatggagctgggtcattgccttgcacagaattgccccatgacctttctttgaagaacatacaacccaaagttgaagagaaaatcagtttctcagatgacttttctaaaaatgggtctgctacatcaaaggtgctcttattgcctccagatgtttctgctttggccactcaagcagagatagagagcatagttaaacccaaagttcttgtgaaagaagctgagaaaaaacttccttccgatacagaaaaagaggacagatcaccatctgctatattttcagcagagctgagtaaaacttcagttgttgacctcctgtactggagagacattaagaagactggagtggtgtttggtgccagcctattcctgctgctttcattgacagtattcagcattgtgagcgtaacagcctacattgccttggccctgctctctgtgaccatcagctttaggatatacaagggtgtgatccaagctatccagaaatcagatgaaggccacccattcagggcatatctggaatctgaagttgctatatctgaggagttggttcagaagtacagtaattctgctcttggtcatgtgaactgcacgataaaggaactcaggcgcctcttcttagttgatgatttagttgattctctgaagtttgcagtgttgatgtgggtatttacctatgttggtgccttgtttaatggtctgacactactgattttggctctcatttcactcttcagtgttcctgttatttatgaacggcatcaggcacagatagatcattatctaggacttgcaaataagaatgttaaagatgctatggctaaaatccaagcaaaaatccctggattgaagcgcaaagctgaatgaaaacgcccaaaataattagtaggagttcatctttaaaggggatattcatttgattatacgggggagggtcagggaagaacgaaccttgacgttgcagtgcagtttcacagatcgttgttagatctttatttttagccatgcactgttgtgaggaaaaattacctgtcttgactgccatgtgttcatcatcttaagtattgtaagctgctatgtatggatttaaaccgtaatcatatctttttcctatctatctgaggcactggtggaataaaaaacctgtatattttactttgttgcagatagtcttgccgcatcttggcaagttgcagagatggtggagctagaaaaaaaaaaaaaaaagcccttttcagtttgtgcactgtgtatggtccgtgtagattgatgcagattttctgaaatgaaatgtttgtttagacgagatcataccggtaaagcaggaatgacaaagcttgcttttctggtatgttctaggtgtattgtgacttttactgttatattaattgccaatataagtaaatatagattatatatgtatagtgtttcacaaagcttagacctttaccttccagccaccccacagtgcttgatatttcagagtcagtcattggttatacatgtgtagttccaaagcacataagctagaagaagaaatatttctaggagcactaccatctgttttcaacatgaaatgccacacacatagaactccaacatcaatttcattgcacagactgactgtagttaattttgtcacagaatctatggactgaatctaatgcttccaaaaatgttgtttgtttgcaaatatcaaacattgttatgcaagaaattattaattacaaaatgaagatttataccattgtggtttaagctgtactgaactaaatctgtggaatgcattgtgaactgtaaaagcaaagtatcaataaagcttatagacttaaaa

SEQ ID NO: 204707 - DNA, 4110 bp, Artificial Sequence
  derived and/or modified sequence
ctcctcctgtgctcgtggggagctggccgagtggaaaacgtccacattgacccaaccgcagtgaagggagagcgcctccagtggtgtggtgcgtggagaaatgggaaggagagagttctgatgagaccctttttgctcttcctgctgcatctgagcctgtgatacgctcctctgcagaaaatatggacttgaaggagcagccaggtaacactatttcggctggtcaagaggatttcccatctgtcctgcttgaaactgctgcttctcttccttctctgtctcctctctcagccgcttctttcaaagaacatgaataccttggtaatttgtcaacagtattacccactgaaggaacacttcaagaaaatgtcagtgaagcttctaaagaggtctcagagaaggcaaaaactctactcatagatagagatttaacagagttttcagaattagaatactcagaaatgggatcatcgttcagtgtctctccaaaagcagaatctgccgtaatagtagcaaatcctagggaagaaataatcgtgaaaaataaagatgaagaagagaagttagttagtaataacatccttcataatcaacaagagttacctacagctcttactaaattggttaaagaggatgaagttgtgtcttcagaaaaagcaaaagacagttttaatgaaaagagagttgcagtggaagctcctatgagggaggaatatgcagacttcaaaccatttgagcgagtatgggaagtgaaagatagtaaggaagatagtgatatgttggctgctggaggtaaaatcgagagcaacttggaaagtaaagtggataaaaaatgttttgcagatagccttgagcaaactaatcacgaaaaagatagtgagagtagtaatgatgatacttctttccccagtacgccagaaggtataaaggatcgttcaggagcatatatcacatgtgctccctttaacccagcagcaactgagagcattgcaacaaacatttttcctttgttaggagatcctacttcagaaaataagaccgatgaaaaaaaaatagaagaaaagaaggcccaaatagtaacagagaagaatactagcaccaaaacatcaaacccttttcttgtagcagcacaggattctgagacagattatgtcacaacagataatttaacaaaggtgactgaggaagtcgtggcaaacatgcctgaaggcctgactccagatttagtacaggaagcatgtgaaagtgaattgaatgaagttactggtacaaagattgcttatgaaacaaaaatggacttggttcaaacatcagaagttatgcaagagtcactctatcctgcagcacagctttgcccatcatttgaagagtcagaagctactccttcaccagttttgcctgacattgttatggaagcaccattgaattctgcagttcctagtgctggtgcttccgtgatacagcccagctcatcaccattagaagcttcttcagttaattatgaaagcataaaacatgagcctgaaaaccccccaccatatgaagaggccatgagtgtatcactaaaaaaagtatcaggaataaaggaagaaattaaagagcctgaaaatattaatgcagctcttcaagaaacagaagctccttatatatctattgcatgtgatttaattaaagaaacaaagctttctgctgaaccagctccggatttctctgattattcagaaatggcaaaagttgaacagccagtgcctgatcattctgagctagttgaagattcctcacctgattctgaaccagttgacttatttagtgatgattcaatacctgacgttccacaaaaacaagatgaaactgtgatgcttgtgaaagaaagtctcactgagacttcatttgagtcaatgatagaatatgaaaataaggaaaaactcagtgctttgccacctgagggaggaaagccatatttggaatcttttaagctcagtttagataacacaaaagataccctgttacctgatgaagtttcaacattgagcaaaaaggagaaaattcctttgcagatggaggagctcagtactgcagtttattcaaatgatgacttatttatttctaaggaagcacagataagagaaactgaaacgttttcagattcatctccaattgaaattatagatgagttccctacattgatcagttctaaaactgattcattttctaaattagccagggaatatactgacctagaagtatcccacaaaagtgaaattgctaatgccccggatggagctgggtcattgccttgcacagaattgccccatgacctttctttgaagaacatacaacccaaagttgaagagaaaatcagtttctcagatgacttttctaaaaatgggtctgctacatcaaaggtgctcttattgcctccagatgtttctgctttggccactcaagcagagatagagagcatagttaaacccaaagttcttgtgaaagaagctgagaaaaaacttccttccgatacagaaaaagaggacagatcaccatctgctatattttcagcagagctgagtaaaacttcagttgttgacctcctgtactggagagacattaagaagactggagtggtgtttggtgccagcctattcctgctgctttcattgacagtattcagcattgtgagcgtaacagcctacattgccttggccctgctctctgtgaccatcagctttaggatatacaagggtgtgatccaagctatccagaaatcagatgaaggccacccattcagggcatatctggaatctgaagttgctatatctgaggagttggttcagaagtacagtaattctgctcttggtcatgtgaactgcacgataaaggaactcaggcgcctcttcttagttgatgatttagttgattctctgaagtttgcagtgttgatgtgggtatttacctatgttggtgccttgtttaatggtctgacactactgattttggctctcatttcactcttcagtgttcctgttatttatgaacggcatcaggcacagatagatcattatctaggacttgcaaataagaatgttaaagatgctatggctaaaatccaagcaaaaatccctggattgaagcgcaaagctgaatgaaaacgcccaaaataattagtaggagttcatctttaaaggggatattcatttgattatacgggggagggtcagggaagaacgaaccttgacgttgcagtgcagtttcacagatcgttgttagatctttatttttagccatgcactgttgtgaggaaaaattacctgtcttgactgccatgtgttcatcatcttaagtattgtaagctgctatgtatggatttaaaccgtaatcatatctttttcctatctatctgaggcactggtggaataaaaaacctgtatattttactttgttgcagatagtcttgccgcatcttggcaagttgcagagatggtggagctagaaaaaaaaaaaaaaaagcccttttcagtttgtgcactgtgtatggtccgtgtagattgatgcagattttctgaaatgaaatgtttgtttagacgagatcataccggtaaagcaggaatgacaaagcttgcttttctggtatgttctaggtgtattgtgacttttactgttatattaattgccaatataagtaaatatagattatatatgtatagtgtttcacaaagcttagacctttaccttccagccaccccacagtgcttgatatttcagagtcagtcattggttatacatgtgtagttccaaagcacataagctagaagaagaaatatttctaggagcactaccatctgttttcaacatgaaatgccacacacatagaactccaacatcaatttcattgcacagactgactgtagttaattttgtcacagaatctatggactgaatctaatgcttccaaaaatgttgtttgtttgcaaatatcaaacattgttatgcaagaaattattaattacaaaatgaagatttataccattgtggtttaagctgtactgaactaaatctgtggaatgcattgtgaactgtaaaagcaaagtatcaataaagcttatagacttaaaa

SEQ ID NO: 204708 - DNA, 4161 bp, Artificial Sequence
  derived and/or modified sequence
agtccctgccctcccctggggagggtgagtcacgccaaactgggcggagagtccgctggcctcactcctagctcatctgggcggcggcggcaagtggggacagggcgggtggcgcatcaccggcgcggaggcaggaggagcagtctcattgttccgggagccgtcaccacaatgagaccctttttgctcttcctgctgcatctgagcctgtgatacgctcctctgcagaaaatatggacttgaaggagcagccaggtaacactatttcggctggtcaagaggatttcccatctgtcctgcttgaaactgctgcttctcttccttctctgtctcctctctcagccgcttctttcaaagaacatgaataccttggtaatttgtcaacagtattacccactgaaggaacacttcaagaaaatgtcagtgaagcttctaaagaggtctcagagaaggcaaaaactctactcatagatagagatttaacagagttttcagaattagaatactcagaaatgggatcatcgttcagtgtctctccaaaagcagaatctgccgtaatagtagcaaatcctagggaagaaataatcgtgaaaaataaagatgaagaagagaagttagttagtaataacatccttcataatcaacaagagttacctacagctcttactaaattggttaaagaggatgaagttgtgtcttcagaaaaagcaaaagacagttttaatgaaaagagagttgcagtggaagctcctatgagggaggaatatgcagacttcaaaccatttgagcgagtatgggaagtgaaagatagtaaggaagatagtgatatgttggctgctggaggtaaaatcgagagcaacttggaaagtaaagtggataaaaaatgttttgcagatagccttgagcaaactaatcacgaaaaagatagtgagagtagtaatgatgatacttctttccccagtacgccagaaggtataaaggatcgttcaggagcatatatcacatgtgctccctttaacccagcagcaactgagagcattgcaacaaacatttttcctttgttaggagatcctacttcagaaaataagaccgatgaaaaaaaaatagaagaaaagaaggcccaaatagtaacagagaagaatactagcaccaaaacatcaaacccttttcttgtagcagcacaggattctgagacagattatgtcacaacagataatttaacaaaggtgactgaggaagtcgtggcaaacatgcctgaaggcctgactccagatttagtacaggaagcatgtgaaagtgaattgaatgaagttactggtacaaagattgcttatgaaacaaaaatggacttggttcaaacatcagaagttatgcaagagtcactctatcctgcagcacagctttgcccatcatttgaagagtcagaagctactccttcaccagttttgcctgacattgttatggaagcaccattgaattctgcagttcctagtgctggtgcttccgtgatacagcccagctcatcaccattagaagcttcttcagttaattatgaaagcataaaacatgagcctgaaaaccccccaccatatgaagaggccatgagtgtatcactaaaaaaagtatcaggaataaaggaagaaattaaagagcctgaaaatattaatgcagctcttcaagaaacagaagctccttatatatctattgcatgtgatttaattaaagaaacaaagctttctgctgaaccagctccggatttctctgattattcagaaatggcaaaagttgaacagccagtgcctgatcattctgagctagttgaagattcctcacctgattctgaaccagttgacttatttagtgatgattcaatacctgacgttccacaaaaacaagatgaaactgtgatgcttgtgaaagaaagtctcactgagacttcatttgagtcaatgatagaatatgaaaataaggaaaaactcagtgctttgccacctgagggaggaaagccatatttggaatcttttaagctcagtttagataacacaaaagataccctgttacctgatgaagtttcaacattgagcaaaaaggagaaaattcctttgcagatggaggagctcagtactgcagtttattcaaatgatgacttatttatttctaaggaagcacagataagagaaactgaaacgttttcagattcatctccaattgaaattatagatgagttccctacattgatcagttctaaaactgattcattttctaaattagccagggaatatactgacctagaagtatcccacaaaagtgaaattgctaatgccccggatggagctgggtcattgccttgcacagaattgccccatgacctttctttgaagaacatacaacccaaagttgaagagaaaatcagtttctcagatgacttttctaaaaatgggtctgctacatcaaaggtgctcttattgcctccagatgtttctgctttggccactcaagcagagatagagagcatagttaaacccaaagttcttgtgaaagaagctgagaaaaaacttccttccgatacagaaaaagaggacagatcaccatctgctatattttcagcagagctgagtaaaacttcagttgttgacctcctgtactggagagacattaagaagactggagtggtgtttggtgccagcctattcctgctgctttcattgacagtattcagcattgtgagcgtaacagcctacattgccttggccctgctctctgtgaccatcagctttaggatatacaagggtgtgatccaagctatccagaaatcagatgaaggccacccattcagggcatatctggaatctgaagttgctatatctgaggagttggttcagaagtacagtaattctgctcttggtcatgtgaactgcacgataaaggaactcaggcgcctcttcttagttgatgatttagttgattctctgaagtttgcagtgttgatgtgggtatttacctatgttggtgccttgtttaatggtctgacactactgattttggctctcatttcactcttcagtgttcctgttatttatgaacggcatcaggcacagatagatcattatctaggacttgcaaataagaatgttaaagatgctatggctaaaatccaagcaaaaatccctggattgaagcgcaaagctgaatgaaaacgcccaaaataattagtaggagttcatctttaaaggggatattcatttgattatacgggggagggtcagggaagaacgaaccttgacgttgcagtgcagtttcacagatcgttgttagatctttatttttagccatgcactgttgtgaggaaaaattacctgtcttgactgccatgtgttcatcatcttaagtattgtaagctgctatgtatggatttaaaccgtaatcatatctttttcctatctatctgaggcactggtggaataaaaaacctgtatattttactttgttgcagatagtcttgccgcatcttggcaagttgcagagatggtggagctagaaaaaaaaaaaaaaaagcccttttcagtttgtgcactgtgtatggtccgtgtagattgatgcagattttctgaaatgaaatgtttgtttagacgagatcataccggtaaagcaggaatgacaaagcttgcttttctggtatgttctaggtgtattgtgacttttactgttatattaattgccaatataagtaaatatagattatatatgtatagtgtttcacaaagcttagacctttaccttccagccaccccacagtgcttgatatttcagagtcagtcattggttatacatgtgtagttccaaagcacataagctagaagaagaaatatttctaggagcactaccatctgttttcaacatgaaatgccacacacatagaactccaacatcaatttcattgcacagactgactgtagttaattttgtcacagaatctatggactgaatctaatgcttccaaaaatgttgtttgtttgcaaatatcaaacattgttatgcaagaaattattaattacaaaatgaagatttataccattgtggtttaagctgtactgaactaaatctgtggaatgcattgtgaactgtaaaagcaaagtatcaataaagcttatagacttaaaa

SEQ ID NO: 204709 - DNA, 4102 bp, Artificial Sequence
  derived and/or modified sequence
atacggacgccagctgcgggcaaggccaagaccccaccccaactcacggttacccaaagtgggggtggagctcccagctctcagccccgcccattgaacgcaatcccagccgatgagaccctttttgctcttcctgctgcatctgagcctgtgatacgctcctctgcagaaaatatggacttgaaggagcagccaggtaacactatttcggctggtcaagaggatttcccatctgtcctgcttgaaactgctgcttctcttccttctctgtctcctctctcagccgcttctttcaaagaacatgaataccttggtaatttgtcaacagtattacccactgaaggaacacttcaagaaaatgtcagtgaagcttctaaagaggtctcagagaaggcaaaaactctactcatagatagagatttaacagagttttcagaattagaatactcagaaatgggatcatcgttcagtgtctctccaaaagcagaatctgccgtaatagtagcaaatcctagggaagaaataatcgtgaaaaataaagatgaagaagagaagttagttagtaataacatccttcataatcaacaagagttacctacagctcttactaaattggttaaagaggatgaagttgtgtcttcagaaaaagcaaaagacagttttaatgaaaagagagttgcagtggaagctcctatgagggaggaatatgcagacttcaaaccatttgagcgagtatgggaagtgaaagatagtaaggaagatagtgatatgttggctgctggaggtaaaatcgagagcaacttggaaagtaaagtggataaaaaatgttttgcagatagccttgagcaaactaatcacgaaaaagatagtgagagtagtaatgatgatacttctttccccagtacgccagaaggtataaaggatcgttcaggagcatatatcacatgtgctccctttaacccagcagcaactgagagcattgcaacaaacatttttcctttgttaggagatcctacttcagaaaataagaccgatgaaaaaaaaatagaagaaaagaaggcccaaatagtaacagagaagaatactagcaccaaaacatcaaacccttttcttgtagcagcacaggattctgagacagattatgtcacaacagataatttaacaaaggtgactgaggaagtcgtggcaaacatgcctgaaggcctgactccagatttagtacaggaagcatgtgaaagtgaattgaatgaagttactggtacaaagattgcttatgaaacaaaaatggacttggttcaaacatcagaagttatgcaagagtcactctatcctgcagcacagctttgcccatcatttgaagagtcagaagctactccttcaccagttttgcctgacattgttatggaagcaccattgaattctgcagttcctagtgctggtgcttccgtgatacagcccagctcatcaccattagaagcttcttcagttaattatgaaagcataaaacatgagcctgaaaaccccccaccatatgaagaggccatgagtgtatcactaaaaaaagtatcaggaataaaggaagaaattaaagagcctgaaaatattaatgcagctcttcaagaaacagaagctccttatatatctattgcatgtgatttaattaaagaaacaaagctttctgctgaaccagctccggatttctctgattattcagaaatggcaaaagttgaacagccagtgcctgatcattctgagctagttgaagattcctcacctgattctgaaccagttgacttatttagtgatgattcaatacctgacgttccacaaaaacaagatgaaactgtgatgcttgtgaaagaaagtctcactgagacttcatttgagtcaatgatagaatatgaaaataaggaaaaactcagtgctttgccacctgagggaggaaagccatatttggaatcttttaagctcagtttagataacacaaaagataccctgttacctgatgaagtttcaacattgagcaaaaaggagaaaattcctttgcagatggaggagctcagtactgcagtttattcaaatgatgacttatttatttctaaggaagcacagataagagaaactgaaacgttttcagattcatctccaattgaaattatagatgagttccctacattgatcagttctaaaactgattcattttctaaattagccagggaatatactgacctagaagtatcccacaaaagtgaaattgctaatgccccggatggagctgggtcattgccttgcacagaattgccccatgacctttctttgaagaacatacaacccaaagttgaagagaaaatcagtttctcagatgacttttctaaaaatgggtctgctacatcaaaggtgctcttattgcctccagatgtttctgctttggccactcaagcagagatagagagcatagttaaacccaaagttcttgtgaaagaagctgagaaaaaacttccttccgatacagaaaaagaggacagatcaccatctgctatattttcagcagagctgagtaaaacttcagttgttgacctcctgtactggagagacattaagaagactggagtggtgtttggtgccagcctattcctgctgctttcattgacagtattcagcattgtgagcgtaacagcctacattgccttggccctgctctctgtgaccatcagctttaggatatacaagggtgtgatccaagctatccagaaatcagatgaaggccacccattcagggcatatctggaatctgaagttgctatatctgaggagttggttcagaagtacagtaattctgctcttggtcatgtgaactgcacgataaaggaactcaggcgcctcttcttagttgatgatttagttgattctctgaagtttgcagtgttgatgtgggtatttacctatgttggtgccttgtttaatggtctgacactactgattttggctctcatttcactcttcagtgttcctgttatttatgaacggcatcaggcacagatagatcattatctaggacttgcaaataagaatgttaaagatgctatggctaaaatccaagcaaaaatccctggattgaagcgcaaagctgaatgaaaacgcccaaaataattagtaggagttcatctttaaaggggatattcatttgattatacgggggagggtcagggaagaacgaaccttgacgttgcagtgcagtttcacagatcgttgttagatctttatttttagccatgcactgttgtgaggaaaaattacctgtcttgactgccatgtgttcatcatcttaagtattgtaagctgctatgtatggatttaaaccgtaatcatatctttttcctatctatctgaggcactggtggaataaaaaacctgtatattttactttgttgcagatagtcttgccgcatcttggcaagttgcagagatggtggagctagaaaaaaaaaaaaaaaagcccttttcagtttgtgcactgtgtatggtccgtgtagattgatgcagattttctgaaatgaaatgtttgtttagacgagatcataccggtaaagcaggaatgacaaagcttgcttttctggtatgttctaggtgtattgtgacttttactgttatattaattgccaatataagtaaatatagattatatatgtatagtgtttcacaaagcttagacctttaccttccagccaccccacagtgcttgatatttcagagtcagtcattggttatacatgtgtagttccaaagcacataagctagaagaagaaatatttctaggagcactaccatctgttttcaacatgaaatgccacacacatagaactccaacatcaatttcattgcacagactgactgtagttaattttgtcacagaatctatggactgaatctaatgcttccaaaaatgttgtttgtttgcaaatatcaaacattgttatgcaagaaattattaattacaaaatgaagatttataccattgtggtttaagctgtactgaactaaatctgtggaatgcattgtgaactgtaaaagcaaagtatcaataaagcttatagacttaaaa

SEQ ID NO: 204710 - DNA, 4061 bp, Artificial Sequence
  derived and/or modified sequence
aatattgcctgttctacagagttccctaattccatattgatgatacctattgggaaactttagtttttttaatgagaccctttttgctcttcctgctgcatctgagcctgtgatacgctcctctgcagaaaatatggacttgaaggagcagccaggtaacactatttcggctggtcaagaggatttcccatctgtcctgcttgaaactgctgcttctcttccttctctgtctcctctctcagccgcttctttcaaagaacatgaataccttggtaatttgtcaacagtattacccactgaaggaacacttcaagaaaatgtcagtgaagcttctaaagaggtctcagagaaggcaaaaactctactcatagatagagatttaacagagttttcagaattagaatactcagaaatgggatcatcgttcagtgtctctccaaaagcagaatctgccgtaatagtagcaaatcctagggaagaaataatcgtgaaaaataaagatgaagaagagaagttagttagtaataacatccttcataatcaacaagagttacctacagctcttactaaattggttaaagaggatgaagttgtgtcttcagaaaaagcaaaagacagttttaatgaaaagagagttgcagtggaagctcctatgagggaggaatatgcagacttcaaaccatttgagcgagtatgggaagtgaaagatagtaaggaagatagtgatatgttggctgctggaggtaaaatcgagagcaacttggaaagtaaagtggataaaaaatgttttgcagatagccttgagcaaactaatcacgaaaaagatagtgagagtagtaatgatgatacttctttccccagtacgccagaaggtataaaggatcgttcaggagcatatatcacatgtgctccctttaacccagcagcaactgagagcattgcaacaaacatttttcctttgttaggagatcctacttcagaaaataagaccgatgaaaaaaaaatagaagaaaagaaggcccaaatagtaacagagaagaatactagcaccaaaacatcaaacccttttcttgtagcagcacaggattctgagacagattatgtcacaacagataatttaacaaaggtgactgaggaagtcgtggcaaacatgcctgaaggcctgactccagatttagtacaggaagcatgtgaaagtgaattgaatgaagttactggtacaaagattgcttatgaaacaaaaatggacttggttcaaacatcagaagttatgcaagagtcactctatcctgcagcacagctttgcccatcatttgaagagtcagaagctactccttcaccagttttgcctgacattgttatggaagcaccattgaattctgcagttcctagtgctggtgcttccgtgatacagcccagctcatcaccattagaagcttcttcagttaattatgaaagcataaaacatgagcctgaaaaccccccaccatatgaagaggccatgagtgtatcactaaaaaaagtatcaggaataaaggaagaaattaaagagcctgaaaatattaatgcagctcttcaagaaacagaagctccttatatatctattgcatgtgatttaattaaagaaacaaagctttctgctgaaccagctccggatttctctgattattcagaaatggcaaaagttgaacagccagtgcctgatcattctgagctagttgaagattcctcacctgattctgaaccagttgacttatttagtgatgattcaatacctgacgttccacaaaaacaagatgaaactgtgatgcttgtgaaagaaagtctcactgagacttcatttgagtcaatgatagaatatgaaaataaggaaaaactcagtgctttgccacctgagggaggaaagccatatttggaatcttttaagctcagtttagataacacaaaagataccctgttacctgatgaagtttcaacattgagcaaaaaggagaaaattcctttgcagatggaggagctcagtactgcagtttattcaaatgatgacttatttatttctaaggaagcacagataagagaaactgaaacgttttcagattcatctccaattgaaattatagatgagttccctacattgatcagttctaaaactgattcattttctaaattagccagggaatatactgacctagaagtatcccacaaaagtgaaattgctaatgccccggatggagctgggtcattgccttgcacagaattgccccatgacctttctttgaagaacatacaacccaaagttgaagagaaaatcagtttctcagatgacttttctaaaaatgggtctgctacatcaaaggtgctcttattgcctccagatgtttctgctttggccactcaagcagagatagagagcatagttaaacccaaagttcttgtgaaagaagctgagaaaaaacttccttccgatacagaaaaagaggacagatcaccatctgctatattttcagcagagctgagtaaaacttcagttgttgacctcctgtactggagagacattaagaagactggagtggtgtttggtgccagcctattcctgctgctttcattgacagtattcagcattgtgagcgtaacagcctacattgccttggccctgctctctgtgaccatcagctttaggatatacaagggtgtgatccaagctatccagaaatcagatgaaggccacccattcagggcatatctggaatctgaagttgctatatctgaggagttggttcagaagtacagtaattctgctcttggtcatgtgaactgcacgataaaggaactcaggcgcctcttcttagttgatgatttagttgattctctgaagtttgcagtgttgatgtgggtatttacctatgttggtgccttgtttaatggtctgacactactgattttggctctcatttcactcttcagtgttcctgttatttatgaacggcatcaggcacagatagatcattatctaggacttgcaaataagaatgttaaagatgctatggctaaaatccaagcaaaaatccctggattgaagcgcaaagctgaatgaaaacgcccaaaataattagtaggagttcatctttaaaggggatattcatttgattatacgggggagggtcagggaagaacgaaccttgacgttgcagtgcagtttcacagatcgttgttagatctttatttttagccatgcactgttgtgaggaaaaattacctgtcttgactgccatgtgttcatcatcttaagtattgtaagctgctatgtatggatttaaaccgtaatcatatctttttcctatctatctgaggcactggtggaataaaaaacctgtatattttactttgttgcagatagtcttgccgcatcttggcaagttgcagagatggtggagctagaaaaaaaaaaaaaaaagcccttttcagtttgtgcactgtgtatggtccgtgtagattgatgcagattttctgaaatgaaatgtttgtttagacgagatcataccggtaaagcaggaatgacaaagcttgcttttctggtatgttctaggtgtattgtgacttttactgttatattaattgccaatataagtaaatatagattatatatgtatagtgtttcacaaagcttagacctttaccttccagccaccccacagtgcttgatatttcagagtcagtcattggttatacatgtgtagttccaaagcacataagctagaagaagaaatatttctaggagcactaccatctgttttcaacatgaaatgccacacacatagaactccaacatcaatttcattgcacagactgactgtagttaattttgtcacagaatctatggactgaatctaatgcttccaaaaatgttgtttgtttgcaaatatcaaacattgttatgcaagaaattattaattacaaaatgaagatttataccattgtggtttaagctgtactgaactaaatctgtggaatgcattgtgaactgtaaaagcaaagtatcaataaagcttatagacttaaaa

SEQ ID NO: 204711 - DNA, 589 bp, Artificial Sequence
  derived and/or modified sequence
agggcctctgaggactgctgcagacacagctgaggcagcccggctccaggctcgctggaggggctgtgtctggggagatgcttctctataaaaagcttagagagagttgtcatcgaaaataacaagactattctggatatgagtaacactgaggaataagatactaagccattaaagaagggtataaaaattatgtctgacacaggatatggagagaaatatgatgaagatgaaatatgacaacagaatcaagatgagaccctttttgctcttcctgctgcatctgagcctgtgatacgctcctctgcagaaaatatggacttgaaggagcagccaggtaacactatttcggctggtcaagaggatttcccatctgtcctgcttgaaactgctgcttctcttccttctctgtctcctctctcagccgcttctttcaaagaacatgaataccttggtaatttgtcaacagtattacccactgaaggaacacttcaagaaaatgtcagtgaagcttctaaagaggtctcagagaaggcaaaaactctactcatagatagagatttaacagagttttcagaattagaatact

SEQ ID NO: 204712 - DNA, 3579 bp, Artificial Sequence
  derived and/or modified sequence
atggaggacctggaccagagccccctggtgagcagcagcgacagcccccccagaccccagcccgccttcaagtaccagttcgtgagagagcccgaggacgaggaggaggaggaggaggaggaggaggaggacgaggacgaggacctggaggagctggaggtgctggagagaaagcccgccgccggcctgagcgccgcccccgtgcccaccgcccccgccgccggcgcccccctgatggacttcggcaacgacttcgtgccccccgcccccagaggccccctgcccgccgccccccccgtggcccccgagagacagcccagctgggaccccagccccgtgagcagcaccgtgcccgcccccagccccctgagcgccgccgccgtgagccccagcaagctgcccgaggacgacgagccccccgccagaccccccccccccccccccgccagcgtgagcccccaggccgagcccgtgtggaccccccccgcccccgcccccgccgccccccccagcacccccgccgcccccaagagaagaggcagcagcggcagcgtggacgagaccctgttcgccctgcccgccgccagcgagcccgtgatcagaagcagcgccgagaacatggacctgaaggagcagcccggcaacaccatcagcgccggccaggaggacttccccagcgtgctgctggagaccgccgccagcctgcccagcctgagccccctgagcgccgccagcttcaaggagcacgagtacctgggcaacctgagcaccgtgctgcccaccgagggcaccctgcaggagaacgtgagcgaggccagcaaggaggtgagcgagaaggccaagaccctgctgatcgacagagacctgaccgagttcagcgagctggagtacagcgagatgggcagcagcttcagcgtgagccccaaggccgagagcgccgtgatcgtggccaaccccagagaggagatcatcgtgaagaacaaggacgaggaggagaagctggtgagcaacaacatcctgcacaaccagcaggagctgcccaccgccctgaccaagctggtgaaggaggacgaggtggtgagcagcgagaaggccaaggacagcttcaacgagaagagagtggccgtggaggcccccatgagagaggagtacgccgacttcaagcccttcgagagagtgtgggaggtgaaggacagcaaggaggacagcgacatgctggccgccggcggcaagatcgagagcaacctggagagcaaggtggacaagaagtgcttcgccgacagcctggagcagaccaaccacgagaaggacagcgagagcagcaacgacgacaccagcttccccagcacccccgagggcatcaaggacagaagcggcgcctacatcacctgcgcccccttcaaccccgccgccaccgagagcatcgccaccaacatcttccccctgctgggcgaccccaccagcgagaacaagaccgacgagaagaagatcgaggagaagaaggcccagatcgtgaccgagaagaacaccagcaccaagaccagcaaccccttcctggtggccgcccaggacagcgagaccgactacgtgaccaccgacaacctgaccaaggtgaccgaggaggtggtggccaacatgcccgagggcctgacccccgacctggtgcaggaggcctgcgagagcgagctgaacgaggtgaccggcaccaagatcgcctacgagaccaagatggacctggtgcagaccagcgaggtgatgcaggagagcctgtaccccgccgcccagctgtgccccagcttcgaggagagcgaggccacccccagccccgtgctgcccgacatcgtgatggaggcccccctgaacagcgccgtgcccagcgccggcgccagcgtgatccagcccagcagcagccccctggaggccagcagcgtgaactacgagagcatcaagcacgagcccgagaacccccccccctacgaggaggccatgagcgtgagcctgaagaaggtgagcggcatcaaggaggagatcaaggagcccgagaacatcaacgccgccctgcaggagaccgaggccccctacatcagcatcgcctgcgacctgatcaaggagaccaagctgagcgccgagcccgcccccgacttcagcgactacagcgagatggccaaggtggagcagcccgtgcccgaccacagcgagctggtggaggacagcagccccgacagcgagcccgtggacctgttcagcgacgacagcatccccgacgtgccccagaagcaggacgagaccgtgatgctggtgaaggagagcctgaccgagaccagcttcgagagcatgatcgagtacgagaacaaggagaagctgagcgccctgccccccgagggcggcaagccctacctggagagcttcaagctgagcctggacaacaccaaggacaccctgctgcccgacgaggtgagcaccctgagcaagaaggagaagatccccctgcagatggaggagctgagcaccgccgtgtacagcaacgacgacctgttcatcagcaaggaggcccagatcagagagaccgagaccttcagcgacagcagccccatcgagatcatcgacgagttccccaccctgatcagcagcaagaccgacagcttcagcaagctggccagagagtacaccgacctggaggtgagccacaagagcgagatcgccaacgcccccgacggcgccggcagcctgccctgcaccgagctgccccacgacctgagcctgaagaacatccagcccaaggtggaggagaagatcagcttcagcgacgacttcagcaagaacggcagcgccaccagcaaggtgctgctgctgccccccgacgtgagcgccctggccacccaggccgagatcgagagcatcgtgaagcccaaggtgctggtgaaggaggccgagaagaagctgcccagcgacaccgagaaggaggacagaagccccagcgccatcttcagcgccgagctgagcaagaccagcgtggtggacctgctgtactggagagacatcaagaagaccggcgtggtgttcggcgccagcctgttcctgctgctgagcctgaccgtgttcagcatcgtgagcgtgaccgcctacatcgccctggccctgctgagcgtgaccatcagcttcagaatctacaagggcgtgatccaggccatccagaagagcgacgagggccaccccttcagagcctacctggagagcgaggtggccatcagcgaggagctggtgcagaagtacagcaacagcgccctgggccacgtgaactgcaccatcaaggagctgagaagactgttcctggtggacgacctggtggacagcctgaagttcgccgtgctgatgtgggtgttcacctacgtgggcgccctgttcaacggcctgaccctgctgatcctggccctgatcagcctgttcagcgtgcccgtgatctacgagagacaccaggcccagatcgaccactacctgggcctggccaacaagaacgtgaaggacgccatggccaagatccaggccaagatccccggcctgaagagaaaggccgagtag

SEQ ID NO: 204713 - protein, 580 aa, Artificial Sequence
  derived and/or modified sequence
MTAPAGPRGSETERLLTPNPGYGTQAGPSPAPPTPPEEEDLRRRLKYFFMSPCDKFRAKGRKPCKLMLQVVKILVVTVQLILFGLSNQLAVTFREENTIAFRHLFLLGYSDGADDTFAAYTREQLYQAIFHAVDQYLALPDVSLGRYAYVRGGGDPWTNGSGLALCQRYYHRGHVDPANDTFDIDPMVVTDCIQVDPPERPPPPPSDDLTLLESSSSYKNLTLKFHKLVNVTIHFRLKTINLQSLINNEIPDCYTFSVLITFDNKAHSGRIPISLETQAHIQECKHPSVFQHGDNSFRLLFDVVVILTCSLSFLLCARSLLRGFLLQNEFVGFMWRQRGRVISLWERLEFVNGWYILLVTSDVLTISGTIMKIGIEAKNLASYDVCSILLGTSTLLVWVGVIRYLTFFHNYNILIATLRVALPSVMRFCCCVAVIYLGYCFCGWIVLGPYHVKFRSLSMVSECLFSLINGDDMFVTFAAMQAQQGRSSLVWLFSQLYLYSFISLFIYMVLSLFIALITGAYDTIKHPGGAGAEESELQAYIAQCQDSPTSGKFRRGSGSACSLLCCCGRDPSEEHSLLVN

SEQ ID NO: 204714 - protein, 545 aa, Artificial Sequence
  derived and/or modified sequence
MTPSQPTRGSSCTRPSSMLWTSTWRCLTCHWAGMRMSVVGVTLGPMAQGLLSASGTTTEATWTRPTTHLTLIRWWLLTASRWIPPSGPLRPPATISPSWKAAPVTRTSRSNSTSTACSLEGGPGWGRQHTRHSHPSNYFPKVGTGPPRPRWCLLGEHFPCQLQSQHVAGDAGTWGRKGPEDAPDPHPSLLPRLVNVTIHFRLKTINLQSLINNEIPDCYTFSVLITFDNKAHSGRIPISLETQAHIQECKHPSVFQHGDNSFRLLFDVVVILTCSLSFLLCARSLLRGFLLQNEFVGFMWRQRGRVISLWERLEFVNGWYILLVTSDVLTISGTIMKIGIEAKNLASYDVCSILLGTSTLLVWVGVIRYLTFFHNYNILIATLRVALPSVMRFCCCVAVIYLGYCFCGWIVLGPYHVKFRSLSMVSECLFSLINGDDMFVTFAAMQAQQGRSSLVWLFSQLYLYSFISLFIYMVLSLFIALITGAYDTIKHPGGAGAEESELQAYIAQCQDSPTSGKFRRGSGSACSLLCCCGRDPSEEHSLLVN

SEQ ID NO: 204715 - DNA, 1743 bp, Artificial Sequence
  derived and/or modified sequence
atgaccgctcctgcagggccaaggggaagcgaaacagaaagacttctaaccccaaatcctggctatggcacccaggctggaccttctcccgccccacccacccctcccgaggaggaagatcttcggcgcagattaaaatactttttcatgtctccctgcgacaaattccgcgccaagggccgaaagccttgcaagctgatgctccaggtggtaaagatactggtggttactgttcaactgatcctgttcggcctgagcaaccagttggcggtcactttccgtgaagagaacaccatcgccttcagacatctcttcctgctaggctactcagacggtgcggacgatacctttgcggcctacacccgggagcaattatatcaagcgatcttccacgcagtggatcagtacctcgccctgcctgacgtttcattaggaagatacgcctatgtccggggaggcggggacccctggactaacgggtccggactggccctgtgccaacgctactaccatcggggtcatgtggatcctgccaatgacactttcgatatcgatcctatggttgttactgactgcatccaggtggatccccccgagcggccaccccctccacccagcgacgatttaacactgctggaatcaagctctagctacaagaacttgacccttaagttccacaagttggtgaatgtgacaattcacttcagactgaaaacaattaatcttcagtcactgatcaacaacgagatcccagattgttacacgttctcagttttgatcaccttcgacaacaaagcacacagcggcagaatccctatctcacttgagacccaggcccatattcaggaatgtaaacacccctccgtttttcagcacggggacaactcttttagactgcttttcgatgtggtggttattctgacctgttctctgtcctttctactgtgtgctcgaagcctcctccgagggttcctcctccagaatgaattcgttggcttcatgtggagacagagaggtagggtgatttcactttgggagagactggagttcgttaatgggtggtatatcctcctggtgacgtctgatgtcctgacaattagcggaactattatgaaaataggaattgaggcaaagaacctcgccagttatgatgtatgctcgatacttctcggaacatccacacttctggtgtgggtcggggtgattcggtacctgaccttctttcataactacaatatcctcatcgcgacgcttcgtgtggcattacccagcgtgatgaggttctgttgctgcgtcgccgtgatttatctgggctattgcttctgtggatggatcgtcttgggcccttaccacgttaagttccgctccctctcaatggtgtccgagtgtctgttcagcctgatcaacggtgacgatatgttcgtcacctttgcagcgatgcaggctcagcaaggaagatcctcccttgtgtggctgttttctcagctctatctgtactcctttatatctctcttcatctacatggttctgtctctctttatcgctctgattactggagcctatgacaccatcaaacaccctggtggcgctggggccgaggagtctgagctgcaggcgtacatcgctcagtgccaggattcaccaacctctggcaagtttcggcggggctcaggaagcgcttgcagtctgctgtgttgctgtggaagagacccctccgaggagcactcccttctggtgaattag

SEQ ID NO: 204716 - DNA, 1638 bp, Artificial Sequence
  derived and/or modified sequence
atgactccaagccagccgacccgaggcagctcatgcacaaggccttcttccatgttgtggacgagcacgtggagatgcttaacatgccattgggcaggaatgcggatgtccgtggtcggggtaacacttggcccgatggcccagggactgctatctgcatccggtacaacaaccgaagccacttggactcgcccaactacacacctgacgctcatcaggtggtggttactgaccgcctcaaggtggatccccccatccggtccactgcggccaccagctaccatatctccttcttggaaagccgccccggttacacggacgtcccgttccaacagcacttccaccgcctgttctctggaaggtgggcctggatggggtcgacaacacacccggcacagccacccctcaaattactttcccaaagttggaaccgggcctccaaggcctagatggtgcctcctgggagaacatttcccctgccagcttcagtctcagcacgtggcaggagatgccggtacctggggcagaaagggacccgaggatgccccagacccacatcccagccttcttccacggctcgtgaacgtgacaatccattttagactgaaaactataaacctgcagagtttaataaacaacgagattcccgattgctacaccttttcagttctgattacatttgataacaaagcccacagcggtcgaatcccaataagcttagaaacacaggcacacatacaagagtgcaaacacccatcagtatttcaacacggggataattctttcagactgctgtttgatgttgtggtgattttgacatgtagtttatccttcctgctatgtgcccgctcactgctgcgcgggtttctgctgcagaacgagttcgtcggcttcatgtggagacagcggggaagagtcatctccctgtgggaaaggctcgagttcgtaaatggttggtatatcctgctggttacctcggatgtgttgactatatcaggcaccatcatgaagatcggcattgaagcaaaaaatcttgcatcatacgatgtctgttcaatactcctcgggaccagtacgcttttggtgtgggtaggcgtaatcaggtacttgactttcttccataactataacattctaatcgctaccctgcgagtggctctgcctagtgtgatgcgcttctgttgttgcgtcgccgtgatttatctggggtactgcttttgtggatggattgtgctcggaccctatcatgtgaaattcaggagtctatctatggtgtcagaatgtctgttcagcttgataaacggtgacgacatgtttgtgacgttcgcagccatgcaagctcagcaggggagatcctcactggtgtggcttttttcacaactgtatctatacagcttcatctcactcttcatctatatggtcctgtctctgtttatcgccctcatcaccggcgcatacgataccatcaaacatccggggggcgctggagctgaggaatctgaactccaagcttatattgcccagtgtcaggattcaccaactagcggcaagtttaggagaggcagcgggtcagcgtgttctctgctgtgttgctgcgggcgggatccatcggaggagcattccctgctggttaactag

SEQ ID NO: 204717 - DNA, 1743 bp, Artificial Sequence
  derived and/or modified sequence
atgacagccccagctggcccccggggcagcgagacagagcggctgctgacccccaaccctggctacggcacccaggccggccccagccctgccccacccaccccacctgaggaggaggacctgcggcggcggctgaagtacttcttcatgagcccctgtgacaagttccgggccaagggcaggaagccctgcaagctgatgctgcaggtggtgaagatcctggtggtgacagtgcagctgatcctgtttggcctgagcaaccagctggccgtgaccttccgggaggagaacaccatcgccttccgccacctgttcctgctgggctacagtgatggagcagatgacacctttgctgcctacacccgggagcagctgtaccaggccatcttccacgctgtggaccagtacctggccctgcctgatgtgtccctgggccgctatgcctacgtgcggggcggcggggacccctggaccaatggaagtggcctggccctgtgccagcgctactaccaccggggccacgtggaccctgccaatgacacctttgacatcgaccccatggtggtgacagactgcatccaggtggaccccccagagaggcctcctcctccacccagtgatgacctgaccctgctggagagcagcagcagctacaagaacctgaccctgaagttccacaagctggtgaatgtgaccatccacttccggctgaagaccatcaacctgcagagcctcatcaacaatgagatcccagactgctacaccttctctgtgctgatcacctttgacaacaaggcccacagcggccgcatccccatcagcctggagacccaggcccacatccaggagtgcaagcaccccagcgtcttccagcacggggacaacagcttccggctgctgtttgatgtggtggtgatcctgacctgcagcctgtccttcctgctgtgtgcccggagcctgctgcggggcttcctgctgcagaatgaatttgtgggcttcatgtggaggcagaggggccgggtcatcagcctgtgggagcggctggagtttgtgaatggctggtacatcctgctggtgaccagtgatgtgctgaccatcagcggcaccatcatgaagattggaattgaggccaagaacctggccagctatgatgtgtgcagcatcctgctgggcaccagcaccctgctggtgtgggtgggcgtcatccgctacctgaccttcttccacaactacaacatcctgattgccaccctgcgggtggccctgcccagcgtgatgaggttctgctgctgcgtggccgtcatctacctgggctactgcttctgtggctggatcgtgctgggcccctaccacgtgaagttccgcagcctgtccatggtgtctgagtgcctcttcagcctcatcaatggagatgacatgtttgtgacctttgctgccatgcaggcccagcagggccgcagcagcctggtgtggctgttcagccagctgtacctgtacagcttcatcagcctcttcatctacatggtgctgagcctcttcatcgccctgatcaccggggcctatgacaccatcaagcaccctggaggagctggagctgaggagagcgagctgcaggcctacatcgcccagtgccaggacagccccaccagcggcaagttccggcggggcagcggcagcgcctgcagcctgctgtgctgctgcggccgggaccccagcgaggagcacagcctgctggtgaactag

SEQ ID NO: 204718 - DNA, 1638 bp, Artificial Sequence
  derived and/or modified sequence
atgacccccagccagcccacccggggcagcagctgcacccggcccagctccatgctgtggaccagcacctggcgctgcctgacctgccactgggccggcatgaggatgtctgtggtgggcgtgaccctgggccccatggcccagggcctgctgagcgccagcggcaccaccacagaggccacctggacccggcccaccacccacctgaccctcatccgctggtggctgctgacagccagccgctggatcccccccagcggccccctgcggcccccagccaccatcagccccagctggaaggccgcccctgtgaccaggaccagccgcagcaacagcaccagcacagcctgcagcctggagggcggccctggctggggccggcagcacaccaggcacagccaccccagcaactacttccccaaggtgggcaccggccccccccggccccgctggtgcctgctgggggagcacttcccctgccagctgcagagccagcacgtggccggagatgctggcacctggggcaggaaaggaccagaagatgccccagacccccaccccagcctgctgccccggctggtgaatgtgaccatccacttccggctgaagaccatcaacctgcagagcctcatcaacaatgagatcccagactgctacaccttctctgtgctgatcacctttgacaacaaggcccacagcggccgcatccccatcagcctggagacccaggcccacatccaggagtgcaagcaccccagcgtcttccagcacggggacaacagcttccggctgctgtttgatgtggtggtgatcctgacctgcagcctgtccttcctgctgtgtgcccggagcctgctgcggggcttcctgctgcagaatgaatttgtgggcttcatgtggaggcagaggggccgggtcatcagcctgtgggagcggctggagtttgtgaatggctggtacatcctgctggtgaccagtgatgtgctgaccatcagcggcaccatcatgaagattggcatcgaggccaagaacctggccagctatgatgtgtgcagcatcctgctgggcaccagcaccctgctggtgtgggtgggcgtcatccgctacctgaccttcttccacaactacaacatcctgattgccaccctgcgggtggccctgcccagcgtgatgaggttctgctgctgcgtggccgtcatctacctgggctactgcttctgtggctggatcgtgctgggcccctaccacgtgaagttccgcagcctgtccatggtgtctgaatgtctcttcagcctcatcaatggagatgacatgtttgtgacctttgctgccatgcaggcccagcagggccgcagcagcctggtgtggctgttcagccagctgtacctgtacagcttcatcagcctcttcatctacatggtgctgagcctcttcatcgccctgatcactggagcctatgacaccatcaagcaccctgggggcgctggagctgaggagagcgagctgcaggcctacatcgcccagtgccaggacagccccaccagcggcaagttcagaagaggcagcggcagcgcctgcagcctgctgtgctgctgcggccgggaccccagcgaggagcacagcctgctggtgaactag

SEQ ID NO: 204719 - DNA, 2097 bp, Artificial Sequence
  derived and/or modified sequence
cacgtgaccgaggcacagatcagctgatgccggagggtttgaagccgcgccgcgagggagcgaggtcgcagtgacagcggcgggcgatcggacccaggctgccccgccgtacccgcctgcgtcccgcgctcccgccccagcatgacagccccggcgggtccgcgcggctcagagaccgagcggcttctgacccccaaccccgggtatgggacccaggcggggccttcaccggcccctccgacacccccagaagaggaagaccttcgccgtcgtctcaaatactttttcatgagtccctgcgacaagtttcgagccaagggccgcaagccctgcaagctgatgctgcaagtggtcaagatcctggtggtcacggtgcagctcatcctgtttgggctcagtaatcagctggctgtgacattccgggaagagaacaccatcgccttccgacacctcttcctgctgggctactcggacggagcggatgacaccttcgcagcctacacgcgggagcagctgtaccaggccatcttccatgctgtggaccagtacctggcgttgcctgacgtgtcactgggccggtatgcgtatgtccgtggtgggggtgacccttggaccaatggctcagggcttgctctctgccagcggtactaccaccgaggccacgtggacccggccaacgacacatttgacattgatccgatggtggttactgactgcatccaggtggatccccccgagcggccccctccgccccccagcgacgatctcaccctcttggaaagcagctccagttacaagaacctcacgctcaaattccacaagctggtcaatgtcaccatccacttccggctgaagaccattaacctccagagcctcatcaataatgagatcccggactgctataccttcagcgtcctgatcacgtttgacaacaaagcacacagtgggcggatccccatcagcctggagacccaggcccacatccaggagtgtaagcaccccagtgtcttccagcacggagacaacagcttccggctcctgtttgacgtggtggtcatcctcacctgctccctgtccttcctcctctgcgcccgctcactccttcgaggcttcctgctgcagaacgagtttgtggggttcatgtggcggcagcggggacgggtcatcagcctgtgggagcggctggaatttgtcaatggctggtacatcctgctcgtcaccagcgatgtgctcaccatctcgggcaccatcatgaagatcggcatcgaggccaagaacttggcgagctacgacgtctgcagcatcctcctgggcacctcgacgctgctggtgtgggtgggcgtgatccgctacctgaccttcttccacaactacaatatcctcatcgccacactgcgggtggccctgcccagcgtcatgcgcttctgctgctgcgtggctgtcatctacctgggctactgcttctgtggctggatcgtgctggggccctatcatgtgaagttccgctcactctccatggtgtctgagtgcctgttctcgctcatcaatggggacgacatgtttgtgacgttcgccgccatgcaggcgcagcagggccgcagcagcctggtgtggctcttctcccagctctacctttactccttcatcagcctcttcatctacatggtgctcagcctcttcatcgcgctcatcaccggcgcctacgacaccatcaagcatcccggcggcgcaggcgcagaggagagcgagctgcaggcctacatcgcacagtgccaggacagccccacctccggcaagttccgccgcgggagcggctcggcctgcagccttctctgctgctgcggaagggacccctcggaggagcattcgctgctggtgaattgattcgacctgactgccgttggaccgtaggccctggactgcagagacccccgcccccgaccccgcttatttatttgtagggtttgcttttaaggatcggctccctgtcgcgcccgaggagggcctggacctttcgtgtcggacccttgggggcggggagactgggtggggagggtgttgaataaaagggaaaataaatgtgtcgttttcattttt

SEQ ID NO: 204720 - DNA, 2332 bp, Artificial Sequence
  derived and/or modified sequence
cacgtgaccgaggcacagatcagctgatgccggagggtttgaagccgcgccgcgagggagcgaggtcgcagtgacagcggcgggcgatcggacccaggctgccccgccgtacccgcctgcgtcccgcgctcccgccccagcatgacagccccggcgggtccgcgcggctcagagaccgagcggcttctgacccccaaccccgggtatgggacccaggcggggccttcaccggcccctccgacacccccagaagaggaagaccttcgccgtcgtctcaaatactttttcatgagtccctgcgacaagtttcgagccaagggccgcaagccctgcaagctgatgctgcaagtggtcaagatcctggtggtcacggtgcagctcatcctgtttgggctcagtaatcagctggctgtgacattccgggaagagaacaccatcgccttccgacacctcttcctgctgggctactcggacggagcggatgacaccttcgcagcctacacgcgggagcagctgtaccaggccatcttccatgctgtggaccagtacctggcgttgcctgacgtgtcactgggccggtatgcgtatgtccgtggtgggggtgacccttggaccaatggctcagggcttgctctctgccagcggtactaccaccgaggccacgtggacccggccaacgacacatttgacattgatccgatggtggttactgactgcatccaggtggatccccccgagcggccccctccgccccccagcgacgatctcaccctcttggaaagcagctccagttacaagaacctcacgctcaaattccacaagtactgcctgctcactcgaggggggcccagggtgggggaggcagcacactaggcactctcaccccagcaactacttccctaaggtggggacagggcccccccgcccgcgctggtgcctgctgggtgagcacttcccctgccagctgcagagtcagcacgtggcaggggacgctggcacttggggccggaagggacccgaagacgcccctgaccctcacccgagcctcctgcctaggctggtcaatgtcaccatccacttccggctgaagaccattaacctccagagcctcatcaataatgagatcccggactgctataccttcagcgtcctgatcacgtttgacaacaaagcacacagtgggcggatccccatcagcctggagacccaggcccacatccaggagtgtaagcaccccagtgtcttccagcacggagacaacagcttccggctcctgtttgacgtggtggtcatcctcacctgctccctgtccttcctcctctgcgcccgctcactccttcgaggcttcctgctgcagaacgagtttgtggggttcatgtggcggcagcggggacgggtcatcagcctgtgggagcggctggaatttgtcaatggctggtacatcctgctcgtcaccagcgatgtgctcaccatctcgggcaccatcatgaagatcggcatcgaggccaagaacttggcgagctacgacgtctgcagcatcctcctgggcacctcgacgctgctggtgtgggtgggcgtgatccgctacctgaccttcttccacaactacaatatcctcatcgccacactgcgggtggccctgcccagcgtcatgcgcttctgctgctgcgtggctgtcatctacctgggctactgcttctgtggctggatcgtgctggggccctatcatgtgaagttccgctcactctccatggtgtctgagtgcctgttctcgctcatcaatggggacgacatgtttgtgacgttcgccgccatgcaggcgcagcagggccgcagcagcctggtgtggctcttctcccagctctacctttactccttcatcagcctcttcatctacatggtgctcagcctcttcatcgcgctcatcaccggcgcctacgacaccatcaagcatcccggcggcgcaggcgcagaggagagcgagctgcaggcctacatcgcacagtgccaggacagccccacctccggcaagttccgccgcgggagcggctcggcctgcagccttctctgctgctgcggaagggacccctcggaggagcattcgctgctggtgaattgattcgacctgactgccgttggaccgtaggccctggactgcagagacccccgcccccgaccccgcttatttatttgtagggtttgcttttaaggatcggctccctgtcgcgcccgaggagggcctggacctttcgtgtcggacccttgggggcggggagactgggtggggagggtgttgaataaaagggaaaataaatgtgtcgttttcattttt

SEQ ID NO: 204721 - DNA, 1743 bp, Artificial Sequence
  derived and/or modified sequence
atgaccgcccccgccggcccccggggcagcgagaccgagcggctgctgactccaaacccgggttatggcacacaggccggcccatctcccgccccacccacaccccctgaggaggaggacctccgccggaggttgaaatacttctttatgtcaccctgcgacaagtttagagccaagggacgcaaaccatgtaaactgatgctgcaagtagtgaaaatattagtcgtgacagtgcaactgatcctgtttggcctctccaaccagctggctgttacgtttagagaggagaataccatcgcctttaggcatttgttcctactcggctactcagatggtgctgatgacaccttcgccgcgtacaccagagaacagttataccaggcgatcttccacgctgtcgatcagtacctggccctcccggatgtttctctagggaggtacgcctacgtgaggggcggcggagacccttggacaaacggctcgggactggcgctgtgccagagatactatcatcgtggtcacgtcgaccccgcaaatgacacgttcgatatcgaccccatggtggtgactgactgcattcaggtagacccccccgagcgccctccccctcctccaagtgatgatctgaccttgctggaatcaagtagcagctacaagaacttaacccttaagtttcataaactcgtaaacgttacaatccattttcgtctaaagacaatcaatttgcagagtctgattaataatgagatccctgattgctacaccttttccgtccttattacattcgataacaaggcacattccggccgcataccgataagtcttgaaacacaagctcacatacaagaatgcaagcatccctcagtcttccagcacggggacaattctttccgacttctgtttgatgtggtagttattctgacgtgttccctgagtttcctattgtgtgctagaagccttctgcgggggttcctcctgcaaaacgaattcgtgggcttcatgtggagacaaaggggaagagtgatcagcctttgggagcggctcgagttcgtaaacggctggtacatcctcctggtgaccagcgacgtcctgacgattagcggcactataatgaagataggcatcgaagccaagaatttggctagctacgatgtttgtagtatcttgctgggcacctcgacccttctggtgtgggtgggggtgatacggtatctcacattcttccataactacaatattctcattgccaccctcagggtggctcttccatccgtcatgaggttctgctgctgcgtggcagtgatctacctcggctattgtttttgcgggtggatagtgctggggccgtaccatgtgaaattccgaagtctgagcatggtttcagaatgcctcttttcccttatcaatggggatgacatgttcgttacattcgccgcaatgcaggcgcagcagggtcggagttctctggtgtggttgttctcacaattatacctatacagctttatctcactcttcatttatatggtgctgtccctattcatcgccctgattacgggggcttacgacaccataaaacaccctggtggagcgggagcggaggaatctgagctacaagcatatatcgcccagtgccaggatagcccaactagtgggaaattccggcggggctctggcagcgcgtgcagcctcttatgctgctgcggaagagacccgagtgaggaacattctttgctcgtgaactag

SEQ ID NO: 204722 - DNA, 1638 bp, Artificial Sequence
  derived and/or modified sequence
atgacccccagccagcccacccggggcagcagctgcacccggccctcatccatgctgtggacgagcacgtggcgttgcctgacctgccattgggcaggtatgcgcatgagcgtggtgggcgtaaccctcggcccgatggcccagggcctgctatctgcgtccgggacaactacggaggcaacatggactcgaccaaccacccatctcacattgattcggtggtggctactaacagcctctcgctggatcccacctagcggacccctccgcccacccgcgaccatctccccgagttggaaagcggctccagtgaccagaacatctagaagcaatagtacttcaaccgcctgctctctagaaggtggcccaggatggggaaggcagcatacacgacatagccatccgtctaattacttcccaaaggtgggaaccgggccaccccgccctcgttggtgcctcctgggagagcattttccgtgccagctccagtctcagcacgtggccggggacgccggtacatggggcaggaagggaccagaggatgcacctgaccctcacccctccttgctccccaggctagttaacgtcacaattcactttcgcttgaaaacaatcaatcttcagagtttgatcaataatgagataccagattgctacacatttagcgtgctgattaccttcgacaacaaagcccatagcgggcggatccccatcagcctggaaactcaggcccatattcaagagtgcaaacatccatcggtttttcaacatggggacaatagcttcagactccttttcgatgtggtagtaatcctgacctgtagcttatccttcctgctgtgcgcccgcagtctgctccgggggttcttgcttcaaaatgaattcgtcgggttcatgtggcgacagcgggggcgagtgattagcctgtgggaaaggctggagttcgtgaatggctggtacatacttctggtcacctctgatgtgctaactatttctggaaccatcatgaaaatcggaatcgaggctaagaatctggcatcatatgacgtgtgttctattctgttgggaacttcaacgctgctcgtctgggtgggggtgattcgttaccttacattcttccataattataatatcctgattgcaacgctgagggtcgctctgccctcggttatgagattctgctgttgcgtggcagtgatctatcttggatattgtttctgcgggtggatcgtcctcggcccttatcacgttaaattccgatccctatctatggtctctgagtgccttttctcccttatcaatggagacgatatgttcgtcaccttcgccgcgatgcaagcccagcagggtcggagctcactggtgtggttattcagccaactgtacttatactccttcatctccctctttatctatatggtgctgagcctattcattgccctcattactggcgcttatgatactattaaacaccctggcggcgcgggggccgaagagagtgagctgcaggcgtatattgcacaatgccaggacagcccaactagcgggaaatttaggcgcggcagcggctccgcttgttcactgttgtgctgttgtggtagagacccatccgaggagcacagcctgctcgtgaactag

SEQ ID NO: 204723 - DNA, 1743 bp, Artificial Sequence
  derived and/or modified sequence
atgacagcacccgcaggtccccgtggctctgaaacagaaagactcctgacccccaaccccggttatggaacccaagccggaccatcccctgccccacccacccctcccgaggaggaagatttaaggcggagactgaagtatttctttatgtcaccttgcgataagtttagagccaagggtcggaaaccctgtaagctcatgcttcaggtcgttaaaattcttgtggttacagtgcagcttatcctttttggtctcagcaaccagcttgcagttaccttccgggaggagaatacaatcgcattccgccacttatttcttctgggctatagtgacggcgctgatgatacctttgccgcatacactcgcgagcagctgtatcaagccatattccatgcagtggaccagtacttagcacttccagacgtgtccctggggcgttacgcctacgtcaggggcggtggagatccatggactaacggctcagggctcgctctttgccagcggtactatcatcgcggacatgtcgaccccgctaatgatacattcgacatcgatcctatggtggttacggattgcattcaggttgatccacctgagcggccacctcctccaccctccgacgacctgacactgttggagagttcgtccagttacaaaaatctgactcttaagttccacaagctggttaatgtgaccatacactttagacttaaaactatcaatcttcagtccctgattaataacgaaatccccgattgttacacattctctgtactgatcaccttcgataacaaagcacacagcggtagaatacccataagtctggaaacgcaagctcacatacaggagtgtaagcacccttctgtgtttcagcatggcgacaatagcttcaggctcctctttgatgtggtcgttattctgacctgctcactgtcattccttctatgtgccagatcacttctgaggggatttctgctgcaaaacgaattcgttgggttcatgtggcgtcagcgcggaagggtgatttctttatgggaacgattagagttcgtcaatgggtggtatatcctcctggtcacttctgacgtcctgaccatctccgggactataatgaaaattggaattgaggccaagaacctggcctcctatgatgtatgttcgattttgctgggaacttcgacactgctggtgtgggtaggggttataaggtacctaacttttttccacaattataatatcctgattgcaactttacgggtggcactcccttccgtgatgagattctgctgttgcgttgccgtgatctaccttggttattgtttctgtggatggatcgttctgggcccttatcacgttaagtttcggagcctctctatggtgtcagaatgcctgtttagtcttatcaacggcgatgatatgtttgtcacattcgcagccatgcaagcccagcagggacggagctcacttgtatggctcttctcccagctttacctgtacagtttcatctctctctttatttatatggttttgagcctgtttatcgcattaataaccggtgcgtacgacacgataaaacatcccggtggagccggagccgaagagagtgaattgcaggcctacatcgcccagtgtcaggattcaccaaccagtggcaaatttcgaagagggtcaggctcagcctgcagtctactgtgttgttgtgggcgtgatccaagcgaagagcactctctgttggtgaattag

SEQ ID NO: 204724 - DNA, 1638 bp, Artificial Sequence
  derived and/or modified sequence
atgactccaagccagcccactagaggatctagctgcaccagaccaagctctatgctttggacaagcacttggcgatgccttacatgccactgggccggaatgcgtatgtccgttgtaggcgtcacacttggtcccatggctcagggtctcctctcagcctccggtactacaaccgaggccacatggacacggcctaccacccatttgacactgattaggtggtggctgctcaccgcatctagatggatccctccaagtggcccactgcgtccgcctgccacgatttctccttcctggaaagcagccccagtgactagaactagcaggtctaattcaacctcaacagcatgctccctggagggaggtcctggctggggaagacagcatacccgacactcccatccttcaaattactttcctaaggtagggactgggcctccccgaccacgctggtgtctgctcggcgaacactttccttgtcagcttcagagccagcacgtcgccggtgacgcaggcacctggggacgaaaaggccctgaggatgctccagatccccacccgagtctcctccctcggctcgtcaacgtcaccatccacttccgacttaagacgataaacctgcagtccttgatcaacaacgaaatccctgactgttatacattttcagtgcttataacttttgacaacaaggcacactcagggaggattccgatttccttggaaacacaagcccatatacaggagtgtaagcatccctcagtcttccagcatggagataacagtttcaggcttctgttcgacgttgtcgtgatactgacatgtagcttaagtttcttgctatgcgctcgcagtctgctgcggggattcttgctgcagaatgagtttgtcggcttcatgtggcgccagcggggacgcgtgatctctctgtgggaacggctggaatttgtgaatggttggtatatcctcctcgtgacctccgatgttctcacaatcagcgggactataatgaagatcggcatcgaggccaagaatctggcatcctatgacgtgtgttccattctccttggtactagcactctcctcgtgtgggtcggcgtcattcgttatttgactttctttcacaattacaatatattgatcgccaccttgcgcgtggccctcccatccgtgatgaggttttgttgctgcgtggcggtgatttacctcggatactgcttctgcggttggatcgtactgggaccttaccacgtaaagtttcggtcgctaagcatggtgtccgaatgtctgttttctcttataaacggtgatgatatgtttgtgacttttgccgcaatgcaagcacaacaggggcgaagcagcctcgtgtggctgttttcgcagctgtatttgtatagttttatctctctgtttatctatatggtgctctctttgttcatcgcactgatcacgggcgcttacgatactataaaacatccgggtggcgcaggcgcagaggaaagtgagctccaggcctacattgcccagtgccaggactctcccacgtccggtaagttcaggcggggatcggggtctgcatgcagcttgctttgctgctgtggtcgggacccttccgaggaacatagccttctggtgaactag

SEQ ID NO: 204725 - DNA, 1743 bp, Artificial Sequence
  derived and/or modified sequence
atgaccgcccccgccggccccagaggcagcgagaccgagagactgctgacccccaaccccggctacggcacccaggccggccccagccccgccccccccaccccccccgaggaggaggacctgagaagaagactgaagtacttcttcatgagcccctgcgacaagttcagagccaagggcagaaagccctgcaagctgatgctgcaggtggtgaagatcctggtggtgaccgtgcagctgatcctgttcggcctgagcaaccagctggccgtgaccttcagagaggagaacaccatcgccttcagacacctgttcctgctgggctacagcgacggcgccgacgacaccttcgccgcctacaccagagagcagctgtaccaggccatcttccacgccgtggaccagtacctggccctgcccgacgtgagcctgggcagatacgcctacgtgagaggcggcggcgacccctggaccaacggcagcggcctggccctgtgccagagatactaccacagaggccacgtggaccccgccaacgacaccttcgacatcgaccccatggtggtgaccgactgcatccaggtggacccccccgagagacccccccccccccccagcgacgacctgaccctgctggagagcagcagcagctacaagaacctgaccctgaagttccacaagctggtgaacgtgaccatccacttcagactgaagaccatcaacctgcagagcctgatcaacaacgagatccccgactgctacaccttcagcgtgctgatcaccttcgacaacaaggcccacagcggcagaatccccatcagcctggagacccaggcccacatccaggagtgcaagcaccccagcgtgttccagcacggcgacaacagcttcagactgctgttcgacgtggtggtgatcctgacctgcagcctgagcttcctgctgtgcgccagaagcctgctgagaggcttcctgctgcagaacgagttcgtgggcttcatgtggagacagagaggcagagtgatcagcctgtgggagagactggagttcgtgaacggctggtacatcctgctggtgaccagcgacgtgctgaccatcagcggcaccatcatgaagatcggcatcgaggccaagaacctggccagctacgacgtgtgcagcatcctgctgggcaccagcaccctgctggtgtgggtgggcgtgatcagatacctgaccttcttccacaactacaacatcctgatcgccaccctgagagtggccctgcccagcgtgatgagattctgctgctgcgtggccgtgatctacctgggctactgcttctgcggctggatcgtgctgggcccctaccacgtgaagttcagaagcctgagcatggtgagcgagtgcctgttcagcctgatcaacggcgacgacatgttcgtgaccttcgccgccatgcaggcccagcagggcagaagcagcctggtgtggctgttcagccagctgtacctgtacagcttcatcagcctgttcatctacatggtgctgagcctgttcatcgccctgatcaccggcgcctacgacaccatcaagcaccccggcggcgccggcgccgaggagagcgagctgcaggcctacatcgcccagtgccaggacagccccaccagcggcaagttcagaagaggcagcggcagcgcctgcagcctgctgtgctgctgcggcagagaccccagcgaggagcacagcctgctggtgaactag

SEQ ID NO: 204726 - DNA, 1638 bp, Artificial Sequence
  derived and/or modified sequence
atgacccccagccagcccaccagaggcagcagctgcaccagacccagcagcatgctgtggaccagcacctggagatgcctgacctgccactgggccggcatgagaatgagcgtggtgggcgtgaccctgggccccatggcccagggcctgctgagcgccagcggcaccaccaccgaggccacctggaccagacccaccacccacctgaccctgatcagatggtggctgctgaccgccagcagatggatcccccccagcggccccctgagaccccccgccaccatcagccccagctggaaggccgcccccgtgaccagaaccagcagaagcaacagcaccagcaccgcctgcagcctggagggcggccccggctggggcagacagcacaccagacacagccaccccagcaactacttccccaaggtgggcaccggcccccccagacccagatggtgcctgctgggcgagcacttcccctgccagctgcagagccagcacgtggccggcgacgccggcacctggggcagaaagggccccgaggacgcccccgacccccaccccagcctgctgcccagactggtgaacgtgaccatccacttcagactgaagaccatcaacctgcagagcctgatcaacaacgagatccccgactgctacaccttcagcgtgctgatcaccttcgacaacaaggcccacagcggcagaatccccatcagcctggagacccaggcccacatccaggagtgcaagcaccccagcgtgttccagcacggcgacaacagcttcagactgctgttcgacgtggtggtgatcctgacctgcagcctgagcttcctgctgtgcgccagaagcctgctgagaggcttcctgctgcagaacgagttcgtgggcttcatgtggagacagagaggcagagtgatcagcctgtgggagagactggagttcgtgaacggctggtacatcctgctggtgaccagcgacgtgctgaccatcagcggcaccatcatgaagatcggcatcgaggccaagaacctggccagctacgacgtgtgcagcatcctgctgggcaccagcaccctgctggtgtgggtgggcgtgatcagatacctgaccttcttccacaactacaacatcctgatcgccaccctgagagtggccctgcccagcgtgatgagattctgctgctgcgtggccgtgatctacctgggctactgcttctgcggctggatcgtgctgggcccctaccacgtgaagttcagaagcctgagcatggtgagcgagtgcctgttcagcctgatcaacggcgacgacatgttcgtgaccttcgccgccatgcaggcccagcagggcagaagcagcctggtgtggctgttcagccagctgtacctgtacagcttcatcagcctgttcatctacatggtgctgagcctgttcatcgccctgatcaccggcgcctacgacaccatcaagcaccccggcggcgccggcgccgaggagagcgagctgcaggcctacatcgcccagtgccaggacagccccaccagcggcaagttcagaagaggcagcggcagcgcctgcagcctgctgtgctgctgcggcagagaccccagcgaggagcacagcctgctggtgaactag

SEQ ID NO: 204727 - protein, 375 aa, Artificial Sequence
  derived and/or modified sequence
MSLMVVSMACVGFFLLQGAWPHEGGQDKPLLSAWPSAVVPRGGHVTLLCRSRLGFTIFSLYKEDGVPVPELYNKIFWKSILMGPVTPAHAGTYRCRGSHPRSPIEWSAPSNPLVIVVTGLFGKPSLSAQPGPTVRTGENVTLSCSSRSSFDMYHLSREGRAHEPRLPAVPSVNGTFQADFPLGPATHGGTYTCFGSLHDSPYEWSDPSDPLLVSVTGNSSSSSSSPTEPSSKTGIRRHLHILIGTSVAIILFIILFFFLLHCCCSNKKNAAVMDQEPAGDRTVNREDSDDQDPQEVTYAQLDHCVFTQTKITSPSQRPKTPPTDTTMYMELPNAKPRSLSPAHKHHSQALRGSSRETTALSQNRVASSHVPAAGI

SEQ ID NO: 204728 - protein, 375 aa, Artificial Sequence
  derived and/or modified sequence
MSLMVISMACVGFFLLQGAWTHEGGQDKPLLSAWPSAVVPRGGHVTLLCRSRLGFTIFSLYKEDGVPVPELYNKIFWKSILMGPVTPAHAGTYRCRGSHPRSPIEWSAPSNPLVIVVTGLFGKPSLSAQPGPTVRTGENVTLSCSSRSSFDMYHLSREGRAHEPRLPAVPSVNGTFQADFPLGPATHGGTYTCFGSLHDSPYEWSDPSDPLLVSVTGNSSSSSSSPTEPSSKTGIRRHLHILIGTSVAIILFIILFFFLLHCCCSNKKNAAVMDQEPAGDRTVNREDSDDQDPQEVTYAQLDHCVFTQTKITSPSQRPKTPPTDTTMYMELPNAKPRSLSPAHKHHSQALRGSSRETTALSQNRVASSHVPAAGI

SEQ ID NO: 204729 - DNA, 1128 bp, Artificial Sequence
  derived and/or modified sequence
atgtccctcatggtggtatccatggcttgcgtgggttttttcttgctccaaggcgcttggccgcatgaagggggccaggacaaacccctcttaagcgcgtggccaagcgctgttgtgcccagggggggacatgtaacccttctatgcaggtctcgactgggcttcactattttcagcctctacaaagaagatggtgtgccagtgccggagctctataataaaatcttctggaaaagcattttgatgggcccggttacacctgcgcatgcgggaacataccgctgtcgcgggtcccacccgcgcagtcctatcgagtggagtgcccctagtaaccccctcgtgattgtggttaccgggttgtttggcaaaccaagcttgtcagcgcaaccgggccccacagttcgaactggagaaaatgtcacgctgtcatgcagcagcagaagctccttcgatatgtatcatctgagtcgtgagggccgtgcgcacgaaccaagactgcctgcagttccatcagtcaacgggaccttccaggccgattttcctctggggcctgcaacgcacggtggaacctacacctgcttcggatcccttcacgatagtccctatgaatggtccgacccgagcgacccccttctcgttagcgtcacaggtaactcctcctccagttcttcatctcctactgaacccagctccaaaaccggcatacggagacaccttcacattctgatcggtaccagcgttgccatcatcttgttcatcatcttgttttttttcctcctccattgttgctgcagcaacaagaaaaatgcagctgtgatggatcaagagcctgcaggagatcggaccgtcaacagggaagattctgatgaccaggacccccaggaagtgacctacgcccagttggaccactgcgttttcactcaaaccaaaattaccagcccaagccagcgccccaaaactccacctactgacacaaccatgtatatggagctacctaatgctaagccaagatcattaagccccgcccacaagcatcatagccaggccctgaggggaagctcgcgagagaccaccgcactgtctcagaatcgcgtcgccagttcccacgtgccagccgcaggaatttag

SEQ ID NO: 204730 - DNA, 1128 bp, Artificial Sequence
  derived and/or modified sequence
atgtctctgatggtgatcagtatggcctgcgtcggtttctttctgctgcagggcgcatggactcacgagggcgggcaagataagcctttactgtcggcttggccctctgctgtcgttccccgtggcggacacgtgaccttattgtgccgcagtagactgggcttcactatttttagcctctataaggaggacggcgtccccgtgcccgagctgtataataagatattctggaagagtatcctgatgggccctgtgacacccgctcacgcaggcacataccgatgtcgcggatctcacccacgctctcccattgagtggagtgcgccttccaacccactggtcatagttgtaacgggcctttttggaaaaccctctctctcagctcaaccaggacctacagtcagaacaggcgaaaatgtgaccctcagttgctcgagtcgttctagcttcgatatgtaccacctgtcgagagaaggccgggcacacgagcctcgtctcccagccgtacccagcgtgaatggcacttttcaagccgattttcctctcggccccgctacacatgggggaacgtacacatgctttggctccctccatgatagcccgtatgagtggtccgatccttcggacccccttctggtctcggtgaccggaaattcctcatcgagtagcagttcgccgacagagccaagtagtaaaaccggaatcagacggcacctacacattttgataggtactagtgtagcaatcatcctgtttataatcctgtttttctttcttttgcactgttgttgctcaaataaaaaaaatgccgctgtaatggaccaagagcctgctggcgaccgcacggtgaacagggaagattcagacgatcaggaccctcaggaagtgacatacgcccagcttgaccattgtgtgttcacccaaaccaaaattacttctccgtctcagaggccaaaaacccctcctacagataccactatgtatatggaactcccgaatgccaagccccgtagtctctcaccagcacacaaacatcattctcaagccctgcgcggctcgtctcgtgagactacagcgctcagtcagaatagggtcgccagttctcatgtgccagccgccggtatctag

SEQ ID NO: 204731 - DNA, 1442 bp, Artificial Sequence
  derived and/or modified sequence
ccgcctgtctgcaccggcagcaccatgtcgctcatggtcgtcagcatggcgtgtgttgggttcttcttgctgcagggggcctggccacatgagggtggtcaggacaagcccttgctgtctgcctggcccagcgctgtggtgcctcgaggaggacatgtgactcttctgtgtcgctctcgtcttgggtttaccatcttcagtctgtacaaagaagatggggtgcctgtccctgagctctacaacaaaatattctggaagagcatcctcatgggccctgtgacccctgcacacgcagggacctacagatgtcggggttcacacccacgctcccccattgagtggtcagcacccagcaaccccctggtgatcgtggtcacaggtctatttgggaaaccttcactctcagcccagccgggccccacggttcgcacaggagagaacgtgaccttgtcctgcagctccaggagctcatttgacatgtaccatctatccagggaggggagggcccatgaacctaggctccctgcagtgcccagcgtcaatggaacattccaggctgactttcctctgggccctgccacccacggagggacctacacatgcttcggctctctccatgactcaccctatgagtggtcagacccgagtgacccactgcttgtttctgtcacaggaaactcttcaagtagttcatcttcacccactgaaccaagctccaaaactggtatccgcagacacctgcacattctgattgggacctcagtggctatcatcctcttcatcatcctcttcttctttctccttcattgctgctgctccaacaaaaagaatgctgctgtaatggaccaagagcctgccggggacagaacagtgaacagggaggactctgatgatcaagaccctcaggaggtgacatatgcacagttggatcactgcgttttcacacagacaaaaatcacttccccttctcagaggcccaagacacctccaacagataccaccatgtacatggaacttccaaatgctaagccaagatcattgtctcctgcccataagcaccacagtcaggccttgaggggatcttctagggagacaacagccctgtctcaaaaccgggttgctagctcccatgtaccagcagctggaatctgaaggcatcagtcttcatcttaggggatcgctcttcctcacaccacaaatctgaacatgcctctctcttgcttacaaatgtctaaggtccccactgcctgctggagagaagacacactcctttgcttagcccacaattctctatttcacttgacccctgcccacctctccaactgaactggcttacttcctagtctacttgaggctgcaatcacactgaggaactcacaattccagacatacaagaggctccctcttaacatggcactgagacacgtgctgttccaccttcc

SEQ ID NO: 204732 - DNA, 1632 bp, Artificial Sequence
  derived and/or modified sequence
atgtcgctcatggtcatcagcatggcgtgtgttgggttcttcttgctgcagggggcctggacacatgagggtggtcaggacaagcccttgctgtctgcctggcccagcgctgtggtgcctcgaggaggacatgtgactcttctgtgtcgctctcgtcttgggtttaccatcttcagtctgtacaaagaagatggggtgcctgtccctgagctctacaacaaaatattctggaagagcatcctcatgggccctgtgacccctgcacacgcagggacctacagatgtcggggttcacacccacgctcccccattgagtggtcagcacccagcaaccccctggtgatcgtggtcacaggtctatttgggaaaccttcactctcagcccagccgggccccacggttcgcacaggagagaacgtgaccttgtcctgcagctccaggagctcatttgacatgtaccatctatccagggaggggagggcccatgaacctaggctccctgcagtgcccagcgtcaatggaacattccaggctgactttcctctgggccctgccacccacggagggacctacacatgcttcggctctctccatgactcaccctatgagtggtcagacccgagtgacccactgcttgtttctgtcacaggaaactcttcaagtagttcatcttcacccactgaaccaagctccaaaactggtatccgcagacacctgcacattctgattgggacctcagtggctatcatcctcttcatcatcctcttcttctttctccttcattgctgctgctccaacaaaaagaatgctgctgtaatggaccaagagcctgccggggacagaacagtgaacagggaggactctgatgatcaagaccctcaggaggtgacatatgcacagttggatcactgcgttttcacacagacaaaaatcacttccccttctcagaggcccaagacacctccaacagataccaccatgtacatggaacttccaaatgctaagccaagatcattgtctcctgcccataagcaccacagtcaggccttgaggggatcttctagggagacaacagccctgtctcaaaaccgggttgctagctcccatgtaccagcagctggaatctgaaggcatcagtcttcatcttaggggatcgctcttcctcacaccacaaatctgaacatgcctctctcttgcttacaaatgtctaaggtccccactgcctgctggagagaagacacactcctttgcttagcccacaattctctatttcacttgacccctgcccacctctccaactgaactggcttacttcctagtctacttgaggctgcaatcacactgaggaactcacaattccagacatacaagaggctccctcttaacatggcactgagacacgtgctgttccaccttccctcatgctgtttcacctttcctcagactattttccagccttctgtcagtcagcagtgaaacttataaaattttttgtgatttcaatgtagctgtctccttttcaaataaacatgtctgccctcattgctttaggtaatgtgacactatttgctgaaagaaaccgctgttatcattaccatgtccacataaccccatctgttatccactgggttc

SEQ ID NO: 204733 - DNA, 1128 bp, Artificial Sequence
  derived and/or modified sequence
atgagcctgatggtggtgtccatggcctgtgtgggcttcttcctgctgcagggcgcctggccccatgagggcggccaggacaagcccctgctgagcgcctggcccagcgctgtggtgccccggggcggccacgtgaccctgctgtgccgcagccggctgggcttcaccatcttcagcctgtacaaggaggatggagtgcctgtgcctgagctgtacaacaagatcttctggaagagcatcctgatgggccctgtgaccccagcccacgccggcacctaccgctgccggggcagccaccccaggagccccatcgagtggagcgcccccagcaaccccctggtgattgtggtgacaggcctgtttgggaagcccagcctgagcgcccagcccggccccaccgtgaggactggagaaaatgtgaccctgagctgcagcagccgcagcagctttgacatgtaccacctgagccgggagggccgggcccacgagccccggctgcctgctgtgcccagcgtgaatggcaccttccaggccgacttccccctgggccctgccacccatggaggcacctacacctgcttcggcagcctgcatgacagcccctatgagtggagcgaccccagcgaccccctgctggtgtctgtgacaggcaacagcagcagcagcagcagcagccccacagagcccagcagcaagacaggcatccgccgccacctgcacatcctgattggcacctctgtggccatcatcctcttcatcatcctcttcttcttcctgctgcactgctgctgcagcaacaagaagaatgctgctgtgatggaccaggagcctgctggggacagaacagtgaaccgggaggacagtgatgaccaggacccccaggaggtgacctacgcccagctggaccactgtgtgttcacccagaccaagatcaccagccccagccagaggcccaagaccccacccacagacaccaccatgtacatggagctgcccaatgccaagcccaggagcctgagccctgcccacaagcaccacagccaggccctgcggggcagcagccgggagaccacagccctgagccagaacagagtggccagcagccacgtgcctgctgctggcatctag

SEQ ID NO: 204734 - DNA, 1128 bp, Artificial Sequence
  derived and/or modified sequence
atgagcctgatggtgatctccatggcctgtgtgggcttcttcctgctgcagggcgcctggacccatgagggcggccaggacaagcccctgctgagcgcctggcccagcgctgtggtgccccggggcggccacgtgaccctgctgtgccgcagccggctgggcttcaccatcttcagcctgtacaaggaggatggagtgcctgtgcctgagctgtacaacaagatcttctggaagagcatcctgatgggccctgtgaccccagcccacgccggcacctaccgctgccggggcagccaccccaggagccccatcgagtggagcgcccccagcaaccccctggtgattgtggtgacaggcctgtttgggaagcccagcctgagcgcccagcccggccccaccgtgaggactggagaaaatgtgaccctgagctgcagcagccgcagcagctttgacatgtaccacctgagccgggagggccgggcccacgagccccggctgcctgctgtgcccagcgtgaatggcaccttccaggccgacttccccctgggccctgccacccatggaggcacctacacctgcttcggcagcctgcatgacagcccctatgagtggagcgaccccagcgaccccctgctggtgtctgtgacaggcaacagcagcagcagcagcagcagccccacagagcccagcagcaagacaggcatccgccgccacctgcacatcctgattggcacctctgtggccatcatcctcttcatcatcctcttcttcttcctgctgcactgctgctgcagcaacaagaagaatgctgctgtgatggaccaggagcctgctggggacagaacagtgaaccgggaggacagtgatgaccaggacccccaggaggtgacctacgcccagctggaccactgtgtgttcacccagaccaagatcaccagccccagccagaggcccaagaccccacccacagacaccaccatgtacatggagctgcccaatgccaagcccaggagcctgagccctgcccacaagcaccacagccaggccctgcggggcagcagccgggagaccacagccctgagccagaacagagtggccagcagccacgtgcctgctgctggcatctag

SEQ ID NO: 204735 - DNA, 1128 bp, Artificial Sequence
  derived and/or modified sequence
atgagcctgatggtggtgagcatggcctgcgtgggcttcttcctgctacagggcgcttggcctcatgagggaggtcaggacaagccactgctgtctgcctggccttctgccgtggtgcccaggggcggacatgtcaccttgttgtgtcgctctcggctggggttcactatcttttccttgtataaggaagatggcgtgcccgttcccgaactgtacaacaagattttctggaagagcatactcatgggtcctgtgacccctgcacatgctggcacatatagatgtcgggggagtcatccaaggtcacccattgagtggtctgctcctagtaaccctctggttatcgtggtgaccggtttgttcgggaagccgtcgcttagtgctcagccaggtcctaccgttaggaccggggaaaatgtgaccctctcctgtagctctcgcagttctttcgacatgtaccatttgtctagggagggtcgagctcacgagccaagactgccagccgtaccatcagttaatggcactttccaggcagattttcccctgggacctgccacccacggaggtacatacacttgttttggatcgctgcacgactctccctacgaatggtcagacccctcagatccactcctcgtctccgtcaccggcaactcctcctcttcatcctcgtctcccaccgagccttctagtaagacaggcatccggcgccatctacacattcttattgggacaagcgtggctatcatattgttcatcatccttttcttctttctcctccactgctgctgttcaaataagaaaaacgccgcggtaatggatcaagagccggcaggcgacagaaccgtgaatcgagaagacagcgatgatcaggatccacaagaggtaacatacgcccaactagaccactgtgtgtttactcagaccaagatcacatcaccgagccaacggcccaaaactcccccaaccgatacaacaatgtacatggaactccctaacgcaaaaccacgaagtttgtccccagcccataagcatcattcccaagcattaaggggatcatctagagagaccactgctctgtcccagaaccgggtggcctcttcacatgtccccgccgccgggatctag

SEQ ID NO: 204736 - DNA, 1128 bp, Artificial Sequence
  derived and/or modified sequence
atgagcctgatggtgatcagcatggcctgcgtgggcttcttcctgttgcagggggcctggacccacgaaggcggccaggacaagccgctgctttcagcttggccatccgccgttgtcccgaggggaggacacgtcacgctgctctgtcgttctaggctcggatttacaatattttcgctgtataaggaagacggggtgcctgtcccggaactgtacaacaaaatattttggaagagtatactaatgggacccgtaacacccgcccacgcaggaacatatcggtgtcgcggcagtcaccctagatctcctattgagtggtccgcgccatctaaccctttggtgatcgtcgtaacgggcctgttcggtaagccatctctaagcgctcagccgggcccgaccgtgagaactggcgagaacgtaaccctctcatgttcctcacgatcgtcattcgatatgtatcatttgtcacgtgagggcagggctcatgagccgcgtctgccagccgttccctccgtgaacggaacctttcaggctgacttccctttgggaccagctacccatgggggaacatacacatgctttggaagccttcatgactctccttatgagtggagcgacccttcagaccccctcttagtctctgtgacaggcaattcatcctccagttccagctcaccaactgagccatcatctaaaacagggatccgccgccacctccacatcttaataggcacgtctgtagccattatcctgttcattatcctatttttctttctgctacattgttgctgctctaacaaaaaaaatgcagccgtaatggaccaagaaccagctggcgatagaaccgttaatagggaagactcggatgaccaagacccacaggaggtgacttacgctcagttggatcattgcgtcttcacgcagaccaaaatcacgtcaccatcacagaggccaaaaactcctcctacggacacaactatgtacatggagcttcccaatgctaagcctaggagcctgtctcctgcgcataaacatcactcacaggcgcttagaggctccagccgggaaacgactgctcttagccagaacagggtggcttcgagtcatgtgcccgcagcagggatctag

SEQ ID NO: 204737 - DNA, 1128 bp, Artificial Sequence
  derived and/or modified sequence
atgtcactgatggtcgtgtcgatggcctgtgttggtttcttcctcctgcaaggagcctggcctcacgagggaggacaggataaaccgctgctctctgcctggccatcagcagtagtgcctcgagggggtcacgtaacactgctttgtcgttcgagattgggcttcacaatctttagcctgtataaggaggacggtgttccggtaccggaactttataacaagatcttctggaagagtatcctgatgggtccagttactccagcacacgcaggcacctatagatgcagagggtctcaccctcggagtccaatcgagtggtctgcgcctagcaatccactggtcattgttgttactgggctattcggaaaaccctccctgtcagcacagcctggaccgacagtgcggactggggagaatgtgacactgtcatgttcctccaggagttcttttgacatgtaccacctgtcccgcgaaggacgtgcgcacgagccgagactgcccgcagtaccaagtgtaaatggcaccttccaggccgactttccactcggaccggctacacatggcggaacctacacgtgtttcggatctctccatgattctccctacgaatggtcagacccaagtgaccctctgttagtgtcagtgacaggaaatagctccagttcaagcagttctcctacggaacctagcagcaaaaccggcattcgacgtcacctgcacatcctcatagggacatccgtggcgatcatcctgttcataattctcttttttttcctgctccattgttgctgcagcaataagaagaatgcggcagtcatggaccaggagccagctggcgacaggaccgtgaatagggaagattccgatgatcaggacccccaggaagtgacatacgcccagctcgaccattgtgtctttacccagacgaagattacatctccctctcaacggccaaagactccaccgacagacacaacaatgtacatggagttaccaaatgccaaaccccgatcgcttagccccgcacacaaacaccactcccaggctttgagaggatcctctagggaaacaactgctctgagccagaatagagtcgccagtagtcatgtcccagctgctggcatttag

SEQ ID NO: 204738 - DNA, 1128 bp, Artificial Sequence
  derived and/or modified sequence
atgagtctgatggttatttccatggcatgtgtgggtttttttctccttcagggagcctggactcatgagggagggcaggacaagcccctcttgtcagcgtggccatccgccgttgtgcccagaggaggacacgtgactctcctgtgtcgtagtagactgggattcacgattttttcgttgtataaagaggacggtgtcccagtgcccgaactctacaataagatcttctggaaaagcatcctcatgggcccagtgacccccgcacatgccggtacgtatcgctgccgcggttcccaccctcgcagccctatagagtggtctgcgccttccaatcccctggtcatcgttgtcacgggactcttcggtaagcccagtttatccgcccagcccggacccaccgtgcgcacaggcgagaacgtgactctgagctgctctagccgcagctcattcgatatgtaccacttaagccgagaggggagagctcatgagcctcggctcccggcagtcccttccgtgaatggcacctttcaggccgacttcccactgggtccagccactcatggtggtacgtacacatgtttcggctctctgcacgattcgccgtatgaatggagtgatccatctgatcccttgcttgtgtctgtgaccggaaacagtagctcaagttctagctcgcctacagagcctagcagcaaaacaggcataagaagacatctgcacattcttatcggaacatcggtggctattatactgtttattatactgtttttttttctcctgcactgctgttgttctaataagaagaatgcagcagtcatggatcaggaacccgctggagacaggacagtgaatcgtgaagacagcgacgatcaggaccctcaagaagttacctatgcccagcttgaccactgcgtctttacccaaaccaagattacttccccgtcccagcgacctaaaacccctcccactgacaccactatgtatatggagctgccgaacgctaaaccaagatccctctcaccggctcacaagcaccactcacaagccctccggggttccagccgagaaaccactgccctaagccagaaccgagtcgcctctagtcacgtgccagccgctggcatatag

SEQ ID NO: 204739 - DNA, 1128 bp, Artificial Sequence
  derived and/or modified sequence
atgagcctgatggtggtgagcatggcctgcgtgggcttcttcctgctgcagggcgcctggccccacgagggcggccaggacaagcccctgctgagcgcctggcccagcgccgtggtgcccagaggcggccacgtgaccctgctgtgcagaagcagactgggcttcaccatcttcagcctgtacaaggaggacggcgtgcccgtgcccgagctgtacaacaagatcttctggaagagcatcctgatgggccccgtgacccccgcccacgccggcacctacagatgcagaggcagccaccccagaagccccatcgagtggagcgcccccagcaaccccctggtgatcgtggtgaccggcctgttcggcaagcccagcctgagcgcccagcccggccccaccgtgagaaccggcgagaacgtgaccctgagctgcagcagcagaagcagcttcgacatgtaccacctgagcagagagggcagagcccacgagcccagactgcccgccgtgcccagcgtgaacggcaccttccaggccgacttccccctgggccccgccacccacggcggcacctacacctgcttcggcagcctgcacgacagcccctacgagtggagcgaccccagcgaccccctgctggtgagcgtgaccggcaacagcagcagcagcagcagcagccccaccgagcccagcagcaagaccggcatcagaagacacctgcacatcctgatcggcaccagcgtggccatcatcctgttcatcatcctgttcttcttcctgctgcactgctgctgcagcaacaagaagaacgccgccgtgatggaccaggagcccgccggcgacagaaccgtgaacagagaggacagcgacgaccaggacccccaggaggtgacctacgcccagctggaccactgcgtgttcacccagaccaagatcaccagccccagccagagacccaagaccccccccaccgacaccaccatgtacatggagctgcccaacgccaagcccagaagcctgagccccgcccacaagcaccacagccaggccctgagaggcagcagcagagagaccaccgccctgagccagaacagagtggccagcagccacgtgcccgccgccggcatctag

SEQ ID NO: 204740 - DNA, 1128 bp, Artificial Sequence
  derived and/or modified sequence
atgagcctgatggtgatcagcatggcctgcgtgggcttcttcctgctgcagggcgcctggacccacgagggcggccaggacaagcccctgctgagcgcctggcccagcgccgtggtgcccagaggcggccacgtgaccctgctgtgcagaagcagactgggcttcaccatcttcagcctgtacaaggaggacggcgtgcccgtgcccgagctgtacaacaagatcttctggaagagcatcctgatgggccccgtgacccccgcccacgccggcacctacagatgcagaggcagccaccccagaagccccatcgagtggagcgcccccagcaaccccctggtgatcgtggtgaccggcctgttcggcaagcccagcctgagcgcccagcccggccccaccgtgagaaccggcgagaacgtgaccctgagctgcagcagcagaagcagcttcgacatgtaccacctgagcagagagggcagagcccacgagcccagactgcccgccgtgcccagcgtgaacggcaccttccaggccgacttccccctgggccccgccacccacggcggcacctacacctgcttcggcagcctgcacgacagcccctacgagtggagcgaccccagcgaccccctgctggtgagcgtgaccggcaacagcagcagcagcagcagcagccccaccgagcccagcagcaagaccggcatcagaagacacctgcacatcctgatcggcaccagcgtggccatcatcctgttcatcatcctgttcttcttcctgctgcactgctgctgcagcaacaagaagaacgccgccgtgatggaccaggagcccgccggcgacagaaccgtgaacagagaggacagcgacgaccaggacccccaggaggtgacctacgcccagctggaccactgcgtgttcacccagaccaagatcaccagccccagccagagacccaagaccccccccaccgacaccaccatgtacatggagctgcccaacgccaagcccagaagcctgagccccgcccacaagcaccacagccaggccctgagaggcagcagcagagagaccaccgccctgagccagaacagagtggccagcagccacgtgcccgccgccggcatctag

SEQ ID NO: 204741 - DNA, 1596 bp, Artificial Sequence
  derived and/or modified sequence
ctgtgcgctgctgagctgagctggggcgcggccgcctgtctgcaccggcagcaccatgtcgctcatggtcatcagcatggcgtgtgttgggttcttcttgctgcagggggcctggacacatgagggtggtcaggacaagcccttgctgtctgcctggcccagcgctgtggtgcctcgaggaggacatgtgactcttctgtgtcgctctcgtcttgggtttaccatcttcagtctgtacaaagaagatggggtgcctgtccctgagctctacaacaaaatattctggaagagcatcctcatgggccctgtgacccctgcacacgcagggacctacagatgtcggggttcacacccacgctcccccattgagtggtcagcacccagcaaccccctggtgatcgtggtcacaggtctatttgggaaaccttcactctcagcccagccgggccccacggttcgcacaggagagaacgtgaccttgtcctgcagctccaggagctcatttgacatgtaccatctatccagggaggggagggcccatgaacctaggctccctgcagtgcccagcgtcaatggaacattccaggctgactttcctctgggccctgccacccacggagggacctacacatgcttcggctctctccatgactcaccctatgagtggtcagacccgagtgacccactgcttgtttctgtcacaggaaactcttcaagtagttcatcttcacccactgaaccaagctccaaaactggtatccgcagacacctgcacattctgattgggacctcagtggctatcatcctcttcatcatcctcttcttctttctccttcattgctgctgctccaacaaaaagaatgctgctgtaatggaccaagagcctgccggggacagaacagtgaacagggaggactctgatgatcaagaccctcaggaggtgacatatgcacagttggatcactgcgttttcacacagacaaaaatcacttccccttctcagaggcccaagacacctccaacagataccaccatgtacatggaacttccaaatgctaagccaagatcattgtctcctgcccataagcaccacagtcaggccttgaggggatcttctagggagacaacagccctgtctcaaaaccgggttgctagctcccatgtaccagcagctggaatctgaaggcatcagtcttcatcttaggggatcgctcttcctcacaccacaaatctgaacatgcctctctcttgcttacaaatgtctaaggtccccactgcctgctggagagaagacacactcctttgcttagcccacaattctctatttcacttgacccctgcccacctctccaactgaactggcttacttcctagtctacttgaggctgcaatcacactgaggaactcacaattccagacatacaagaggctccctcttaacatggcactgagacacgtgctgttccaccttccctcatgctgtttcacctttcctcagactattttccagccttctgtcagtcagcagtgaaacttataaaattttttgtgatttcaatgtagctgtctccttttcaaataaacatgtctgccctc

SEQ ID NO: 204742 - protein, 782 aa, Artificial Sequence
  derived and/or modified sequence
MDSSIHLSSLISRHDDEATRTSTSEGLEEGEVEGETLLIVESEDQASVDLSHDQSGDSLNSDEGDVSWMEEQLSYFCDKCQKWIPASQLREQLSYLKGDNFFRFTCSDCSADGKEQYERLKLTWQQVVMLAMYNLSLEGSGRQGYFRWKEDICAFIEKHWTFLLGNRKKTSTWWSTVAGCLSVGSPMYFRSGAQEFGEPGWWKLVHNKPPTMKPEGEKLSASTLKIKAASKPTLDPIITVEGLRKRASRNPVESAMELKEKRSRTQEAKDIRRAQKEAAGFLDRSTSSTPVKFISRGRRPDVILEKGEVIDFSSLSSSDRTPLTSPSPSPSLDFSAPGTPASHSATPSLLSEADLIPDVMPPQALFHDDDEMEGDGVIDPGMEYVPPPAGSVASGPVVGVRKKVRGPEQIKQEVESEEEKPDRMDIDSEDTDSNTSLQTRAREKRKPQLEKDTKPKEPRYTPVSIYEEKLLLKRLEACPGAVAMTPEARRLKRKLIVRQAKRDRGLPLFDLDQVVNAALLLVDGIYGAKEGGISRLPAGQATYRTTCQDFRILDRYQTSLPSRKGFRHQTTKFLYRLVGSEDMAVDQSIVSPYTSRILKPYIRRDYETKPPKLQLLSQIRSHLHRSDPHWTPEPDAPLDYCYVRPNHIPTINSMCQEFFWPGIDLSECLQYPDFSVVVLYKKVIIAFGFMVPDVKYNEAYISFLFVHPEWRRAGIATFMIYHLIQTCMGKDVTLHVSASNPAMLLYQKFGFKTEEYVLDFYDKYYPLESTECKHAFFLRLRR

SEQ ID NO: 204743 - protein, 56 aa, Artificial Sequence
  derived and/or modified sequence
MDSSIHLSSLISRHDDEATRTSTSEGLEEGEVEGETLLIVESEDQASVDLSHDQSG

SEQ ID NO: 204744 - DNA, 171 bp, Artificial Sequence
  derived and/or modified sequence
atggacagcagcatccacctgagcagcctgatcagcagacacgacgacgaggccaccagaaccagcaccagcgagggcctggaggagggcgaggtggagggcgagaccctgctgatcgtggagagcgaggaccaggccagcgtggacctgagccacgaccagagcggctag

SEQ ID NO: 204745 - DNA, 2349 bp, Artificial Sequence
  derived and/or modified sequence
atggattcttctatccatttaagtagtctcatctccaggcatgatgacgaggccacacgtactagtacctccgagggcctggaagagggcgaggtggagggggagaccctccttattgtagaaagcgaagaccaggcctccgtagacctaagccacgatcaatctggcgactctctgaattcggatgaaggagacgtgtcatggatggaagagcagctgtcgtatttctgtgataagtgtcagaagtggattcccgcatcgcaactccgggagcagctaagctatcttaagggagacaatttttttcggtttacatgttccgactgtagcgctgacggcaaggagcagtacgaacgccttaaactcacttggcagcaggttgtaatgttggccatgtataacctttctcttgagggaagcggacggcaagggtactttcggtggaaggaggacatctgtgctttcattgagaagcactggaccttcctactgggaaacaggaagaagacaagtacctggtggtctacagtcgcaggctgcctgtcagttggcagccctatgtatttccgctctggagcacaggaattcggcgaaccaggctggtggaaactggttcataataagcccccaactatgaagccagaaggcgaaaaactgtccgccagcaccctgaaaataaaggcagcctccaagccaactcttgatcctatcataaccgttgaaggtcttcgaaagcgcgcctcccgcaacccagtggaatcagctatggaattaaaagagaagcgaagtcgcacccaagaagcaaaagacattaggcgggcccagaaggaggcggccggcttcttggacaggtctacaagcagcacccccgtcaagttcataagcagagggcggcggcccgatgtgattttagaaaagggagaagtaatcgacttttcgtctctgtccagctcagaccggacacctctgaccagccctagtccgtctccgagcctagattttagcgcacctggcacacccgcctcacactctgctacaccatcgctgctgagtgaagcggatttaatccccgatgtcatgccgccacaggcactcttccatgacgacgacgagatggagggagatggtgtgatagacccaggcatggagtatgttccaccacccgctggctcagtggccagcggccctgtggtgggcgtgagaaagaaagtcaggggtcctgaacagatcaagcaagaggtggaatccgaggaggagaagccagaccggatggacattgattctgaagatacggatagcaatacaagcctccagactcgcgcacgcgaaaaacggaagccccagcttgagaaggataccaagcctaaagagccaagatatactcccgtctccatctacgaggaaaagttgctccttaaacgcctcgaggcctgcccgggcgctgtggccatgacaccagaggcccgccgattgaagcgcaagcttatcgtcaggcaggcaaagagagaccgcggcctccctctgttcgacctggaccaggttgttaacgctgccctgctcctggttgatgggatctatggggcgaaagagggagggatttcccgcctgcctgcaggccaggcaacctatagaacgacttgtcaggactttcgtatcctggacagatatcagacgtccctgcctagccgtaagggcttccggcaccaaaccaccaaattcctctaccggctggtggggtcagaagatatggcagtggaccagtccattgttagcccctacactagccgcattctgaagccctatatcaggcgcgactacgaaaccaaacctccaaagttacaattgttgtcccagattcggtcgcacctgcataggagcgatccacattggaccccagagccagatgccccactagattattgctatgtcaggcccaaccatatccccactatcaacagcatgtgccaggagtttttttggccggggattgacctctccgagtgccttcaataccctgacttcagcgtggtcgtcctgtacaagaaggtgatcattgcattcggctttatggtgcctgacgtgaaatacaatgaggcttacatttctttccttttcgttcatcccgaatggaggagggcgggaatcgccacctttatgatctaccatctcatccagacgtgcatggggaaggacgtgacactccacgtgtccgccagtaatcctgccatgctcctgtatcagaaattcggtttcaaaacggaggagtatgtgttggacttctatgataagtactatccactggagagcacagagtgcaagcatgctttttttcttcgtctcagacgttag

SEQ ID NO: 204746 - DNA, 2349 bp, Artificial Sequence
  derived and/or modified sequence
atggatagttcaatccatttgtccagcctcatatcccgccacgacgacgaggcgactaggacctccacgtcagaggggctggaagagggagaggttgagggagagactctccttattgttgagtccgaagaccaggcatcagttgacctgagccacgaccagagtggcgactccctcaactcagacgagggcgatgtctcatggatggaagaacagctgtcctacttctgcgataaatgccagaagtggatccccgcttcccagctgagggaacagttgtcatacctcaaaggcgataacttcttcaggtttacgtgctcagactgctcagccgacggcaaggagcaatacgagcgcctgaagctgacatggcagcaggtggtgatgctggcgatgtataacctcagtctggagggaagcgggcgtcagggatactttcggtggaaagaggacatttgtgcattcattgaaaagcactggaccttcctgttaggcaaccgtaagaaaaccagcacatggtggagcactgttgccggttgcctttccgtcgggtctcctatgtatttccgctccggcgcacaggaatttggggaacctggatggtggaagctggtgcacaacaaacctcccaccatgaagccagagggtgagaaactaagtgcctccaccctgaaaatcaaggctgcctctaagcctacccttgaccccatcattactgtcgaaggactcaggaagcgcgcctcccggaatccagtggagagtgccatggagctcaaggaaaagagaagtagaacccaggaggccaaggacatacgccgggcacagaaggaggcggctggcttcctagatagaagcaccagttctactcccgttaaatttattagccgcggtaggcgcccagatgtgatccttgagaaaggtgaagttatcgacttcagctccttgagtagttctgaccgcacccctctcaccagtcctagcccatcaccttcgctggacttctctgcaccgggaacccccgcatcccacagcgcaactcccagtctgctgtctgaagcagatctcattcccgacgtgatgccccctcaggctttgttccatgatgacgatgaaatggaaggagatggagttattgatcccggcatggagtacgttcctcccccagccgggtcggtagcatccggaccggtagttggtgtgcgtaagaaggttcgagggccagagcagatcaaacaggaggtggagagcgaggaggagaagcctgatagaatggatattgattcagaggataccgattccaacaccagcctgcaaactcgtgcacgagagaagcggaaacctcagctggagaaagacactaaaccaaaggagccaagatacacacccgtgtctatttatgaggaaaaactgctcctgaagcgtcttgaagcctgccccggtgctgtggccatgacacctgaagctagacggttgaagcgtaaattgatagtccgacaagccaaaagagatcgggggttaccattgtttgacctggatcaggtcgttaatgctgccctgctgctggtggatggcatctacggtgcaaaggaaggcggtatctccagactgccggctggccaagctacataccgcaccacttgccaggattttcgaatcctcgatcgctatcagacatcattaccatccagaaaaggattccgccaccagacaacaaagtttctgtacaggctagtggggtccgaggatatggccgtggaccagagcatcgtgagtccatatacttcacgcatcctcaagccttatataaggcgcgactacgagaccaagccacccaaattacagcttctgtcacagattaggtcccaccttcatcgctcagacccccattggactcctgagcctgacgcaccactggattactgctatgttcggccaaaccatattccgaccattaattctatgtgtcaggagttcttttggccaggaattgatctctccgagtgtctgcagtaccctgacttttccgtagtcgtgctgtacaagaaggtcatcatcgcttttggctttatggtgcctgacgtgaagtataacgaggcctacatatctttcttgtttgtgcatcctgaatggcgacgcgcagggattgccacctttatgatttatcatctgatccagacatgcatgggaaaggatgtcaccctgcacgtctcagccagtaatcctgcaatgttgctttaccagaagtttggcttcaagaccgaagagtatgtgctcgacttttatgacaagtattatcctctggagagcactgaatgcaaacatgcttttttcttgcggctcaggcgatag

SEQ ID NO: 204747 - DNA, 171 bp, Artificial Sequence
  derived and/or modified sequence
atggatagttccatacatctgtcatccttgatctcccggcacgatgacgaagctactagaacatcaacttctgagggcttggaggagggcgaagtggaaggagagacactccttattgtggagtcagaggaccaagccagcgtcgacctcagccatgatcagagcgggtag

SEQ ID NO: 204748 - DNA, 2349 bp, Artificial Sequence
  derived and/or modified sequence
atggacagcagcatccacctgagcagcctcatcagcagacatgatgatgaggccaccaggaccagcaccagcgagggcctggaggagggggaggtggagggggagaccctgctgattgtggagagcgaggaccaggcctctgtggacctgagccatgaccagagcggggacagcctgaacagtgatgaaggagatgtgtcctggatggaggagcagctgagctacttctgtgacaagtgccagaagtggatcccagccagccagctgcgggagcagctgagctacctgaagggggacaacttcttccgcttcacctgcagcgactgcagcgcagatggcaaggagcagtatgagcggctgaagctgacctggcagcaggtggtgatgctggccatgtacaacctgagcctggagggcagcggccggcagggctacttccgctggaaggaggacatctgtgccttcatcgagaagcactggaccttcctgctgggcaacaggaagaagaccagcacctggtggagcacagtggccggctgcctgtctgtgggcagccccatgtacttccgcagcggggcccaggagtttggagagcccggctggtggaagctggtgcacaacaagccacccaccatgaagccagagggggagaagctgagcgccagcaccctgaagatcaaggccgccagcaagcccaccctggaccccatcatcaccgtggagggcctgaggaagagggccagcagaaatcctgtggagagcgccatggagctgaaggagaagaggagcaggacccaggaggccaaggacatccggcgggcccagaaggaggccgccggcttcctggacaggagcaccagcagcacccctgtgaagttcatcagccggggccggcggccagatgtgatcctggagaagggggaggtgattgacttcagcagcctgagcagcagtgacaggacccccctgaccagccccagccccagccccagcctggacttcagcgcccctggcaccccagccagccacagcgccacccccagcctgctgtctgaggccgacctgatcccagatgtgatgccaccccaggccctcttccatgatgatgatgagatggagggagatggagtcatcgaccccggcatggagtatgtgcccccacctgctggctctgtggccagcggccctgtggtgggcgtgaggaagaaggtgcggggccctgagcagatcaagcaggaggtggagagcgaggaggagaagccagacaggatggacatcgacagcgaggacacagacagcaacaccagcctgcagacccgggcccgggagaagaggaagccccagctggagaaggacaccaagcccaaggagccccgctacacccctgtgtccatctatgaggagaagctgctgctgaagaggctggaggcctgccctggagctgtggccatgaccccagaggcccggcggctgaagaggaagctgattgtgcggcaggccaagagggaccggggcctgcccctgtttgacctggaccaggtggtgaatgctgccctgctgctggtggatggcatctacggggccaaggagggcggcatcagccggctgcctgctggccaggccacctaccgcaccacctgccaggacttccgcatcctggaccgctaccagaccagcctgcccagcaggaagggcttccgccaccagaccaccaagttcctgtaccgcctggtgggcagcgaggacatggctgtggaccagagcatcgtgagcccctacaccagccgcatcctgaagccctacatcagaagagattatgagaccaagccacccaagctgcagctgctgagccagatccgcagccacctgcacagaagtgacccccactggaccccagagccagatgcccccctggactactgctacgtgcggcccaaccacatccccaccatcaacagcatgtgccaggagttcttctggccaggcatcgacctgtctgaatgtctgcagtacccagacttctctgtggtggtgctgtacaagaaggtgatcatcgccttcggcttcatggtgcctgatgtgaagtacaatgaggcctacatctccttcctgtttgtgcaccctgagtggaggagagctggcatcgccaccttcatgatctaccacctgatccagacctgcatgggcaaggatgtgaccctgcacgtgtctgccagcaacccagccatgctgctgtaccagaagtttggcttcaagacagaggagtatgtgctggacttctatgacaagtactaccccctggagagcacagagtgcaagcacgccttcttcctgcggctgcggaggtag

SEQ ID NO: 204749 - DNA, 171 bp, Artificial Sequence
  derived and/or modified sequence
atggacagcagcatccacctgagcagcctcatcagcagacatgatgatgaggccaccaggaccagcaccagcgagggcctggaggagggggaggtggagggggagaccctgctgattgtggagagcgaggaccaggcctctgtggacctgagccatgaccagagcggctag

SEQ ID NO: 204750 - DNA, 2349 bp, Artificial Sequence
  derived and/or modified sequence
atggacagcagcatccacctgagcagcctgatcagccggcacgacgatgaggcaactagaaccagcactagcgagggcttagaagaaggcgaggtggaaggtgaaaccctgctgattgtcgaatctgaagatcaggccagtgtggatctgtcacatgatcagtccggagattcactgaacagtgatgaaggcgatgtctcttggatggaagagcagttgtcatatttttgcgacaagtgccagaaatggatccccgcctctcagttaagggagcagctgagttacctgaagggagataacttcttcaggttcacttgttccgattgcagcgcagatggtaaagagcagtacgaacggcttaagctgacctggcagcaggtcgtgatgctcgccatgtataacctgtctcttgagggaagcgggcgacaggggtacttccgatggaaggaggacatttgtgctttcattgagaagcactggactttcctactgggcaaccgcaagaagacttccacctggtggtccaccgtggccggctgcctgtctgttgggtcgcccatgtacttccggtcaggtgcccaggagttcggggaaccgggttggtggaagctcgtgcataataagccacctactatgaaacctgagggagaaaagctcagcgccagcacccttaagataaaagctgcgagtaaacccacacttgatccaatcattaccgtggaaggccttcgtaagagggcatcgcgcaacccagtggagtccgctatggaacttaaggagaaacgatccaggacacaggaagctaaggacatcagaagggctcaaaaagaagccgccggtttccttgatcggtccacctcttctacaccagtaaaattcattagcagagggcggcgccctgatgtcatcctggaaaagggggaagtgattgacttttctagcctgagcagttccgatcgtactcccttaacgtcccccagtccctcgccatctctcgacttttctgcccctgggaccccagcctctcatagcgcaacacccagcctgctgtcagaagctgatctgatccctgatgtaatgcctcctcaagccctctttcacgacgacgacgagatggagggcgacggggtgatcgaccccggaatggaatatgtaccgccacctgccgggtccgtggccagcggccctgtagtgggggtccgtaaaaaagtgagaggacctgagcaaattaaacaggaggttgaatccgaggaagaaaagcctgatcgtatggatatcgatagcgaagataccgacagcaacaccagtctccagacaagagcaagggagaaacgaaaaccccaattggaaaaggataccaaacctaaagagccccgatacaccccggtgtcgatttacgaggagaaattgctccttaagagactggaggcttgcccaggggcagttgccatgactcccgaagcccgccgactcaagaggaaattgattgtccgacaagccaagcgcgataggggtcttcccctgtttgatctcgatcaggtagtcaacgccgcactgctgctggtggatggaatttacggggccaaggagggcggaatcagtagactgcctgcaggtcaagctacatatcggaccacctgccaggacttcaggattttggacagatatcagacctccctgccttcccgtaagggattccgccatcagacaactaaattcttgtaccggttggtcggatccgaggacatggctgttgaccagagtatcgtctctccttatacaagcaggatcttgaagccttacataagaagggactacgaaactaagccacccaagctacagctgctgtcgcagatccggagtcatctgcaccgctctgacccacactggacgcctgagcctgatgcccccctagattactgctatgtgcggcctaatcacattccaacaataaattcaatgtgccaggagttcttttggcctgggatcgatctttctgaatgcctgcagtatccagacttctcggtcgtagtattgtacaagaaggtcattattgcctttgggttcatggtgccagatgtaaagtacaacgaggcgtatattagcttcttgtttgttcaccccgaatggaggagggccggtatcgcaacttttatgatttatcatctgatccagacctgcatgggtaaagacgtgacgttacacgtgagcgcgtctaaccccgccatgctactttatcaaaagtttggctttaagactgaggagtatgttctagacttctacgataaatactaccccttggaatcaaccgaatgtaaacacgccttcttcttacgactcaggcggtag

SEQ ID NO: 204751 - DNA, 2349 bp, Artificial Sequence
  derived and/or modified sequence
atggacagcagcatccacctgagcagcctgatcagccggcacgacgacgaggcaacacgaacatcgacatccgaaggactcgaagagggagaggtggaaggagagacactgcttatagttgagagtgaggaccaagcctccgtggatttatcacatgaccagtccggtgactctctcaactccgatgagggcgatgtgagctggatggaggaacagctgagctacttctgtgataaatgccagaaatggatccccgcctctcagctgcgagaacaactgtcttacctcaagggagacaacttcttcaggtttacatgttctgattgcagcgccgacggtaaagagcagtacgaaaggctaaagttgacatggcagcaggtcgtaatgttggctatgtataatctgtcactggaaggctcaggccggcagggctacttccgctggaaggaggacatttgtgcctttattgagaagcactggacgttcctcctgggcaataggaaaaagacctcaacctggtggtcgactgtagctggctgccttagcgtggggagcccgatgtatttccggtccggagcacaagagtttggggagcctggatggtggaagctggtccataacaagcctccgaccatgaagcctgagggcgagaagttgtctgcttcaacgttgaaaataaaggccgccagtaaacctactctcgacccaatcatcaccgtcgaaggactcaggaaacgagcttcgcgcaaccccgtggaatctgccatggagctgaaagaaaaaagaagtagaacgcaagaggctaaggacatcaggagggcccaaaaagaagctgccggatttctggataggtcaacgtccagtacccccgtgaagttcatttcaagagggcggcgtccagacgttattctggaaaagggggaagtcatcgatttcagctccctaagctcaagcgataggaccccactgacgtccccaagtccgagcccgtctctggacttctccgcacctggtactccagcctctcattccgccaccccgtcacttttatcagaggctgatctgatcccggatgtgatgcctccacaggcgctgttccatgacgacgacgagatggaaggagacggcgtgatcgaccccggcatggagtatgtgcccccccctgcgggctccgttgcaagcgggccagttgttggggtgaggaaaaaggtgcgcggcccagagcagattaagcaggaggtagagagcgaagaggaaaaaccagacaggatggatattgacagtgaggacaccgatagcaacacaagcttgcagaccagggcccgtgaaaagaggaagccacagttagaaaaggacacgaagcccaaggaaccacgatatactcccgttagcatctatgaggagaaactactgctgaagagactcgaggcgtgcccgggcgctgtggcaatgacccccgaggccagacgccttaaaagaaagctgattgtgcggcaggctaagcgcgatcggggactcccactgtttgacctggaccaggtggtaaacgctgcactgctgttggtggacggcatttacggggccaaggagggcgggatctcaagattgcctgcaggccaggccacatatcgaacaacctgtcaggactttcgcatcctagaccgctaccagacttccttaccatcccgaaaaggcttccggcatcagacgacaaagttcctgtataggcttgtcggctccgaggacatggccgtggatcagtccatcgtgtctccatatacgtctcgcatccttaagccctacattcgccgcgattacgagaccaaaccccccaaactccagctgctcagtcaaatcagatcacacctccacaggtccgatcctcactggacaccagagccggatgctcctctagactactgttacgtgaggccaaaccacatccctactatcaatagtatgtgccaagagtttttctggccaggcatcgacctgagtgagtgccttcagtaccctgactttagtgtggtagtgctgtacaagaaggtgataattgccttcggtttcatggtacccgatgtaaagtacaacgaagcctatatctctttcctttttgtgcatcctgaatggagaagggccggaatcgctacatttatgatctatcacctaatccagacatgtatgggcaaggacgtcacactgcatgtgtcggccagtaaccccgctatgctcctataccagaagttcggcttcaaaacagaagagtacgtgctcgatttctacgacaagtactaccccctggagagcaccgagtgcaagcatgccttcttcctgaggctcagacggtag

SEQ ID NO: 204752 - DNA, 171 bp, Artificial Sequence
  derived and/or modified sequence
atggacagcagcatccacctgagcagcctgatcagccggcacgacgatgaagccacacggacgtccacttcagaaggcctggaggagggcgaggttgagggcgagaccctactgattgtggaaagcgaggatcaagcctccgtggatctgtcgcatgatcagtcaggatag

SEQ ID NO: 204753 - DNA, 2349 bp, Artificial Sequence
  derived and/or modified sequence
atggactcttccatccatctgagttccctgatatcccggcatgacgacgaggccacaagaacctcgacttccgaaggattggaggagggcgaagtggagggggagacactgctcatcgtcgaatccgaagatcaggcttctgtggacctcagccacgatcagagcggtgacagcctgaactcggatgagggagatgtgagttggatggaggagcaactgtcttacttttgcgacaaatgccagaagtggatccctgcctcccagctgcgcgagcaactgagctacctgaagggagataatttttttaggttcacgtgctccgactgttctgccgatggcaaggagcagtacgagcgactaaaactgacctggcagcaggtggtgatgctggctatgtataacctgagtttggagggaagtgggagacaggggtattttagatggaaggaagatatttgcgccttcattgaaaaacactggacttttttgctcgggaaccggaaaaagacatccacttggtggtccacagtggcgggttgccttagcgtggggtctcccatgtacttcagaagtggcgcacaggagtttggggagccaggctggtggaagctggtgcacaacaagccacctacaatgaagccagagggagagaagctgtccgccagcactctgaaaatcaaggcagcctccaaacctacattggatccgataattactgttgaaggcttgcgcaagagagcttcaagaaaccctgttgagagcgcaatggagttgaaagagaagagatcaaggacccaggaggccaaagacatcagacgggctcagaaagaggccgctggttttctcgacagaagtacatcatctacaccagtgaagtttatttccaggggaagacgccctgatgtgatcctggagaagggcgaggttattgacttcagttccctgtcaagcagcgacaggacccctcttaccagtccgtctccttcccccagtctcgacttttcagccccaggcacacccgctagccatagtgctacgcctagtttgctgtctgaggctgacttgatcccggatgtgatgcctcctcaggcgctgtttcacgatgacgacgaaatggagggggatggcgtaatcgaccccggaatggagtatgttccccctcctgcaggatctgtggcctctgggccagtggtgggagtccggaaaaaagtgaggggccctgaacagattaaacaagaagtggagtctgaggaagagaagccagacaggatggatatcgattctgaggacacagatagcaatacttcgctccagacacgcgctcgtgagaagcggaagcctcaactcgaaaaagacactaaaccaaaagaacctcggtacactcccgtgtccatttacgaagagaagcttcttttgaagagactcgaagcttgtcccggtgctgtggccatgacaccagaggcccgacgactaaaacggaagctgattgtacgtcaggccaagcgtgatagagggttacccctgtttgaccttgaccaggttgttaacgccgctctgctgctagtcgatggcatttatggagccaaagaaggcggtatctctcggctgcccgcagggcaagctacgtaccggaccacctgtcaggactttaggatccttgatcgctaccaaacttcccttccatcccgaaagggctttcgacatcagaccacgaaatttctgtatcgcctcgtgggaagtgaggatatggcagtggatcagtctatagtgtccccctatacttctcgcatcctgaaaccctatatcagacgggattatgagacaaagccccctaagctgcagttgctgagccagattagaagccatttgcataggtctgaccctcattggacccccgaacccgacgcccctttagactattgctatgtcagacctaatcatattcctacgataaatagcatgtgtcaggagttcttctggccagggatagacttaagcgaatgcctgcagtatcctgatttctcagtcgtggttctttacaagaaagtcataatcgcgttcggctttatggtccccgatgtgaagtacaatgaggcatacataagctttctgtttgtgcaccccgagtggagaagggccggtatcgccacctttatgatttaccacctgattcaaacttgcatggggaaggacgtgaccctgcatgtctctgcgtctaaccccgctatgttattatatcagaagtttggattcaagacggaggaatatgtgttggatttctacgataagtactacccattggagtccactgagtgtaagcatgcattcttcctccgcttacgcaggtag

SEQ ID NO: 204754 - DNA, 2349 bp, Artificial Sequence
  derived and/or modified sequence
atggactcctccatccacctttcgagtctgatttctcggcatgatgatgaggccacaaggacaagtactagcgaaggcctcgaggaaggcgaagttgagggcgaaaccctcctgattgttgagagtgaggaccaggcctctgtggacctctcacacgaccagagcggtgactctcttaactccgatgagggagatgtgtcttggatggaagagcaattgagttatttctgcgataagtgtcagaagtggatccccgcttcacagctgcgggaacagttgtcttacctgaagggcgacaattttttccgattcacatgttctgactgttctgctgatggaaaggagcaatatgagcggctgaagctcacctggcagcaggtcgttatgttggctatgtataatctctcattggaggggtcagggcgacagggttactttagatggaaggaggatatatgtgcattcatagagaaacactggacattcctgttagggaacaggaagaaaacctcaacgtggtggtcgactgtggcaggatgtctgtctgtgggcagtcctatgtactttagatccggggcacaagaattcggagaacccggttggtggaaactggtacataataagcctcccaccatgaagccagagggggagaaattgagcgcaagcacactcaagatcaaagctgcttcaaaacccactctggacccgataattaccgtagaaggccttaggaagcgagccagccgcaatcccgttgagtccgccatggaactcaaggagaagcggtctcggacacaggaagcgaaagacattcgcagagctcagaaggaggcagccggatttcttgatagatcaacctcttcaaccccggtgaagttcatttcacggggacgcagaccagatgtcatcttggagaaaggagaggtcatcgatttctcatccctttcgagttcggaccgaacacccctaacaagtccctccccttccccctccctggactttagcgcccctggcacgcccgcaagccattccgcaacacccagcctgctatccgaggccgacttgatccccgacgtgatgccccctcaagctctcttccatgatgacgacgagatggagggcgatggggttatcgacccaggtatggagtacgtccccccacctgctggctccgttgcttctggaccagttgtaggtgtgcgcaaaaaggtgcgtggacctgagcagatcaaacaggaggtggaatctgaggaggagaagccagataggatggacatcgatagcgaagacacggacagcaacaccagcctgcagacacgagcacgtgaaaaacgaaaaccccagctcgaaaaggacactaaacctaaggagccaaggtatactccagtttcgatttatgaggaaaagctgttacttaagagattggaggcttgccctggcgctgtcgcaatgacaccagaagccaggagattgaagcgtaagctcatcgtgagacaggccaagagagacaggggattgcctcttttcgatctcgatcaggtcgtgaatgccgcactgctgttggttgacggtatttacggagcaaaggaaggtggtatatccagactgcctgccggtcaagccacctaccgaacaacatgccaggactttaggatactggatcggtatcagactagtctgcctagccgaaaggggttccgccaccagaccaccaaatttctctatcggctggtgggctcggaagatatggccgtagaccaatccatcgtctctccctacacgtccaggatcctgaagccctacatcaggagggattacgagactaagccccctaagctgcagcttttaagtcaaatacggagtcatctgcaccgaagtgacccacactggaccccagagcctgacgctccgttggattattgttatgtgcggccaaatcacatccctactattaattccatgtgtcaagagttcttttggcccggaatcgatctgagcgagtgccttcaataccccgacttttcagtggtagttttatataaaaaggttatcatagcgttcggcttcatggtacctgatgtgaagtacaacgaggcgtacattagcttcttatttgtccatcctgaatggaggagagccggaatcgctacattcatgatataccatctaatccagacttgtatgggaaaggacgtcactttgcacgtatccgcatccaatcctgctatgttgttatatcagaagttcgggttcaagacagaggaatatgtgctggacttttatgataaatactaccccttagaatccactgaatgtaaacatgctttttttcttaggctgagacgctag

SEQ ID NO: 204755 - DNA, 171 bp, Artificial Sequence
  derived and/or modified sequence
atggactctagcattcacttgtcatcactgatctccaggcacgatgatgaggctacacgtacatcaaccagcgaaggacttgaagagggagaagtggaaggagagacccttctgattgtggagtccgaagaccaagctagtgttgatctaagccatgaccagagcggctag

SEQ ID NO: 204756 - DNA, 3714 bp, Artificial Sequence
  derived and/or modified sequence
ttatcagagacattgagaggcaaattcggaaaaaagaaaacattcgtcttttgggagaacagattattttgactgagcaacttgaagcagaaagagagaagatgttattggcaaaaggatctcaaaaatcatgacttgaatgtgaaatatctgttggacagacaacacgagtttgtgtgtgtgtgttgatggagagtagcttagtagtatcttcatctttttttttggtcactgtccttttaaacttgatcaaataaaggacagtgggtcatataagttactgctttcagggtcccttatatctgaataaaggagtgtgggcagacactttttggaagagtctgtctgggtgatcctggtagaagccccattagggtcactgtccagtgcttagggttgttactgagaagcactgccgagcttgtgagaaggaagggatggatagtagcatccacctgagtagtctgatcagtcggcatgatgacgaagccacgagaacatcgacctcagaaggactggaggaaggtgaagtggagggagagacgctcctgatcgtcgaatccgaggatcaggcatcagtggacttatcgcacgaccagagtggggattccctcaacagtgatgaaggagacgtgtcttggatggaggagcagctgtcctacttctgtgacaagtgccaaaaatggataccagccagtcagctgagggaacagctcagttaccttaagggtgataatttttttaggtttacttgttcggattgctcagcagatggcaaggagcagtatgaaaggctgaagctgacatggcagcaagtcgtcatgttggcaatgtacaacttgtctctggaaggaagtggacgtcaaggttatttcaggtggaaagaagatatctgtgcttttattgagaaacattggacttttttactagggaataggaaaaagacgtctacctggtggagcaccgtggcaggttgcctcagcgtgggaagtcccatgtacttccgttcaggtgctcaggaatttggagagccaggatggtggaaacttgttcataacaagcccccaacgatgaaacctgaaggagagaagttgtctgcctctactttgaaaataaaagcagcctcaaaaccaactttagatcccatcattactgttgagggacttagaaaacgagcaagtcggaatcctgtggaatctgccatggaattaaaagagaaaaggtctcgaactcaggaagcaaaagacattagaagagcccagaaggaggccgctggctttcttgacaggagcacatcttctacccctgtaaaattcataagccgaggccgcaggccagatgtgattctggaaaaaggcgaagtgattgacttttcctccttgagctcctctgaccgcaccccgctgacaagcccatctccttctccttctctggatttctctgcccctggtacacctgcctctcattctgccacacctagcttgctttcagaagcagatctgattccagatgtgatgcccccacaagccttgtttcatgatgacgatgagatggaaggcgatggagtcatagacccagggatggagtacgtcccaccccctgctgggtcagtagcttctgggccagtggttggggtcagaaagaaggtcagaggccctgaacagataaagcaggaggtagagagtgaggaggaaaaacccgacaggatggatattgacagtgaagacacagattcaaacacatctttgcaaacaagggctagagaaaagaggaagcctcagctggagaaggacacaaagccgaaagagcccaggtatactcccgtgagcatctacgaggaaaagctgctgctcaagaggctggaagcttgtcccggtgctgttgccatgactccggaagctcggagactgaaacgcaaactgattgtcagacaagcgaaaagggataggggattaccactttttgacttggatcaagttgttaatgctgctcttttgttagttgacgggatttatggagccaaagaaggaggaatttccagacttccagctggacaagccacgtacagaaccacctgtcaggacttcagaatccttgaccgataccagacttccttgccgtccaggaagggatttcgacaccagaccaccaagtttttgtatcgcttggtaggatcagaagatatggctgtggaccagagtattgtcagcccttatacctctcggatcttgaaaccttatatcaggcgtgattatgaaacaaagccacccaaactgcagctcctgtcacagattcgttcccacctgcacaggagcgaccctcactggacgccggagcccgacgcacctctcgattactgttatgtgcggccaaatcacatcccaacgatcaactccatgtgtcaggagtttttttggcctggcattgacctgtctgagtgtctgcagtacccagacttcagtgttgttgttctttataaaaaagtcatcattgcctttggcttcatggttcctgatgtgaaatacaatgaagcttacatttcatttctgttcgtccaccctgaatggagaagagcagggattgcaactttcatgatctatcatctgattcagacctgcatgggcaaggacgtaacccttcacgtctcagcaagcaaccctgctatgctactgtaccagaagtttggattcaagactgaagaatatgtattagatttctatgataaatattacccattggagagtacagagtgtaaacacgcattctttctgaggctccggcgctgatgcgaatacagctcacagagaaacgcatgtgctattggagaacaggtctttgtggagatctaaaggcagtgattgatttcacagggagctctaatctctgtgattacatggtccttcaaactcccaaccaaagtgagaaaagcggcatgcagtgaaatgagcagtgagcagccctttagcaaaatcgccctccagtccttcctggagatgccttcagccagcatcccagactccacagttatttatgaatgatgtcgtgattctccctccacctgacagtttgtaagagtgaaagagcatctaacctgatgctcttggagagagataacctgtctgtcataacttaaaggatgagaaaatgtggtgtagctattaaagattcatgcagtcccaaaaggcactgtcctgggatgatgagagattataaggtgatttcataaaaggaatccaaccctgtgcccggccattgatgtgttgtcattgaatccaggaggatttctagggcactgaagttttgttgtttcttttgctgactttggttacagtcagaaaaaataaactagatgtttgtgtctacatgttctacctgttgtacctattagcatcttcctgcagggacttgggcccatggcctgggaggttggtttgggattggggttgttgggcagcctgccattcacctggcctatcctggcccttctcatgcccaagacagttgtttcacaggagtggaagtgtgggtgatgcaagtagaaccctctagatgtaccctgtgtggtctgcaggactggactgtttgctgtgtttgtggatgttggcgatagactgtcaattaggttgtttgtgatccaacaagaacatttccaaaagtatctaggtgttctcaaataaaaagctttctttgcacaacccatggccagagcgtcaa

SEQ ID NO: 204757 - DNA, 3927 bp, Artificial Sequence
  derived and/or modified sequence
gaggggtcgagcctgggcagtacaggcggcggtgcgcactctgcggcggcctctgcgcctcgggcgggcgggagagagaggccgcggccgccagcgtggggatgtctaggagctcgaaggtggtgctgggcctctcggtgctgctgacggcggccacagtggccggcgtacatgtgaagcagcagtgggaccagcagaggcttcgtgacggagttatcagagacattgagaggcaaattcggaaaaaagaaaacattcgtcttttgggagaacagattattttgactgagcaacttgaagcagaaagagagaagatgttattggcaaaaggatctcaaaaatcatgacttgaatgtgaaatatctgttggacagacaacacgagtttgtgtgtgtgtgttgatggagagtagcttagtagtatcttcatctttttttttggtcactgtccttttaaacttgatcaaataaaggacagtgggtcatataagttactgctttcagggtcccttatatctgaataaaggagtgtgggcagacactttttggaagagtctgtctgggtgatcctggtagaagccccattagggtcactgtccagtgcttagggttgttactgagaagcactgccgagcttgtgagaaggaagggatggatagtagcatccacctgagtagtctgatcagtcggcatgatgacgaagccacgagaacatcgacctcagaaggactggaggaaggtgaagtggagggagagacgctcctgatcgtcgaatccgaggatcaggcatcagtggacttatcgcacgaccagagtggggattccctcaacagtgatgaaggagacgtgtcttggatggaggagcagctgtcctacttctgtgacaagtgccaaaaatggataccagccagtcagctgagggaacagctcagttaccttaagggtgataatttttttaggtttacttgttcggattgctcagcagatggcaaggagcagtatgaaaggctgaagctgacatggcagcaagtcgtcatgttggcaatgtacaacttgtctctggaaggaagtggacgtcaaggttatttcaggtggaaagaagatatctgtgcttttattgagaaacattggacttttttactagggaataggaaaaagacgtctacctggtggagcaccgtggcaggttgcctcagcgtgggaagtcccatgtacttccgttcaggtgctcaggaatttggagagccaggatggtggaaacttgttcataacaagcccccaacgatgaaacctgaaggagagaagttgtctgcctctactttgaaaataaaagcagcctcaaaaccaactttagatcccatcattactgttgagggacttagaaaacgagcaagtcggaatcctgtggaatctgccatggaattaaaagagaaaaggtctcgaactcaggaagcaaaagacattagaagagcccagaaggaggccgctggctttcttgacaggagcacatcttctacccctgtaaaattcataagccgaggccgcaggccagatgtgattctggaaaaaggcgaagtgattgacttttcctccttgagctcctctgaccgcaccccgctgacaagcccatctccttctccttctctggatttctctgcccctggtacacctgcctctcattctgccacacctagcttgctttcagaagcagatctgattccagatgtgatgcccccacaagccttgtttcatgatgacgatgagatggaaggcgatggagtcatagacccagggatggagtacgtcccaccccctgctgggtcagtagcttctgggccagtggttggggtcagaaagaaggtcagaggccctgaacagataaagcaggaggtagagagtgaggaggaaaaacccgacaggatggatattgacagtgaagacacagattcaaacacatctttgcaaacaagggctagagaaaagaggaagcctcagctggagaaggacacaaagccgaaagagcccaggtatactcccgtgagcatctacgaggaaaagctgctgctcaagaggctggaagcttgtcccggtgctgttgccatgactccggaagctcggagactgaaacgcaaactgattgtcagacaagcgaaaagggataggggattaccactttttgacttggatcaagttgttaatgctgctcttttgttagttgacgggatttatggagccaaagaaggaggaatttccagacttccagctggacaagccacgtacagaaccacctgtcaggacttcagaatccttgaccgataccagacttccttgccgtccaggaagggatttcgacaccagaccaccaagtttttgtatcgcttggtaggatcagaagatatggctgtggaccagagtattgtcagcccttatacctctcggatcttgaaaccttatatcaggcgtgattatgaaacaaagccacccaaactgcagctcctgtcacagattcgttcccacctgcacaggagcgaccctcactggacgccggagcccgacgcacctctcgattactgttatgtgcggccaaatcacatcccaacgatcaactccatgtgtcaggagtttttttggcctggcattgacctgtctgagtgtctgcagtacccagacttcagtgttgttgttctttataaaaaagtcatcattgcctttggcttcatggttcctgatgtgaaatacaatgaagcttacatttcatttctgttcgtccaccctgaatggagaagagcagggattgcaactttcatgatctatcatctgattcagacctgcatgggcaaggacgtaacccttcacgtctcagcaagcaaccctgctatgctactgtaccagaagtttggattcaagactgaagaatatgtattagatttctatgataaatattacccattggagagtacagagtgtaaacacgcattctttctgaggctccggcgctgatgcgaatacagctcacagagaaacgcatgtgctattggagaacaggtctttgtggagatctaaaggcagtgattgatttcacagggagctctaatctctgtgattacatggtccttcaaactcccaaccaaagtgagaaaagcggcatgcagtgaaatgagcagtgagcagccctttagcaaaatcgccctccagtccttcctggagatgccttcagccagcatcccagactccacagttatttatgaatgatgtcgtgattctccctccacctgacagtttgtaagagtgaaagagcatctaacctgatgctcttggagagagataacctgtctgtcataacttaaaggatgagaaaatgtggtgtagctattaaagattcatgcagtcccaaaaggcactgtcctgggatgatgagagattataaggtgatttcataaaaggaatccaaccctgtgcccggccattgatgtgttgtcattgaatccaggaggatttctagggcactgaagttttgttgtttcttttgctgactttggttacagtcagaaaaaataaactagatgtttgtgtctacatgttctacctgttgtacctattagcatcttcctgcagggacttgggcccatggcctgggaggttggtttgggattggggttgttgggcagcctgccattcacctggcctatcctggcccttctcatgcccaagacagttgtttcacaggagtggaagtgtgggtgatgcaagtagaaccctctagatgtaccctgtgtggtctgcaggactggactgtttgctgtgtttgtggatgttggcgatagactgtcaattaggttgtttgtgatccaacaagaacatttccaaaagtatctaggtgttctcaaataaaaagctttctttgcacaacccatggccagagcgtcaa

SEQ ID NO: 204758 - DNA, 2349 bp, Artificial Sequence
  derived and/or modified sequence
atggacagcagcatccacctgagcagcctgatcagcagacacgacgacgaggccaccagaaccagcaccagcgagggcctggaggagggcgaggtggagggcgagaccctgctgatcgtggagagcgaggaccaggccagcgtggacctgagccacgaccagagcggcgacagcctgaacagcgacgagggcgacgtgagctggatggaggagcagctgagctacttctgcgacaagtgccagaagtggatccccgccagccagctgagagagcagctgagctacctgaagggcgacaacttcttcagattcacctgcagcgactgcagcgccgacggcaaggagcagtacgagagactgaagctgacctggcagcaggtggtgatgctggccatgtacaacctgagcctggagggcagcggcagacagggctacttcagatggaaggaggacatctgcgccttcatcgagaagcactggaccttcctgctgggcaacagaaagaagaccagcacctggtggagcaccgtggccggctgcctgagcgtgggcagccccatgtacttcagaagcggcgcccaggagttcggcgagcccggctggtggaagctggtgcacaacaagccccccaccatgaagcccgagggcgagaagctgagcgccagcaccctgaagatcaaggccgccagcaagcccaccctggaccccatcatcaccgtggagggcctgagaaagagagccagcagaaaccccgtggagagcgccatggagctgaaggagaagagaagcagaacccaggaggccaaggacatcagaagagcccagaaggaggccgccggcttcctggacagaagcaccagcagcacccccgtgaagttcatcagcagaggcagaagacccgacgtgatcctggagaagggcgaggtgatcgacttcagcagcctgagcagcagcgacagaacccccctgaccagccccagccccagccccagcctggacttcagcgcccccggcacccccgccagccacagcgccacccccagcctgctgagcgaggccgacctgatccccgacgtgatgcccccccaggccctgttccacgacgacgacgagatggagggcgacggcgtgatcgaccccggcatggagtacgtgcccccccccgccggcagcgtggccagcggccccgtggtgggcgtgagaaagaaggtgagaggccccgagcagatcaagcaggaggtggagagcgaggaggagaagcccgacagaatggacatcgacagcgaggacaccgacagcaacaccagcctgcagaccagagccagagagaagagaaagccccagctggagaaggacaccaagcccaaggagcccagatacacccccgtgagcatctacgaggagaagctgctgctgaagagactggaggcctgccccggcgccgtggccatgacccccgaggccagaagactgaagagaaagctgatcgtgagacaggccaagagagacagaggcctgcccctgttcgacctggaccaggtggtgaacgccgccctgctgctggtggacggcatctacggcgccaaggagggcggcatcagcagactgcccgccggccaggccacctacagaaccacctgccaggacttcagaatcctggacagataccagaccagcctgcccagcagaaagggcttcagacaccagaccaccaagttcctgtacagactggtgggcagcgaggacatggccgtggaccagagcatcgtgagcccctacaccagcagaatcctgaagccctacatcagaagagactacgagaccaagccccccaagctgcagctgctgagccagatcagaagccacctgcacagaagcgacccccactggacccccgagcccgacgcccccctggactactgctacgtgagacccaaccacatccccaccatcaacagcatgtgccaggagttcttctggcccggcatcgacctgagcgagtgcctgcagtaccccgacttcagcgtggtggtgctgtacaagaaggtgatcatcgccttcggcttcatggtgcccgacgtgaagtacaacgaggcctacatcagcttcctgttcgtgcaccccgagtggagaagagccggcatcgccaccttcatgatctaccacctgatccagacctgcatgggcaaggacgtgaccctgcacgtgagcgccagcaaccccgccatgctgctgtaccagaagttcggcttcaagaccgaggagtacgtgctggacttctacgacaagtactaccccctggagagcaccgagtgcaagcacgccttcttcctgagactgagaagatag

SEQ ID NO: 204759 - protein, 1091 aa, Artificial Sequence
  derived and/or modified sequence
MWQEAMRRRRYLRDRSEEAAGGGDGLPRSRDWLYESYYCMSQQHPLIVFLLLIVMGSCLALLAVFFALGLEVEDHVAFLITVPTALAIFFAIFILVCIESVFKKLLRLFSLVIWICLVAMGYLFMCFGGTVSPWDQVSFFLFIIFVVYTMLPFNMRDAIIASVLTSSSHTIVLSVCLSATPGGKEHLVWQILANVIIFICGNLAGAYHKHLMELALQQTYQDTCNCIKSRIKLEFEKRQQERLLLSLLPAHIAMEMKAEIIQRLQGPKAGQMENTNNFHNLYVKRHTNVSILYADIVGFTRLASDCSPGELVHMLNELFGKFDQIAKENECMRIKILGDCYYCVSGLPISLPNHAKNCVKMGLDMCEAIKKVRDATGVDINMRVGVHSGNVLCGVIGLQKWQYDVWSHDVTLANHMEAGGVPGRVHISSVTLEHLNGAYKVEEGDGDIRDPYLKQHLVKTYFVINPKGERRSPQHLFRPRHTLDGAKMRASVRMTRYLESWGAAKPFAHLHHRDSMTTENGKISTTDVPMGQHNFQNRTLRTKSQKKRFEEELNERMIQAIDGINAQKQWLKSEDIQRISLLFYNKVLEKEYRATALPAFKYYVTCACLIFFCIFIVQILVLPKTSVLGISFGAAFLLLAFILFVCFAGQLLQCSKKASPLLMWLLKSSGIIANRPWPRISLTIITTAIILMMAVFNMFFLSDSEETIPPTANTTNTSFSASNNQVAILRAQNLFFLPYFIYSCILGLISCSVFLRVNYELKMLIMMVALVGYNTILLHTHAHVLGDYSQVLFERPGIWKDLKTMGSVSLSIFFITLLVLGRQNEYYCRLDFLWKNKFKKEREEIETMENLNRVLLENVLPAHVAEHFLARSLKNEELYHQSYDCVCVMFASIPDFKEFYTESDVNKEGLECLRLLNEIIADFDDLLSKPKFSGVEKIKTIGSTYMAATGLSAVPSQEHSQEPERQYMHIGTMVEFAFALVGKLDAINKHSFNDFKLRVGINHGPVIAGVIGAQKPQYDIWGNTVNVASRMDSTGVLDKIQVTEETSLVLQTLGYTCTCRGIINVKGKGDLKTYFVNTEMSRSLSQSNVAS

SEQ ID NO: 204760 - protein, 203 aa, Artificial Sequence
  derived and/or modified sequence
MENLNRVLLENVLPAHVAEHFLARSLKNEELYHQSYDCVCVMFASIPDFKEFYTESDVNKEGLECLRLLNEIIADFDDLLSKPKFSGVEKIKTIGSTYMAATGLSAVPSQEHSQEPERQYMHIGTMVEFAFALVGKLDAINKHSFNDFKLRVGVTEETSLVLQTLGYTCTCRGIINVKGKGDLKTYFVNTEMSRSLSQSNVAS

SEQ ID NO: 204761 - protein, 911 aa, Artificial Sequence
  derived and/or modified sequence
MDLRWARDLHLREASRSVAFTTLRLGAVTTGLLTFREPGDKEKSGKGLGKRWRIQREESQERLLLSLLPAHIAMEMKAEIIQRLQGPKAGQMENTNNFHNLYVKRHTNVSILYADIVGFTRLASDCSPGELVHMLNELFGKFDQIAKENECMRIKILGDCYYCVSGLPISLPNHAKNCVKMGLDMCEAIKKVRDATGVDINMRVGVHSGNVLCGVIGLQKWQYDVWSHDVTLANHMEAGGVPGRVHISSVTLEHLNGAYKVEEGDGDIRDPYLKQHLVKTYFVINPKGERRSPQHLFRPRHTLDGAKMRASVRMTRYLESWGAAKPFAHLHHRDSMTTENGKISTTDVPMGQHNFQNRTLRTKSQKKRFEEELNERMIQAIDGINAQKQWLKSEDIQRISLLFYNKVLEKEYRATALPAFKYYVTCACLIFFCIFIVQILVLPKTSVLGISFGAAFLLLAFILFVCFAGQLLQCSKKASPLLMWLLKSSGIIANRPWPRISLTIITTAIILMMAVFNMFFLSDSEETIPPTANTTNTSFSASNNQVAILRAQNLFFLPYFIYSCILGLISCSVFLRVNYELKMLIMMVALVGYNTILLHTHAHVLGDYSQVLFERPGIWKDLKTMGSVSLSIFFITLLVLGRQNEYYCRLDFLWKNKFKKEREEIETMENLNRVLLENVLPAHVAEHFLARSLKNEELYHQSYDCVCVMFASIPDFKEFYTESDVNKEGLECLRLLNEIIADFDDLLSKPKFSGVEKIKTIGSTYMAATGLSAVPSQEHSQEPERQYMHIGTMVEFAFALVGKLDAINKHSFNDFKLRVGINHGPVIAGVIGAQKPQYDIWGNTVNVASRMDSTGVLDKIQVTEETSLVLQTLGYTCTCRGIINVKGKGDLKTYFVNTEMSRSLSQSNVAS

SEQ ID NO: 204762 - protein, 924 aa, Artificial Sequence
  derived and/or modified sequence
MLPFNMRDAIIASVLTSSSHTIVLSVCLSATPGGKEHLVWQILANVIIFICGNLAGAYHKHLMELALQQTYQDTCNCIKSRIKLEFEKRQQERLLLSLLPAHIAMEMKAEIIQRLQGPKAGQMENTNNFHNLYVKRHTNVSILYADIVGFTRLASDCSPGELVHMLNELFGKFDQIAKENECMRIKILGDCYYCVSGLPISLPNHAKNCVKMGLDMCEAIKKVRDATGVDINMRVGVHSGNVLCGVIGLQKWQYDVWSHDVTLANHMEAGGVPGRVHISSVTLEHLNGAYKVEEGDGDIRDPYLKQHLVKTYFVINPKGERRSPQHLFRPRHTLDGAKPFAHLHHRDSMTTENGKISTTDVPMGQHNFQNRTLRTKSQKKRFEEELNERMIQAIDGINAQKQWLKSEDIQRISLLFYNKVLEKEYRATALPAFKYYVTCACLIFFCIFIVQILVLPKTSVLGISFGAAFLLLAFILFVCFAGQLLQCSKKASPLLMWLLKSSGIIANRPWPRISLTIITTAIILMMAVFNMFFLSDSEETIPPTANTTNTSFSASNNQVAILRAQNLFFLPYFIYSCILGLISCSVFLRVNYELKMLIMMVALVGYNTILLHTHAHVLGDYSQVLFERPGIWKDLKTMGSVSLSIFFITLLVLGRQNEYYCRLDFLWKNKFKKEREEIETMENLNRVLLENVLPAHVAEHFLARSLKNEELYHQSYDCVCVMFASIPDFKEFYTESDVNKEGLECLRLLNEIIADFDDLLSKPKFSGVEKIKTIGSTYMAATGLSAVPSQEHSQEPERQYMHIGTMVEFAFALVGKLDAINKHSFNDFKLRVGINHGPVIAGVIGAQKPQYDIWGNTVNVASRMDSTGVLDKIQVTEETSLVLQTLGYTCTCRGIINVKGKGDLKTYFVNTEMSRSLSQSNVAS

SEQ ID NO: 204763 - DNA, 87 bp, Artificial Sequence
  derived and/or modified sequence
aaagacaatatacaaatggccaataagcacatgaaaagacgctcaacatccttagtcgttaaggcaatgcaaatcaaaaccacaatg

SEQ ID NO: 204764 - DNA, 101 bp, Artificial Sequence
  derived and/or modified sequence
aaaagaaaagacaaaagacaccaattgccaatactgaaatgaaaaaacaggtaataactattgatcccatggacattaaaatgatgttgaaggaacaccac

SEQ ID NO: 204765 - DNA, 3276 bp, Artificial Sequence
  derived and/or modified sequence
atgtggcaggaggctatgagaagacggagatacctccgcgatcgcagcgaagaagccgccggcggcggcgatggactgccacggagtagagattggctttatgagagctattactgtatgagccagcaacaccctctgattgtttttctgctccttattgtgatggggagctgtctggcactgcttgctgtattttttgcattagggctcgaagtagaagaccatgtcgcattcctgataactgtgccaaccgcgctggccatcttcttcgctatcttcatactggtgtgcattgaatctgtgttcaagaaactgctgcgcctattctctctggtgatatggatctgccttgtagccatgggatatctgttcatgtgcttcggcgggactgtgagcccctgggatcaggtatcttttttcctgttcatcatcttcgtggtctacactatgctaccttttaatatgcgggacgccatcatcgcctcagtgctcacatccagttcacataccatcgtgctgagcgtgtgtctttccgctacgccggggggaaaagagcatctggtgtggcagattctggctaacgttataatattcatttgcggcaatctagctggggcctaccataagcatctgatggagcttgcattgcagcaaacctaccaggatacatgcaattgtattaaaagcaggatcaagctcgaatttgagaagaggcaacaggagaggttactcttgagcctgctcccggctcatatcgcgatggagatgaaagctgagatcatccagcgactacaaggccccaaggctgggcagatggagaacacaaacaacttccacaacttatacgtcaaacggcatacaaacgtgtccatcctgtacgctgacatagtggggttcacaaggctggctagcgactgtagtcctggggaacttgtacatatgttaaacgagctcttcgggaagtttgaccagatcgccaaagagaatgagtgcatgcggattaaaatactgggggactgttattattgcgtgtctgggctcccgatttctcttcccaaccacgcaaagaactgcgtgaagatgggtcttgatatgtgtgaggcaattaagaaagtgagagacgccactggggtcgacatcaatatgcgggtgggcgtgcattccggaaacgtcctgtgcggggtgatcgggctgcagaaatggcaatatgacgtctggtctcatgacgttacactggccaaccacatggaggctggcggggtgccagggcgtgtccatatctcgtccgtaaccctggagcatctaaatggcgcatacaaagtggaggagggagatggtgatataagagacccctacctgaaacagcatttggtgaaaacatattttgtgatcaaccccaaaggcgagcggcgctccccccagcatctcttcagacctagacacaccctggatggcgcaaagatgcgggcctccgtccggatgacccgatatctggagtcttggggcgctgccaaacctttcgcccatttacaccaccgggactctatgacgaccgaaaacggcaaaatttctaccaccgacgtgcccatggggcagcataactttcagaatagaactctgcggacaaaaagtcagaagaagcggttcgaggaagagttgaatgaacgcatgatacaggctatcgatggaattaatgctcaaaaacaatggttaaagtctgaggatatccagagaatttcactcttgttctataacaaggtgctggagaaggaataccgcgccaccgcacttccggcattcaaatactatgtgacctgcgcctgcctcattttcttctgcattttcattgtccaaatccttgtgctaccgaagacctccgtactgggaatttcctttggcgccgcttttctgcttctggcctttatcttgtttgtctgctttgctggtcaacttctgcagtgcagtaaaaaggcctcgcctctgttgatgtggcttctgaaatcctccggcatcattgccaatcgcccttggccacgcatttcactgactatcattactactgcaatcattctgatgatggccgtattcaatatgttcttcctatccgacagcgaagaaaccatacctccgacagctaataccacaaacacaagttttagtgcgtctaataaccaggtcgcaatactgcgagctcagaatctgttttttttaccatatttcatctatagctgcattctgggccttataagctgtagtgtctttctgcgggtgaactatgagctcaaaatgctgataatgatggtcgcactggtgggttataacacaatactgttacatacccatgctcatgtcctcggagactacagtcaggttctgttcgaaaggcccggcatctggaaggacctcaagacaatgggaagcgtttccctgagcattttcttcattacgttgctggtgctgggaaggcaaaacgagtactattgtcgcttggattttctttggaagaataaatttaagaaggagagagaagaaatcgaaaccatggagaatctgaaccgggtgctgctggagaacgttctgccagctcacgttgccgagcactttcttgcacgcagtctgaaaaacgaagagctgtaccatcagtcctacgattgtgtctgcgtgatgttcgctagtattccagattttaaggaattctataccgaaagcgatgtcaataaggaagggttggaatgcttacggttattgaatgaaatcatcgcagacttcgacgatctcttgtcgaagcctaagttcagcggcgttgaaaagatcaagactattggctccacctatatggccgccactgggctgagtgctgtacccagtcaggagcactctcaagagcccgaaagacagtacatgcacataggtacgatggttgaattcgcttttgcgctggtgggcaagttggatgcaattaataaacactcttttaacgacttcaagctgcgcgtggggatcaaccatggcccagtcatagcaggagtgatcggggcccagaaaccacaatacgatatatggggcaacactgttaacgttgcctccagaatggacagtacaggtgtgctagacaagattcaggtcactgaggaaaccagtctagtgctgcagacattgggttacacttgcacgtgccgcgggattatcaacgtgaaaggcaaaggagatctgaagacatattttgtgaacactgagatgagccgttccctgtcacagagcaacgtggcatcttag

SEQ ID NO: 204766 - DNA, 2736 bp, Artificial Sequence
  derived and/or modified sequence
atggacctgcgatgggcaagagatttgcatcttcgtgaagcgagccgttctgtcgcattcacaacactgcgcttgggtgctgtcaccaccggcttgctgacttttcgggagccaggtgacaaagaaaagtcagggaagggactgggcaaacgctggcggatccaacgcgaagaaagccaggaacgcctgctcttgtctctacttcccgcccatatagccatggagatgaaagcagaaataatacagagactgcagggcccaaaagcggggcagatggaaaacacaaataacttccataatctctacgtaaagcgccatacaaatgtcagtattctttatgcagatatcgtcggctttacacgcctggcttccgattgtagcccaggtgagttggtgcatatgctgaacgagcttttcgggaaatttgaccaaatcgccaaggaaaatgaatgtatgcggatcaaaattctcggggattgttattattgtgtgtcgggccttcctatatccctccccaatcacgctaagaactgcgtcaaaatgggcctggatatgtgtgaggctatcaaaaaagtgagagatgccaccggggtggatattaacatgcgcgtgggcgtgcacagcgggaatgtgctgtgtggcgtcatcggactgcagaagtggcaatacgacgtctggtctcacgatgtgactttggctaaccatatggaggccggcggggtcccaggccgggtgcacatcagcagcgttacgctggaacacctgaatggcgcctataaggtggaagagggggatggagacatccgcgacccttacctcaaacagcacctggttaagacttatttcgtaattaatcctaaaggcgaaagacgctcaccccaacatctgtttcgcccacgtcataccttggacggcgctaaaatgcgagcctctgttaggatgacaaggtacctggagtcctggggagccgccaagcccttcgcccatctgcaccatagagactctatgaccacagagaatggtaaaattagcacgaccgacgtccctatggggcagcacaacttccagaaccggactttgaggactaagtcccagaaaaagcggtttgaagaagagctgaacgagcggatgatccaagctattgacggcataaatgcacagaaacaatggctgaaaagtgaggatatccaacgtattagcctgctgttttataataaagtgcttgagaaagagtaccgggctaccgcacttccagcatttaagtactacgtgacctgtgcatgccttatcttcttctgcatctttattgtgcagatccttgttcttcctaaaacaagcgtgctgggtatctcgtttggcgccgcatttctcctgcttgcattcattctgtttgtatgtttcgccggccaactcttgcagtgctccaagaaggcgtctccattgcttatgtggctactaaagagtagcggaattatcgccaaccgcccctggcctcggattagtcttaccatcattacgactgctattattctgatgatggctgtctttaatatgtttttcctctccgattcagaggaaacaataccacctaccgctaatacaacgaacacatcatttagtgcatccaataaccaggtggcaatcctgcgggcacagaacttgttctttctaccttatttcatttattcctgcattctcggcttaattagctgcagcgtgttcctcagagtgaactacgaactgaaaatgcttataatgatggtcgcactagtgggctataataccatcctgctccatacccacgcacacgtcctaggagattatagccaagtgctgttcgaaaggccgggcatttggaaagatctgaagacgatgggctcagtgtccctgagcatattcttcatcaccctcttagtcctgggacggcaaaatgagtactattgtcggctcgactttctctggaagaacaagttcaaaaaggaaagggaggagattgagacaatggaaaacttgaacagagtgctgctggaaaatgtcctccccgcccacgtcgcagagcattttctagcccgatccctgaagaatgaggaattgtaccaccagtcctatgattgcgtgtgcgtcatgttcgcctctatacctgacttcaaggaattctacaccgaatccgatgtcaataaggaggggttagagtgccttcggctcttgaacgagatcatagctgacttcgatgacctgctttccaagcccaaattttctggagtagagaaaatcaaaacaataggaagcacctatatggccgccacaggattatctgccgtgccttcccaagaacactcacaggaaccagaaagacagtatatgcatatcggcaccatggtggagttcgcgtttgccttggtcggtaaattggatgccattaacaagcactccttcaatgactttaagcttcgggtgggcattaatcatggccccgtcattgcaggggttattggcgcccagaaacctcagtacgatatatgggggaatactgtgaacgtggctagccgaatggactcaacgggcgtgctggacaaaatccaggtgactgaggagacttctctggttctgcagacgctgggatacacctgtacttgcagaggaatcatcaacgtgaagggcaagggcgacctcaaaacctacttcgttaacacagagatgagtaggagtctgtcgcagtctaacgttgcttcttag

SEQ ID NO: 204767 - DNA, 2775 bp, Artificial Sequence
  derived and/or modified sequence
atgctgcctttcaacatgcgcgatgctatcatcgcatccgttcttaccagcagctctcacacaatcgtgttgtctgtgtgtctttcagccacacctggagggaaggagcaccttgtgtggcagatcctcgccaatgtgattatattcatctgtggtaatttggcaggcgcgtaccacaagcatctcatggagcttgcactacagcagacatatcaggatacctgcaattgtatcaaaagtcggataaagcttgaatttgagaagaggcagcaagaacggttgctgctcagtctcctccccgcccacattgctatggaaatgaaggccgagatcatccagcggctgcagggccccaaggccggccagatggaaaataccaataattttcataatttgtatgtgaagcgacatactaacgtctctatcctgtatgcagatatagtcggcttcacccgattagcttccgactgctctcccggagagctggtccacatgttgaacgaactctttgggaaattcgatcagatcgccaaggaaaatgagtgcatgcgcattaaaatcctgggggactgttactactgcgtatctgggcttcccattagcctgccaaaccacgcgaagaattgcgtgaagatgggtctggacatgtgcgaagctatcaagaaggtgcgggatgctacaggagttgacattaatatgcgtgtgggagtgcacagcggaaatgtactgtgcggcgtgatagggctccaaaagtggcagtacgatgtgtggagccacgacgtcactcttgccaatcatatggaagcgggcggtgtgccaggtcgcgttcatatctccagtgtcacactagagcacttaaacggtgcatacaaggtcgaggagggcgacggcgatatccgagacccgtatctcaagcagcaccttgtcaagacctactttgtgatcaaccctaaaggggagcgcagatcaccccagcatctcttcagaccacgacatacgcttgatggcgccaagccttttgcacaccttcatcaccgcgacagcatgacaacagaaaacggtaagatttccacgacggatgttcctatgggccagcacaattttcagaaccgaacactgcggactaagtctcaaaaaaaacgcttcgaggaggaattgaatgagaggatgatccaggccattgatgggattaacgcacaaaaacagtggctcaaatctgaggatatacagaggatctcacttcttttctataataaggtactcgagaaagagtatcgcgcaacagctctgccggcgtttaagtactacgtgacatgcgcctgtctgatcttcttttgcatctttatcgtgcaaattctggttctcccaaagacatcagttttagggattagtttcggcgccgcttttctgctgctcgctttcatcctgtttgtgtgcttcgctgggcagctccttcaatgctcaaaaaaagccagtcccttattgatgtggctgcttaagtcaagcggcataatagccaacagaccttggccccggatctctcttaccattatcacaacagctatcatactgatgatggctgtttttaatatgttttttctgtctgactccgaagagaccatccctcccacagctaatacgacgaacacaagtttcagcgcctctaacaatcaggtggccatcctgagagctcagaacctattcttcctcccctacttcatttatagttgcattcttggactcatttcttgtagtgttttcctaagagtgaattatgagctgaaaatgctcattatgatggttgccctggttggatataatactatcctgctacacactcacgcccacgtgctaggggattactcgcaggttcttttcgagagacccggcatatggaaagatctaaagactatgggcagtgtgagtctgtctatcttcttcatcactttgcttgtgttagggagacagaacgagtactattgtagattggatttcctgtggaagaacaaattcaagaaggagagagaggaaatcgagactatggagaacctgaatagagtgcttctggaaaatgtcctcccagcccatgttgccgagcattttctcgctcggtccctcaagaacgaggaactgtatcatcagagctatgactgtgtgtgcgtcatgtttgcttccatccccgacttcaaagagttttataccgagtctgatgtaaataaggaagggctggaatgtctaagattgcttaatgagatcatagccgatttcgacgacttattgtcgaagccgaagttctccggagtggagaaaatcaagacgattgggtccacatatatggcagccaccgggttaagtgccgtgccaagccaggagcattctcaggaacctgagagacagtatatgcacataggaactatggtggaattcgcctttgccttagtaggtaaactagatgccattaataagcattccttcaacgatttcaagctgcgtgtgggaattaatcacgggccagtcatcgcgggggtgatcggggcccagaagcctcagtatgacatttgggggaacaccgtcaatgtggccagcaggatggacagcaccggcgtcctcgacaagattcaggtgaccgaagagacaagtctagtgctgcagacgctcgggtacacctgcacttgcaggggaatcatcaatgtgaaagggaagggcgatctgaaaacatatttcgtgaacacagaaatgagcaggagtctctctcagagtaacgtggctagttag

SEQ ID NO: 204768 - DNA, 6575 bp, Artificial Sequence
  derived and/or modified sequence
aggcggcgcgggggtgggacgcgggcggccgcggcgagcggcgctgcccgggccgggcgcgcacggcgggcgccctgtgagcggccccgatgtggcaggaggcgatgcggcgccgccgctacctgcgggaccgctccgaggaggcggcgggcggcggagacgggctgccgcggtcccgggactggctctacgagtcctactactgcatgagccagcagcacccgctcatcgtcttcctgctgctcatcgtcatgggctcctgcctcgccctgctcgccgtcttcttcgcgctcgggctggaagttgaagaccatgtggcgtttctaataacagttccaactgccctggcgattttctttgcgatatttatcctggtctgcatcgagtctgtgtttaagaagctgctgcgcctcttctcgttggtgatatggatatgccttgttgccatgggatacctgttcatgtgttttggaggcaccgtctctccctgggaccaggtatcgttcttcctcttcatcatcttcgtggtgtacaccatgctgcccttcaacatgcgagacgccatcattgccagcgtcctcacctcctcctcccacaccatcgtgcttagcgtctgcctgtctgcaacaccgggaggcaaggagcacctggtctggcagatcctggccaatgtgatcattttcatctgtgggaacctggcgggagcctaccataagcacctcatggaactcgctcttcagcaaacatatcaggacacctgtaattgcatcaagtcgcggatcaagttggaatttgaaaaacgtcaacaggagcggcttctgctctccctgctgccggcccacatcgccatggagatgaaagcggagatcatccagaggctgcagggccccaaggcgggccagatggagaacacaaataacttccacaacctgtatgtgaagcggcatacaaacgtgagcatcttatacgctgacatcgttggctttacccggctggcaagtgactgctccccgggagaactagtccacatgctgaatgagctctttggaaagtttgatcaaattgcaaaggagaatgaatgcatgagaattaaaattttaggagactgctactactgtgtatctggactccctatatctctccctaaccatgccaagaactgtgtgaaaatggggctggacatgtgtgaagccataaagaaagtgagggatgctactggagttgatatcaacatgcgcgtgggcgtgcattctgggaatgtcctgtgtggcgtgattggtctgcagaagtggcaatatgatgtgtggtcacatgatgtgaccttggccaaccacatggaagctggaggggtccctggacgtgttcacatttcttctgtcaccctggagcacttgaatggcgcttataaagtggaggagggagatggtgacattagggacccatatttaaaacagcacctggtgaaaacctactttgtgatcaaccccaagggagaacgacggagcccccagcatctcttcagacctcgccacacccttgatggagccaaaatgagggcctcggtccgcatgacccggtacttggagtcctggggggcagccaagccctttgcacacctacatcacagggacagcatgaccacagagaacggcaagatcagcaccacggatgtacccatgggtcagcataattttcaaaatcgcaccttaagaaccaagtcacaaaagaagagatttgaagaagaattgaatgaaaggatgattcaagcaattgatgggattaatgcacagaagcaatggctcaagtctgaagacattcagagaatctcactgcttttctataacaaagtactagaaaaagagtaccgggccacggcactgccagcgttcaagtattatgtgacttgtgcctgtctcatattcttctgcatcttcattgtgcagattctcgtgctgccaaaaacgtccgtcctgggcatctcctttggggctgcgtttctcttgctggccttcatcctcttcgtctgctttgctggacagcttctgcaatgcagcaaaaaagcctctcccctgctcatgtggcttttgaagtcctcgggcatcattgccaaccgcccctggccacggatctctctcacgatcatcaccacagccatcatattaatgatggccgtgttcaacatgtttttcctgagtgactcagaggaaacaatccctccaactgccaacacaacaaacacaagcttttcagcctcaaataatcaggtggcgattctgcgtgcgcagaatttatttttcctcccgtactttatctacagctgcattctgggactgatatcctgttccgtgttcctgcgggtaaactatgagctgaagatgttgatcatgatggtggccttggtgggctacaacaccatcctactccacacccacgcccacgtcctgggcgactacagccaggtcttatttgagagaccaggcatttggaaagacctgaagaccatgggctctgtgtctctctctatattcttcatcacactgcttgttctgggtagacagaatgaatattactgtaggttagacttcttatggaagaacaaattcaaaaaagagcgggaggagatagagaccatggagaacctgaaccgcgtgctgctggagaacgtgcttcccgcgcacgtggctgagcacttcctggccaggagcctgaagaatgaggagctataccaccagtcctatgactgcgtctgcgtcatgtttgcctccattccggatttcaaagaattttatacagaatccgacgtgaacaaggagggcttggaatgccttcggctcctgaacgagatcatcgctgactttgatgatcttctttccaagccaaaattcagtggagttgaaaagattaagaccattggcagcacatacatggcagcaacaggtctgagcgctgtgcccagccaggagcactcccaggagcccgagcggcagtacatgcacattggcaccatggtggagtttgcttttgccctggtagggaagctggatgccatcaacaagcactccttcaacgacttcaaattgcgagtgggtattaaccatggacctgtgatagctggtgtgattggagctcagaagccacaatatgatatctggggcaacactgtcaatgtggccagtaggatggacagcaccggagtcctggacaaaatacaggttaccgaggagacgagcctcgtcctgcagaccctcggatacacgtgcacctgtcgaggaataatcaacgtgaaaggaaagggggacctgaagacgtactttgtaaacacagaaatgtcaaggtccctttcccagagcaacgtggcatcctgaagagtcaccttcattttggcaagaagactgtattttcaggaaggtatcacacactttctgactgcaacttctgtcccttgtttttgatgtgcgtgctgtctgtcctatggagcctctgcagactcgttctcgtgacccagtggcataccgtttggtgtctgatgtgtgcccagatcgttctgccacttgcactgtgcttgctcctaagcaaaagggaaaaggagcgcgcgtgatagaagaaaagcactgggagaactaacagaggagaaaggtgaaacacacacacattcttaaggcaataaaactagggggtgtatattatcttctggtgcatgttcttttctggaaaatatggtagctcgccaaccgcatctgctcatctgatattcaaacacacagtattcgtgaataagttgattctgtcccccacgtggactctgtgctcacccattgtctcattgccagtggtgtccaagggcccccgttgggacccacggctctcgtccctctgctccgtgtgtctcatgccagcagcacgtcgccatccgtcaccagaattagtcctcacagcctaggaccagttttgtatcaaactcgtctgatgttttgatgccatttgtcttttgtaaagttaattcattaaaagttttatgtactttgatttacagtgcctgtatcttttattttcctgtcttctttctcctgtggtttgctccagaattaaggtttgttttccatccattctcccttttgacacagttgtttcagaaagagctctccagaagccaatattgagatgtaattcagattaggacacagtgtgtgacgcagataactggttactcagctccctggaaagcaggcaagcatgttgaatgtatctagtggtctgattttaatttgggcatctctagagaacgctttcagggaaaaatactttaatagtaaaaagattctctgcgagcaacagtgccccctccgtccactacgctcctgtctccaagaatgttttgctagagctaacagacatagactgcaaaagaataatttggaatcagctatgcaaatcagtctcacaatagcgtgagctaactgagagaagtactaagacccacaaactgcctgttaagtctgagaaggctaaagaagacacacagccaacgttcatgcatttttaaagacagaaggccttgaagaatttgttcttgtaaatccaacacaagttgtttggtacttttaacataaagaaatcatactttgccaaatagtgaaaagtagagcaatcgtgtataagctaatgtttaaaagcaaaactgcaaattgtagcccagttggtcaaacttgttttctttttataactcatggcaggcatctgtaagaagtagagaacccagatgatctcttaggaagccttttattcgtgggaactcgaacttgaagcacaagttcctggtttgaatcctggctctgattttttactggctgtgtgactttgaacacatctcttagtccctcttaggagtactttccttattggcaacttatggactcgctagtgattaaacgaggcaatgactgtgagcgagcctggcaggtgccccgtggtacattcacagcacgggcacagctgctgtgccaggactgtgactcattcccagtaaaaggcacttatcgaagctgataaccgtccttcatcaccgaagtgtgagtagagcatgacttatttagtattctgcctcaatggggaattttttgatcctgtaatcacaactcagcattggccttaatatacctaaatctccaaaaacagtgattaaagcaagagaattattacaagggcttttctctttcctctaactcattcttcacggatgccgtagcgtttccgtgagctcaaactggccttggtgtaaaatgtgtaaggatgagcagcaggcgtgcctcgtgggttcttcctctgttacatcctgctacactcatccgcaggtcaccttagttcacctaccctgagtgaacacccccagctgggtggtccaccaagttctcataaacagagtccctcccattcccccacggggtgcaccgaacttgggtttgcgctaaaaagaactcaaaaggagaactgtgctctcccaaagccatatcaccagtcttaccaaacaataggcttttaaaagcattgagtcattgtcagaatccactatgggaagctctgtgtgtacctggtcccttctaggtgtggtcccataggagcagccttagcatcccctgtgaacttatcaaaaatgcaaattctcaggccccaacctgaaggaggaccctgaatttgagatccccggggctggggcccagcacaactgctgtttagtgaacaggttctccaggtgattctgatccctgatcaagcttcagacctccctccctccccagtgtttttgcaggtgaggaaacaggggcagagtaattcaggcacatgtgttcagagttccacagttgattagcagttgaggccaggctagaatggaaaactgcctgttccttgaatctgaaagagcattattcctggtcaaagctccttaaagttctgggcagctaaaagcatccctgtgagcaaaaatgccaggcagaaaactggcagtgcacctctcatcagcccaggtcccagtgccattggcttcaagaaaaaaaaaaaatctctccccaatgctctccttaacctttaagtcttacaggaagcctctcatagaaattgcctccagtccagtttcccaaaaaccccagtgttttacatatctgtttaggagtgtctaagttttgtcatcaatccaggatgttattcttccttcccaactcactgtgctcctaaaggcagcaaccattcatctttcctttgctctggatacaccgaatgaccaggtaacatcatcaggccgggtgcagtggctcctataatcccaatattttgggaggccgaggagagaggatcacttaagcccaggagtctgagaccagcctgggcaacatagcaagacccccatctctgcaaaaaaataagaaaattagcttggcatggtggcacgtgcctgtagtcccagctacatgggaggctgaggtgggaggatcacttgagcccaggaagtccagaacgtagtgagccttgattataccactgcactccagcctgggtgacagagcgagactctgtctcag

SEQ ID NO: 204769 - DNA, 5052 bp, Artificial Sequence
  derived and/or modified sequence
ccccgatgtggcaggaggcgatgcggcgccgccgctacctgcgggaccgctccgaggaggcggcgggcggcggagacgggctgccgcggtcccgggactggctctacgagtcctactactgcatgagccagcagcacccgctcatcgtcttcctgctgctcatcgtcatgggctcctgcctcgccctgctcgccgtcttcttcgcgctcgggctggaagttgaagaccatgtggcgtttctaataacagttccaactgccctggcgattttctttgcgatatttatcctggtctgcatcgagtctgtgtttaagaagctgctgcgcctcttctcgttggtgatatggatatgccttgttgccatgggatacctgttcatgtgttttggaggcaccgtctctccctgggaccaggtatcgttcttcctcttcatcatcttcgtggtgtacaccatgctgcccttcaacatgcgagacgccatcattgccagcgtcctcacctcctcctcccacaccatcgtgcttagcgtctgcctgtctgcaacaccgggaggcaaggagcacctggtctggcagatcctggccaatgtgatcattttcatctgtgggaacctggcgggagcctaccataagcacctcatggaactcgctcttcagcaaacatatcaggacacctgtaattgcatcaagtcgcggatcaagttggaatttgaaaaacgtcaacaggagcggcttctgctctccctgctgccggcccacatcgccatggagatgaaagcggagatcatccagaggctgcagggccccaaggcgggccagatggagaacacaaataacttccacaacctgtatgtgaagcggcatacaaacgtgagcatcttatacgctgacatcgttggctttacccggctggcaagtgactgctccccgggagaactagtccacatgctgaatgagctctttggaaagtttgatcaaattgcaaaggagaatgaatgcatgagaattaaaattttaggagactgctactactgtgtatctggactccctatatctctccctaaccatgccaagaactgtgtgaaaatggggctggacatgtgtgaagccataaagaaagtgagggatgctactggagttgatatcaacatgcgcgtgggcgtgcattctgggaatgtcctgtgtggcgtgattggtctgcagaagtggcaatatgatgtgtggtcacatgatgtgaccttggccaaccacatggaagctggaggggtccctggacgtgttcacatttcttctgtcaccctggagcacttgaatggcgcttataaagtggaggagggagatggtgacattagggacccatatttaaaacagcacctggtgaaaacctactttgtgatcaaccccaagggagaacgacggagcccccagcatctcttcagacctcgccacacccttgatggagccaaaatgagggcctcggtccgcatgacccggtacttggagtcctggggggcagccaagccctttgcacacctacatcacagggacagcatgaccacagagaacggcaagatcagcaccacggatgtacccatgggtcagcataattttcaaaatcgcaccttaagaaccaagtcacaaaagaagagatttgaagaagaattgaatgaaaggatgattcaagcaattgatgggattaatgcacagaagcaatggctcaagtctgaagacattcagagaatctcactgcttttctataacaaagtactagaaaaagagtaccgggccacggcactgccagcgttcaagtattatgtgacttgtgcctgtctcatattcttctgcatcttcattgtgcagattctcgtgctgccaaaaacgtccgtcctgggcatctcctttggggctgcgtttctcttgctggccttcatcctcttcgtctgctttgctggacagcttctgcaatgcagcaaaaaagcctctcccctgctcatgtggcttttgaagtcctcgggcatcattgccaaccgcccctggccacggatctctctcacgatcatcaccacagccatcatattaatgatggccgtgttcaacatgtttttcctgagtgactcagaggaaacaatccctccaactgccaacacaacaaacacaagcttttcagcctcaaataatcaggtggcgattctgcgtgcgcagaatttatttttcctcccgtactttatctacagctgcattctgggactgatatcctgttccgtgttcctgcgggtaaactatgagctgaagatgttgatcatgatggtggccttggtgggctacaacaccatcctactccacacccacgcccacgtcctgggcgactacagccaggtcttatttgagagaccaggcatttggaaagacctgaagaccatgggctctgtgtctctctctatattcttcatcacactgcttgttctgggtagacagaatgaatattactgtaggttagacttcttatggaagaacaaattcaaaaaagagcgggaggagatagagaccatggagaacctgaaccgcgtgctgctggagaacgtgcttcccgcgcacgtggctgagcacttcctggccaggagcctgaagaatgaggagctataccaccagtcctatgactgcgtctgcgtcatgtttgcctccattccggatttcaaagaattttatacagaatccgacgtgaacaaggagggcttggaatgccttcggctcctgaacgagatcatcgctgactttgatgatcttctttccaagccaaaattcagtggagttgaaaagattaagaccattggcagcacatacatggcagcaacaggtctgagcgctgtgcccagccaggagcactcccaggagcccgagcggcagtacatgcacattggcaccatggtggagtttgcttttgccctggtagggaagctggatgccatcaacaagcactccttcaacgacttcaaattgcgagtgggagttaccgaggagacgagcctcgtcctgcagaccctcggatacacgtgcacctgtcgaggaataatcaacgtgaaaggaaagggggacctgaagacgtactttgtaaacacagaaatgtcaaggtccctttcccagagcaacgtggcatcctgaagagtcaccttcattttggcaagaagactgtattttcaggaaggtatcacacactttctgactgcaacttctgtcccttgtttttgatgtgcgtgctgtctgtcctatggagcctctgcagactcgttctcgtgacccagtggcataccgtttggtgtctgatgtgtgcccagatcgttctgccacttgcactgtgcttgctcctaagcaaaagggaaaaggagcgcgcgtgatagaagaaaagcactgggagaactaacagaggagaaaggtgaaacacacacacattcttaaggcaataaaactagggggtgtatattatcttctggtgcatgttcttttctggaaaatatggtagctcgccaaccgcatctgctcatctgatattcaaacacacagtattcgtgaataagttgattctgtcccccacgtggactctgtgctcacccattgtctcattgccagtggtgtccaagggcccccgttgggacccacggctctcgtccctctgctccgtgtgtctcatgccagcagcacgtcgccatccgtcaccagaattagtcctcacagcctaggaccagttttgtatcaaactcgtctgatgttttgatgccatttgtcttttgtaaagttaattcattaaaagttttatgtactttgatttacagtgcctgtatcttttattttcctgtcttctttctcctgtggtttgctccagaattaaggtttgttttccatccattctcccttttgacacagttgtttcagaaagagctctccagaagccaatattgagatgtaattcagattaggacacagtgtgtgacgcagataactggttactcagctccctggaaagcaggcaagcatgttgaatgtatctagtggtctgattttaatttgggcatctctagagaacgctttcagggaaaaatactttaatagtaaaaagattctctgcgagcaacagtgccccctccgtccactacgctcctgtctccaagaatgttttgctagagctaacagacatagactgcaaaagaataatttggaatcagctatgcaaatcagtctcacaatagcgtgagctaactgagagaagtactaagacccacaaactgcctgttaagtctgagaaggctaaagaagacacacagccaacgttcatgcatttttaaagacagaaggccttgaagaatttgttcttgtaaatccaacacaagttgtttggtacttttaacataaagaaatcatactttgccaaatagtgaaaagtagagcaatcgtgtataagctaatgtttaaaagcaaaactgcaaattgtagcccagttggtcaaacttgttttctttttataactcatggcaggcatctgtaagaagtagagaacccagatgatctcttaggaagccttttattcgtgggaactcgaacttgaagcacaagttcctggtttgaatcctggctctgattttttactggctgtgtgactttgaacacatctcttagtccctcttaggagtactttccttattggcaacttatggactcgctagtgattaaacgaggcaatgactgtgagcgagcctggcaggtgccccgtggtacattcacagcacgggcacagctgctgtgccaggactgtgactcattcccagtaaaaggcacttatcgaagctgataaccgtccttcatcaccgaagtgtgagtagagcatgacttatttagtattctgcctcaatggggaattttttgatcctgtaatcacaactcagcattggccttaatatacctaaatctccaaaaacagtgattaaagcaagagaattattacaagggcttttctctttcctctaactcattcttcacggatgccgtagcgtttccgtgagct

SEQ ID NO: 204770 - DNA, 2970 bp, Artificial Sequence
  derived and/or modified sequence
gaggagtttggtagaaatcccagaagagctgttgagaagaccagtggagccacacgtctagaggtcatggacctgcgctgggccagagatctgcatttgagagaagccagcagatcagtagcatttaccaccctgaggctgggcgcagtcaccacgggactcctgacattcagagagccaggagataaagagaagtcaggaaagggccttgggaagagatggcgcatccagcgagaggaaagccaggagcggcttctgctctccctgctgccggcccacatcgccatggagatgaaagcggagatcatccagaggctgcagggccccaaggcgggccagatggagaacacaaataacttccacaacctgtatgtgaagcggcatacaaacgtgagcatcttatacgctgacatcgttggctttacccggctggcaagtgactgctccccgggagaactagtccacatgctgaatgagctctttggaaagtttgatcaaattgcaaaggagaatgaatgcatgagaattaaaattttaggagactgctactactgtgtatctggactccctatatctctccctaaccatgccaagaactgtgtgaaaatggggctggacatgtgtgaagccataaagaaagtgagggatgctactggagttgatatcaacatgcgcgtgggcgtgcattctgggaatgtcctgtgtggcgtgattggtctgcagaagtggcaatatgatgtgtggtcacatgatgtgaccttggccaaccacatggaagctggaggggtccctggacgtgttcacatttcttctgtcaccctggagcacttgaatggcgcttataaagtggaggagggagatggtgacattagggacccatatttaaaacagcacctggtgaaaacctactttgtgatcaaccccaagggagaacgacggagcccccagcatctcttcagacctcgccacacccttgatggagccaaaatgagggcctcggtccgcatgacccggtacttggagtcctggggggcagccaagccctttgcacacctacatcacagggacagcatgaccacagagaacggcaagatcagcaccacggatgtacccatgggtcagcataattttcaaaatcgcaccttaagaaccaagtcacaaaagaagagatttgaagaagaattgaatgaaaggatgattcaagcaattgatgggattaatgcacagaagcaatggctcaagtctgaagacattcagagaatctcactgcttttctataacaaagtactagaaaaagagtaccgggccacggcactgccagcgttcaagtattatgtgacttgtgcctgtctcatattcttctgcatcttcattgtgcagattctcgtgctgccaaaaacgtccgtcctgggcatctcctttggggctgcgtttctcttgctggccttcatcctcttcgtctgctttgctggacagcttctgcaatgcagcaaaaaagcctctcccctgctcatgtggcttttgaagtcctcgggcatcattgccaaccgcccctggccacggatctctctcacgatcatcaccacagccatcatattaatgatggccgtgttcaacatgtttttcctgagtgactcagaggaaacaatccctccaactgccaacacaacaaacacaagcttttcagcctcaaataatcaggtggcgattctgcgtgcgcagaatttatttttcctcccgtactttatctacagctgcattctgggactgatatcctgttccgtgttcctgcgggtaaactatgagctgaagatgttgatcatgatggtggccttggtgggctacaacaccatcctactccacacccacgcccacgtcctgggcgactacagccaggtcttatttgagagaccaggcatttggaaagacctgaagaccatgggctctgtgtctctctctatattcttcatcacactgcttgttctgggtagacagaatgaatattactgtaggttagacttcttatggaagaacaaattcaaaaaagagcgggaggagatagagaccatggagaacctgaaccgcgtgctgctggagaacgtgcttcccgcgcacgtggctgagcacttcctggccaggagcctgaagaatgaggagctataccaccagtcctatgactgcgtctgcgtcatgtttgcctccattccggatttcaaagaattttatacagaatccgacgtgaacaaggagggcttggaatgccttcggctcctgaacgagatcatcgctgactttgatgatcttctttccaagccaaaattcagtggagttgaaaagattaagaccattggcagcacatacatggcagcaacaggtctgagcgctgtgcccagccaggagcactcccaggagcccgagcggcagtacatgcacattggcaccatggtggagtttgcttttgccctggtagggaagctggatgccatcaacaagcactccttcaacgacttcaaattgcgagtgggtattaaccatggacctgtgatagctggtgtgattggagctcagaagccacaatatgatatctggggcaacactgtcaatgtggccagtaggatggacagcaccggagtcctggacaaaatacaggttaccgaggagacgagcctcgtcctgcagaccctcggatacacgtgcacctgtcgaggaataatcaacgtgaaaggaaagggggacctgaagacgtactttgtaaacacagaaatgtcaaggtccctttcccagagcaacgtggcatcctgaagagtcaccttcattttggcaagaagactgtattttcaggaaggtatcacacactttctgactgcaacttctgtcccttgtttttgatgtgcgtgctgtctgtcctatggagcctctgcagactcgttctcgtgacccagtggcataccgtttggtgtctgatgtgtg

SEQ ID NO: 204771 - DNA, 3532 bp, Artificial Sequence
  derived and/or modified sequence
aggctcttagaaaccagaatatttggtgactcttattgttcttcttctctgcccgtaggtatcgttcttcctcttcatcatcttcgtggtgtacaccatgctgcccttcaacatgcgagacgccatcattgccagcgtcctcacctcctcctcccacaccatcgtgcttagcgtctgcctgtctgcaacaccgggaggcaaggagcacctggtctggcagatcctggccaatgtgatcattttcatctgtgggaacctggcgggagcctaccataagcacctcatggaactcgctcttcagcaaacatatcaggacacctgtaattgcatcaagtcgcggatcaagttggaatttgaaaaacgtcaacaggagcggcttctgctctccctgctgccggcccacatcgccatggagatgaaagcggagatcatccagaggctgcagggccccaaggcgggccagatggagaacacaaataacttccacaacctgtatgtgaagcggcatacaaacgtgagcatcttatacgctgacatcgttggctttacccggctggcaagtgactgctccccgggagaactagtccacatgctgaatgagctctttggaaagtttgatcaaattgcaaaggagaatgaatgcatgagaattaaaattttaggagactgctactactgtgtatctggactccctatatctctccctaaccatgccaagaactgtgtgaaaatggggctggacatgtgtgaagccataaagaaagtgagggatgctactggagttgatatcaacatgcgcgtgggcgtgcattctgggaatgtcctgtgtggcgtgattggtctgcagaagtggcaatatgatgtgtggtcacatgatgtgaccttggccaaccacatggaagctggaggggtccctggacgtgttcacatttcttctgtcaccctggagcacttgaatggcgcttataaagtggaggagggagatggtgacattagggacccatatttaaaacagcacctggtgaaaacctactttgtgatcaaccccaagggagaacgacggagcccccagcatctcttcagacctcgccacacccttgatggagccaagccctttgcacacctacatcacagggacagcatgaccacagagaacggcaagatcagcaccacggatgtacccatgggtcagcataattttcaaaatcgcaccttaagaaccaagtcacaaaagaagagatttgaagaagaattgaatgaaaggatgattcaagcaattgatgggattaatgcacagaagcaatggctcaagtctgaagacattcagagaatctcactgcttttctataacaaagtactagaaaaagagtaccgggccacggcactgccagcgttcaagtattatgtgacttgtgcctgtctcatattcttctgcatcttcattgtgcagattctcgtgctgccaaaaacgtccgtcctgggcatctcctttggggctgcgtttctcttgctggccttcatcctcttcgtctgctttgctggacagcttctgcaatgcagcaaaaaagcctctcccctgctcatgtggcttttgaagtcctcgggcatcattgccaaccgcccctggccacggatctctctcacgatcatcaccacagccatcatattaatgatggccgtgttcaacatgtttttcctgagtgactcagaggaaacaatccctccaactgccaacacaacaaacacaagcttttcagcctcaaataatcaggtggcgattctgcgtgcgcagaatttatttttcctcccgtactttatctacagctgcattctgggactgatatcctgttccgtgttcctgcgggtaaactatgagctgaagatgttgatcatgatggtggccttggtgggctacaacaccatcctactccacacccacgcccacgtcctgggcgactacagccaggtcttatttgagagaccaggcatttggaaagacctgaagaccatgggctctgtgtctctctctatattcttcatcacactgcttgttctgggtagacagaatgaatattactgtaggttagacttcttatggaagaacaaattcaaaaaagagcgggaggagatagagaccatggagaacctgaaccgcgtgctgctggagaacgtgcttcccgcgcacgtggctgagcacttcctggccaggagcctgaagaatgaggagctataccaccagtcctatgactgcgtctgcgtcatgtttgcctccattccggatttcaaagaattttatacagaatccgacgtgaacaaggagggcttggaatgccttcggctcctgaacgagatcatcgctgactttgatgatcttctttccaagccaaaattcagtggagttgaaaagattaagaccattggcagcacatacatggcagcaacaggtctgagcgctgtgcccagccaggagcactcccaggagcccgagcggcagtacatgcacattggcaccatggtggagtttgcttttgccctggtagggaagctggatgccatcaacaagcactccttcaacgacttcaaattgcgagtgggtattaaccatggacctgtgatagctggtgtgattggagctcagaagccacaatatgatatctggggcaacactgtcaatgtggccagtaggatggacagcaccggagtcctggacaaaatacaggttaccgaggagacgagcctcgtcctgcagaccctcggatacacgtgcacctgtcgaggaataatcaacgtgaaaggaaagggggacctgaagacgtactttgtaaacacagaaatgtcaaggtccctttcccagagcaacgtggcatcctgaagagtcaccttcattttggcaagaagactgtattttcaggaaggtatcacacactttctgactgcaacttctgtcccttgtttttgatgtgcgtgctgtctgtcctatggagcctctgcagactcgttctcgtgacccagtggcataccgtttggtgtctgatgtgtgcccagatcgttctgccacttgcactgtgcttgctcctaagcaaaagggaaaaggagcgcgcgtgatagaagaaaagcactgggagaactaacagaggagaaaggtgaaacacacacacattcttaaggcaataaaactagggggtgtatattatcttctggtgcatgttcttttctggaaaatatggtagctcgccaaccgcatctgctcatctgatattcaaacacacagtattcgtgaataagttgattctgtcccccacgtggactctgtgctcacccattgtctcattgccagtggtgtccaagggcccccgttgggacccacggctctcgtccctctgctccgtgtgtctcatgccagcagcacgtcgccatccgtcaccagaattagtcctcacagcctaggaccagttttgtatcaaactcgtctgatgttttgatgccatttgtcttttgtaaagttaattcattaaaagttttatgtactttg

SEQ ID NO: 204772 - DNA, 3276 bp, Artificial Sequence
  derived and/or modified sequence
atgtggcaggaggccatgagaagaagacgctacctgcgggacagaagtgaggaggccgccggcggcggagatggcctgcccaggagccgggactggctgtatgagagctactactgcatgagccagcagcaccccctgattgtgttcctgctgctgattgtgatgggcagctgcctggccctgctggccgtgttctttgccctgggcctggaggtggaggaccacgtggccttcctgatcaccgtgcccacagccctggccatcttctttgccatcttcatcctggtgtgcatcgagagcgtcttcaagaagctgctgcggctcttcagcctggtgatctggatctgcctggtggccatgggctacctgttcatgtgctttggaggcaccgtgagcccctgggaccaggtgtccttcttcctgttcatcatctttgtggtgtacaccatgctgcccttcaacatgagagatgccatcatcgcctctgtgctgaccagcagcagccacaccatcgtgctgtctgtgtgcctgagcgccaccccaggcggcaaggagcacctggtgtggcagatcctggccaacgtcatcatcttcatctgtggcaacctggccggggcctaccacaagcacctgatggagctggccctgcagcagacctaccaggacacctgcaactgcatcaagagccgcatcaagctggagtttgagaagaggcagcaggagcggctgctgctgagcctgctgcctgcccacatcgccatggagatgaaggccgagatcatccagaggctgcagggccccaaggccggccagatggagaacaccaacaacttccacaacctgtatgtgaagaggcacaccaacgtgtccatcctgtatgctgacatcgtgggcttcacccggctggccagtgactgcagccctggagagctggtgcacatgctgaatgagctgtttgggaagtttgaccagatcgccaaggaaaatgaatgcatgaggatcaagatcctgggggactgctactactgtgtgtctggcctgcccatcagcctgcccaaccacgccaagaactgtgtgaagatgggcctggacatgtgtgaggccatcaagaaggtgagagatgccaccggggtggacatcaacatgagggtgggcgtgcacagcggaaatgtgctgtgtggggtcatcggcctgcagaagtggcagtatgatgtgtggagccatgatgtgaccctggccaaccacatggaggccggcggcgtgcccggccgggtgcacatcagctctgtgaccctggagcacctgaatggagcctacaaggtggaggagggagatggagacatccgggacccctacctgaagcagcacctggtgaagacctacttcgtcatcaaccccaagggggagcggcgcagcccccagcacctgttccggcccaggcacaccctggatggagccaagatgagggcctctgtgaggatgacccgctacctggagagctggggcgccgccaagccctttgcccacctgcaccaccgggacagcatgaccacagaaaatggcaagatcagcaccacagatgtgcccatgggccagcacaacttccagaacagaaccctgcggaccaagagccagaagaagagatttgaggaggagctgaatgaaagaatgatccaggccattgatggcatcaatgcccagaagcagtggctgaagtctgaggacatccagaggatcagcctgctcttctacaacaaggtgctggagaaggagtaccgggccacagccctgcctgccttcaagtactacgtgacctgtgcctgcctgatcttcttctgcatcttcatcgtgcagatcctggtgctgcccaagacctctgtgctgggcatcagctttggagctgccttcctgctgctggccttcatcctgtttgtgtgctttgctggccagctgctgcagtgcagcaagaaggccagccccctgctgatgtggctgctgaagagcagcggcatcatcgccaaccggccctggccccgcatcagcctgaccatcatcaccacagccatcatcctgatgatggctgtgttcaacatgttcttcctgagtgacagcgaggagaccatccccccaacagccaacaccaccaacaccagcttcagcgccagcaacaaccaggtggccatcctgcgggcccagaacctcttcttcctgccctacttcatctacagctgcatcctgggcctcatcagctgcagcgtcttcctgcgggtgaactatgagctgaagatgctgatcatgatggtggccctggtgggctacaacaccatcctgctgcacacccacgcccacgtgctgggggactacagccaggtgctgtttgagcggcccggcatctggaaggacctgaagaccatgggctctgtgtccctgagcatcttcttcatcaccctgctggtgctgggccggcagaatgagtactactgccgcctggacttcctgtggaagaacaagttcaagaaggagcgggaggagattgagaccatggagaacctgaacagagtgctgctggagaatgtgctgcctgcccacgtggccgagcacttcctggcccggagcctgaagaatgaggagctgtaccaccagagctatgactgtgtgtgtgtgatgtttgccagcatcccagacttcaaggagttctacacagaaagtgatgtgaacaaggagggcctggagtgcctgcggctgctgaatgagatcatcgctgactttgatgacctgctgagcaagcccaagttctctggagtggagaagatcaagaccatcggcagcacctacatggccgccaccggcctgtctgctgtgcccagccaggagcacagccaggagcctgagcggcagtacatgcacatcggcaccatggtggagtttgcctttgccctggtgggcaagctggatgccatcaacaagcacagcttcaatgacttcaagctgcgggtgggcatcaaccacggccctgtgattgctggggtgattggagcccagaagccccagtatgacatctggggcaacacagtgaatgtggccagcaggatggacagcactggagtgctggacaagatccaggtgacagaggagaccagcctggtgctgcagaccctgggctacacctgcacctgccggggcatcatcaacgtgaagggcaagggggacctgaagacctactttgtgaacacagagatgagccgcagcctgagccagagcaatgtggccagctag

SEQ ID NO: 204773 - DNA, 2736 bp, Artificial Sequence
  derived and/or modified sequence
atggacctgcgctgggcccgggacctgcacctgcgggaggccagccgctctgtggccttcaccaccctgcggctgggcgctgtgaccaccggcctgctgaccttccgggagcccggggacaaggagaagagcggcaagggcctgggcaagcgctggaggatccagcgggaggagagccaggagcggctgctgctgagcctgctgcctgcccacatcgccatggagatgaaggccgagatcatccagaggctgcagggccccaaggccggccagatggagaacaccaacaacttccacaacctgtatgtgaagaggcacaccaacgtgtccatcctgtatgctgacatcgtgggcttcacccggctggccagtgactgcagccctggagagctggtgcacatgctgaatgagctgtttgggaagtttgaccagatcgccaaggaaaatgaatgcatgaggatcaagatcctgggggactgctactactgtgtgtctggcctgcccatcagcctgcccaaccacgccaagaactgtgtgaagatgggcctggacatgtgtgaggccatcaagaaggtgagagatgccaccggggtggacatcaacatgagggtgggcgtgcacagcggaaatgtgctgtgtggggtcatcggcctgcagaagtggcagtatgatgtgtggagccatgatgtgaccctggccaaccacatggaggccggcggcgtgcccggccgggtgcacatcagctctgtgaccctggagcacctgaatggagcctacaaggtggaggagggagatggagacatccgggacccctacctgaagcagcacctggtgaagacctacttcgtcatcaaccccaagggggagcggcgcagcccccagcacctgttccggcccaggcacaccctggatggagccaagatgagggcctctgtgaggatgacccgctacctggagagctggggcgccgccaagccctttgcccacctgcaccaccgggacagcatgaccacagaaaatggcaagatcagcaccacagatgtgcccatgggccagcacaacttccagaacagaaccctgcggaccaagagccagaagaagagatttgaggaggagctgaatgaaagaatgatccaggccattgatggcatcaatgcccagaagcagtggctgaagtctgaggacatccagaggatcagcctgctcttctacaacaaggtgctggagaaggagtaccgggccacagccctgcctgccttcaagtactacgtgacctgtgcctgcctgatcttcttctgcatcttcatcgtgcagatcctggtgctgcccaagacctctgtgctgggcatcagctttggagctgccttcctgctgctggccttcatcctgtttgtgtgctttgctggccagctgctgcagtgcagcaagaaggccagccccctgctgatgtggctgctgaagagcagcggcatcatcgccaaccggccctggccccgcatcagcctgaccatcatcaccacagccatcatcctgatgatggctgtgttcaacatgttcttcctgagtgacagcgaggagaccatccccccaacagccaacaccaccaacaccagcttcagcgccagcaacaaccaggtggccatcctgcgggcccagaacctcttcttcctgccctacttcatctacagctgcatcctgggcctcatcagctgcagcgtcttcctgcgggtgaactatgagctgaagatgctgatcatgatggtggccctggtgggctacaacaccatcctgctgcacacccacgcccacgtgctgggggactacagccaggtgctgtttgagcggcccggcatctggaaggacctgaagaccatgggctctgtgtccctgagcatcttcttcatcaccctgctggtgctgggccggcagaatgagtactactgccgcctggacttcctgtggaagaacaagttcaagaaggagcgggaggagattgagaccatggagaacctgaacagagtgctgctggagaatgtgctgcctgcccacgtggccgagcacttcctggcccggagcctgaagaatgaggagctgtaccaccagagctatgactgtgtgtgtgtgatgtttgccagcatcccagacttcaaggagttctacacagaaagtgatgtgaacaaggagggcctggagtgcctgcggctgctgaatgagatcatcgctgactttgatgacctgctgagcaagcccaagttctctggagtggagaagatcaagaccatcggcagcacctacatggccgccaccggcctgtctgctgtgcccagccaggagcacagccaggagcctgagcggcagtacatgcacatcggcaccatggtggagtttgcctttgccctggtgggcaagctggatgccatcaacaagcacagcttcaatgacttcaagctgcgggtgggcatcaaccacggccctgtgattgctggggtgattggagcccagaagccccagtatgacatctggggcaacacagtgaatgtggccagcaggatggacagcactggagtgctggacaagatccaggtgacagaggagaccagcctggtgctgcagaccctgggctacacctgcacctgccggggcatcatcaacgtgaagggcaagggggacctgaagacctactttgtgaacacagagatgagccgcagcctgagccagagcaatgtggccagctag

SEQ ID NO: 204774 - DNA, 2775 bp, Artificial Sequence
  derived and/or modified sequence
atgctgcccttcaacatgagagatgccatcatcgcctctgtgctgaccagcagcagccacaccatcgtgctgtctgtgtgcctgagcgccacccctgggggcaaggagcacctggtgtggcagatcctggccaacgtcatcatcttcatctgtggcaacctggccggggcctaccacaagcacctgatggagctggccctgcagcagacctaccaggacacctgcaactgcatcaagagccgcatcaagctggagtttgagaagaggcagcaggagcggctgctgctgagcctgctgcctgcccacatcgccatggagatgaaggccgagatcatccagaggctgcagggccccaaggccggccagatggagaacaccaacaacttccacaacctgtatgtgaagaggcacaccaacgtgtccatcctgtatgctgacatcgtgggcttcacccggctggccagtgactgcagccctggagagctggtgcacatgctgaatgagctgtttgggaagtttgaccagatcgccaaggaaaatgaatgcatgaggatcaagatcctgggggactgctactactgtgtgtctggcctgcccatcagcctgcccaaccacgccaagaactgtgtgaagatgggcctggacatgtgtgaggccatcaagaaggtgagagatgccactggagtggacatcaacatgagggtgggcgtgcacagcggaaatgtgctgtgtggggtgattggcctgcagaagtggcagtatgatgtgtggagccatgatgtgaccctggccaaccacatggaggccggcggcgtgcccggccgggtgcacatcagctctgtgaccctggagcacctgaatggagcctacaaggtggaggagggagatggagacatccgggacccctacctgaagcagcacctggtgaagacctactttgtgatcaaccccaagggggagaggaggagcccccagcacctgttccggcccaggcacaccctggatggagccaagccctttgcccacctgcaccaccgggacagcatgaccacagaaaatggcaagatcagcaccacagatgtgcccatgggccagcacaacttccagaacagaaccctgcggaccaagagccagaagaagagatttgaggaggagctgaatgaaagaatgatccaggccattgatggcatcaatgcccagaagcagtggctgaagtctgaggacatccagaggatcagcctgctcttctacaacaaggtgctggagaaggagtaccgggccacagccctgcctgccttcaagtactacgtgacctgtgcctgcctgatcttcttctgcatcttcatcgtgcagatcctggtgctgcccaagacctctgtgctgggcatcagctttggagctgccttcctgctgctggccttcatcctgtttgtgtgctttgctggccagctgctgcagtgcagcaagaaggccagccccctgctgatgtggctgctgaagagcagcggcatcatcgccaaccggccctggccccgcatcagcctgaccatcatcaccacagccatcatcctgatgatggctgtgttcaacatgttcttcctgagtgacagcgaggagaccatccccccaacagccaacaccaccaacaccagcttcagcgccagcaacaaccaggtggccatcctgcgggcccagaacctcttcttcctgccctacttcatctacagctgcatcctgggcctcatcagctgcagcgtcttcctgcgggtgaactatgagctgaagatgctgatcatgatggtggccctggtgggctacaacaccatcctgctgcacacccacgcccacgtgctgggggactacagccaggtgctgtttgagaggcctggcatctggaaggacctgaagaccatgggctctgtgtccctgagcatcttcttcatcaccctgctggtgctgggccggcagaatgagtactactgccgcctggacttcctgtggaagaacaagttcaagaaggagcgggaggagattgagaccatggagaacctgaacagagtgctgctggagaatgtgctgcctgcccacgtggccgagcacttcctggcccggagcctgaagaatgaggagctgtaccaccagagctatgactgtgtgtgtgtgatgtttgccagcatcccagacttcaaggagttctacacagaaagtgatgtgaacaaggagggcctggagtgcctgcggctgctgaatgagatcatcgctgactttgatgacctgctgagcaagcccaagttcagcggcgtggagaagatcaagaccatcggcagcacctacatggccgccaccggcctgtctgctgtgcccagccaggagcacagccaggagcctgagcggcagtacatgcacatcggcaccatggtggagtttgcctttgccctggtgggcaagctggatgccatcaacaagcacagcttcaatgacttcaagctgcgggtgggcatcaaccacggccctgtgattgctggggtcatcggggcccagaagccccagtatgacatctggggcaacacagtgaatgtggccagcaggatggacagcactggagtgctggacaagatccaggtgacagaggagaccagcctggtgctgcagaccctgggctacacctgcacctgccggggcatcatcaacgtgaagggcaaaggagacctgaagacctactttgtgaacacagagatgagccgcagcctgagccagagcaatgtggccagctag

SEQ ID NO: 204775 - DNA, 3276 bp, Artificial Sequence
  derived and/or modified sequence
atgtggcaggaggccatgcggcggcggcggtacctgcgggaccggagcgaagaggccgctggcggtggagacggacttcccagatctagagattggctgtacgagagttactattgcatgagccaacagcatccactgattgtcttcttgctcctcattgtgatgggcagttgcctggctctactcgctgtgtttttcgccctggggctggaagtggaagaccatgtagctttcctaatcaccgttcctactgccctcgcaatattctttgcaatcttcatcctcgtctgcattgagagcgtgtttaaaaaacttctgagattgttctctctcgtcatctggatatgcctcgttgccatggggtacctcttcatgtgcttcggcgggacggtgagcccttgggaccaggtgtcctttttcttgtttattatcttcgtcgtgtatactatgctgcccttcaacatgcgagatgccattattgcatcagttctgacttcctctagccataccatcgtgctcagcgtctgtctgtccgctacacccggtggcaaagagcatctagtgtggcagatcctggcaaatgttattattttcatttgcggcaatctggccggagcctatcacaaacacctgatggagttggcccttcaacagacatatcaggacacctgcaattgtatcaagagtagaataaagctggagttcgaaaaacggcagcaagagcgattattgttatctttactccccgcacacatagcaatggaaatgaaggccgagatcatccagcgactgcagggtcctaaagccggacagatggagaatacgaataacttccataatctatatgtgaaacgccataccaacgtgtctatcctctacgccgatatcgtcggattcacccggctggcttcggactgttctccaggagagctggtgcacatgctgaacgagctgttcggcaagttcgaccagatagcaaaggaaaacgagtgtatgcgcataaagattttgggagactgttactactgtgtgtccgggctgcccatctctctaccaaaccacgctaagaactgcgtgaaaatgggactggacatgtgtgaagctataaagaaggtacgggacgccacgggagtggatatcaatatgcgcgtaggcgttcattccggaaatgtgttatgtggggtcatcggtcttcagaaatggcagtatgatgtttggagccatgatgtgactctcgccaatcacatggaggccggcggggtgcctggacgggtgcatattagctccgtgactctggagcacctcaacggagcctacaaagtagaagaaggcgatggagacatccgcgacccttacctcaagcagcacctggtgaagacctactttgtgattaacccgaagggggagcgcagatctccccaacatctgttccgtccgaggcacaccctggacggcgcaaagatgcgcgcatcggtcagaatgacacgatatctggagtcctggggcgccgcaaagcccttcgcccacctacaccatcgagattcgatgacaaccgagaacggcaaaattagtacgacagatgtacctatgggtcagcataacttccagaaccggacacttcggacaaaatctcaaaagaagagattcgaggaggagctgaatgagcgcatgatccaagcaatcgacggtatcaatgctcagaagcagtggcttaagtctgaagatattcaaagaataagcttgctattttacaataaggtgctggagaaggagtatagagccactgctcttcccgcttttaagtactacgtgacttgtgcatgcttaatattcttctgcatcttcattgtccagatactggtgctgcccaagacttccgtcctgggaatcagcttcggagccgcctttctcttactcgctttcatcctcttcgtctgctttgctggccaactactacagtgtagtaaaaaagctagccccctcctcatgtggctgcttaaaagttccggaatcatcgccaaccggccctggccacggatctctttaacgattattacaaccgcgatcatcctgatgatggccgtttttaatatgttctttttgagtgactccgaggaaaccatccccccaacagcaaatactaccaatacctctttcagtgcctccaataatcaggttgccatcctccgggctcaaaatctgttctttctgccttacttcatatatagctgtattctgggcctgatttcatgtagcgttttcctccgggtaaactatgaacttaagatgctcatcatgatggtggcactggtcggctataacacaatcctcttacatacacacgcccatgtgctgggggattattcccaagtcctgtttgaaaggcctggcatctggaaagacctgaaaacaatgggcagcgtgagcctgagcattttttttatcacgttacttgtgctgggccgccagaacgagtactattgtcgcctcgacttcctatggaaaaataagtttaaaaaggagcgcgaggagattgaaaccatggaaaatctgaatcgagttctattggaaaatgtgctccccgctcatgttgccgagcacttcttggccaggtctctgaagaacgaggaactgtaccatcagtcatacgattgtgtgtgcgtgatgttcgcatcaatccctgattttaaggaattctacaccgagagcgacgtgaacaaggaaggtcttgagtgcctgagactcctgaatgaaatcatcgccgattttgatgacctcctgtctaagcccaaattctccggcgttgaaaaaatcaagactattgggagcacttatatggctgccactggcctgtccgcggtcccctctcaggaacactctcaggagcccgagagacagtatatgcatatcggaacaatggtcgagttcgcgttcgccctcgtcggcaaactggatgctattaacaagcattcctttaatgactttaagctcagagtcggaataaaccatgggcccgtcattgcaggtgtaatcggcgcccagaagccccagtatgatatctggggcaataccgtgaatgttgcctcccgcatggacagcacaggcgtactggacaagattcaggtcacggaagagacaagtctggtactgcagacactaggctatacttgcacatgccgcggcattattaatgttaagggaaaaggtgaccttaagacttatttcgttaatactgaaatgagtcgcagcctgagccaatcaaacgtggcaagttag

SEQ ID NO: 204776 - DNA, 2736 bp, Artificial Sequence
  derived and/or modified sequence
atggacctgcggtgggcccgggacctgcacctgcgggaggccagcagatccgttgccttcaccactctgcggttgggcgcagtgactaccgggctactaacctttagagaaccaggcgataaggaaaagagtgggaaaggtctaggaaagcggtggcgaatccaaagagaagaaagccaggaacggctgcttctaagcctactgcctgcgcacattgccatggagatgaaagcggaaattatacaacggttacagggacccaaggccggtcaaatggaaaatactaataattttcataacctgtacgttaaaaggcacactaacgtgtcaatcttatatgccgatatcgtcgggtttacccgcctggcgagcgattgttccccaggcgagctcgtgcacatgctgaacgagcttttcggcaagtttgaccaaattgcgaaggagaatgaatgcatgagaattaaaatactcggtgattgctattattgcgtcagcggactgcctattagccttcctaatcacgccaaaaactgcgttaagatggggctggacatgtgcgaagccatcaagaaggtgcgggatgctacgggcgttgatatcaatatgcgcgttggggtacactcggggaacgtcctttgtggtgtgatcgggctacagaagtggcagtatgatgtttggtcccatgacgtcaccctggcaaatcatatggaagctggtggggtgcctggacgcgtacacattagcagcgtcaccctggaacacctgaatggagcttataaagtcgaggaaggagatggagacatccgagatccatacctcaaacagcacctggtgaagacctattttgtcattaatccgaaaggagaacgaaggtcgcctcagcatttatttagacctcgacataccctcgatggggctaaaatgcgggccagtgtccgaatgaccaggtacctcgagtcttggggcgcagcaaaaccattcgctcacctacatcaccgggatagcatgactacggaaaatgggaagatctcgaccactgacgtgcctatgggccagcacaattttcagaaccgtactttgcggaccaagagccaaaagaagaggttcgaggaagagctaaacgagaggatgatccaagccatcgatggaataaacgcccaaaaacagtggctcaaatcagaggacattcagcggatctctctgctgttttacaataaggtcctggagaaggaataccgcgcaacagcactccccgcttttaagtactacgttacttgtgcctgccttatctttttttgtatcttcatcgtgcaaatcctagtgctgcctaagacttccgtgttaggcatttcctttggcgcagcttttttactccttgcctttatcctctttgtatgcttcgccgggcagcttcttcagtgctcgaaaaaggcctcccctttgctcatgtggttgcttaaatccagcggcattattgccaatcgtccttggccaagaatttcattgactataataactacagctatcatcctgatgatggcagtgtttaacatgttttttctgtcagacagtgaagaaacaatcccacctaccgctaatactaccaacacgtcgttctccgccagtaataatcaggtggcaattcttcgagctcagaacctctttttcctgccttattttatttatagttgtattctcgggcttatatcttgtagtgtcttcctgcgggtcaattacgaattgaaaatgctgattatgatggtcgctctggttgggtataacacaatcctattgcacacccacgcccacgtacttggcgactactctcaggttctatttgaacgtcccggtatctggaaggatctcaaaacaatgggttcggtctccctgagtatctttttcattaccttgctcgtgctaggccgccagaacgagtattactgtcgccttgatttcctttggaagaataagttcaagaaggagcgggaggagatcgaaactatggaaaaccttaatagggtgctgctggaaaacgtgcttccagcacacgttgctgagcattttctggctagaagcctgaaaaacgaggaactctaccatcagtcttatgattgcgtgtgtgtgatgttcgcatctatcccagattttaaggaattttacaccgaaagtgatgtcaataaggagggcctggagtgtttaagactgctcaatgaaatcatcgctgatttcgacgacctcctgagcaaacccaagttcagcggggtcgagaagatcaaaaccattggatcaacctacatggcggcaactggactctccgcagtaccgtcacaagagcattcccaagagcctgagcgacaatatatgcatatcggcaccatggtagaattcgccttcgcactggttgggaagcttgacgccattaacaagcacagtttcaacgacttcaagctgagggtaggcattaaccatggcccagtgatagcaggggtaatcggagcacaaaagccgcaatatgacatttggggaaacacggtgaacgtagcctccaggatggacagcacgggcgtcctggataagatccaagtgactgaagaaaccagcctagttctgcagaccctcggatatacctgcacttgccgagggatcataaatgtgaagggcaagggggacctcaaaacttacttcgtgaacaccgaaatgagcaggagcctgagccagagcaacgtcgcctcctag

SEQ ID NO: 204777 - DNA, 2775 bp, Artificial Sequence
  derived and/or modified sequence
atgctgcccttcaacatgcgggacgccatcatcgccagcgtgctgacatcatcctcccacactatcgtattgtccgtttgcctctcagccactcccggggggaaagagcacctggtgtggcagatactggcgaacgttattatcttcatttgtgggaacctggccggcgcttatcacaagcatctgatggaactggccctgcagcagacctaccaggacacctgtaactgcatcaaaagccgaattaagctggagttcgagaagcgccaacaggaaaggctcctactcagcctgttgccagcccacattgcaatggaaatgaaggccgagatcattcaacgcctacagggaccaaaagccgggcagatggaaaacaccaataacttccacaacctgtacgtcaagcggcacactaatgtttctatactttacgctgatattgttggctttactcgactggctagcgattgctcaccaggggagttggtgcacatgctgaatgaactctttggcaagttcgatcagatcgctaaagagaatgagtgcatgagaataaagatcctcggagattgctattattgcgtctctgggctccccataagtctgcctaatcatgctaaaaattgtgtcaagatgggtctcgacatgtgcgaggccatcaaaaaggtgagggatgctacaggagtggatattaatatgcgtgttggagtccacagcggaaatgtactatgtggcgtaataggcctgcaaaaatggcagtatgacgtctggtcccatgacgtgaccctcgctaaccatatggaggcagggggcgtgcctggaagagtacatatttccagcgttactctagagcatctcaacggggcatacaaggtggaggagggcgatggggatattcgtgacccgtatctgaaacagcaccttgtcaaaacatattttgttatcaatcctaaaggtgagagacgcagtccacagcatctcttccgcccccgacacaccctggacggcgctaaaccctttgctcacttgcatcaccgggactctatgacaaccgagaacgggaagatatcaacgacagacgtacccatggggcaacataatttccagaataggactctgaggactaaatcccaaaaaaaaaggtttgaggaggaattaaacgagaggatgatccaggccatcgatggaataaatgctcaaaaacaatggctgaaatccgaggacattcagagaataagcctgctcttctacaacaaggtcctagagaaggagtaccgggccactgcgttgccagccttcaagtattacgtgacatgcgcctgcctgatattcttttgtatctttattgtccaaattctcgttctgcccaagacaagcgttctgggaatctcctttggcgccgcatttctgctcttagcctttattctgttcgtgtgttttgccggccagttgctgcagtgcagcaagaaagcctctcccctcctcatgtggttattaaaatcatcaggaattattgctaatcgcccgtggccccggatttctctgaccatcatcacgacagctataatcctgatgatggctgtttttaacatgttcttcctgtccgattctgaagaaaccatcccccccactgctaacacaacaaacacctcgttcagtgccagtaataatcaggtggccatactgcgcgcacagaacctgttcttcctcccatattttatttatagctgtattcttggcttaatttcctgctcggtctttctccgcgtgaactacgagctgaagatgttgatcatgatggtggcgctcgtgggatacaatacaatactactccatacgcacgctcacgtcctgggggactacagtcaggtgttattcgagcgacctggaatctggaaggatctgaagacaatggggtcagtatcactgtccatcttttttatcacgctgctcgtgctgggaaggcagaacgaatactattgtcgcttggactttctttggaagaataaattcaaaaaggagcgtgaagaaattgagacaatggaaaacttaaatagggtcctgttggagaacgtgctgccagctcatgtcgccgagcatttcctcgctcggtctctcaagaacgaagaactgtaccaccagtcctacgattgcgtgtgtgttatgttcgcctctattcctgatttcaaggagttttacacggaatccgacgtcaataaggagggattggagtgcttgagactgcttaatgagattatagccgattttgacgacctgctctcaaaacctaagttttccggtgtggagaagatcaagactatcggtagcacatatatggcggcgacgggcctgtccgctgtgccgtcacaggagcacagccaggagcccgagcgacaatacatgcatattgggactatggtagagtttgccttcgctctagtgggtaagctggacgccatcaacaagcattcctttaacgatttcaagctgagggtcggtatcaatcatggacccgtgattgctggcgtaatcggcgcccagaaacctcaatacgacatatggggaaacacagtgaatgtggcgtcgcgaatggactccaccggagtgctcgacaaaatacaggtgaccgaagaaacatcgctggtacttcaaacccttggctacacttgtacttgccgggggatcataaacgtcaagggcaaaggggatctgaagacctactttgtgaatactgaaatgagtagatctctgtcgcaatctaacgttgcatcatag

SEQ ID NO: 204778 - DNA, 3276 bp, Artificial Sequence
  derived and/or modified sequence
atgtggcaagaggccatgagacgcaggaggtacctccgggaccggagtgaagaggccgcaggcggtggagatggtctgcctagatccagagattggctgtacgagtcatactattgtatgtcccagcagcaccccctcatcgtttttctcctactgattgtcatgggcagctgccttgcacttcttgcagtctttttcgcactggggttggaagttgaggaccacgttgcttttctcatcaccgtccctactgcattggctattttctttgctatctttattctggtgtgcatcgagtccgtcttcaaaaagctcctccgtctcttctcattggtcatttggatttgtctggtggcgatgggttacctcttcatgtgcttcggaggcactgtgagtccctgggatcaggtgtcttttttcctatttataatctttgtcgtgtacacgatgttgccattcaacatgcgagatgctatcatcgcctcggtgcttacaagcagcagtcatacgatcgtactctccgtctgcttatcagcgacccccggtggaaaagagcacttagtttggcagatcctggccaatgtgattatttttatctgtggtaacctggctggagcatatcataaacatctgatggagttagcactgcagcagacataccaggacacctgtaactgcattaaaagccgcataaaacttgaattcgaaaagcggcagcaggaacgcttactgctcagcctactgcccgctcatattgccatggaaatgaaagctgagattattcagagattgcagggacctaaggcgggacaaatggagaatacgaataacttccataacctgtatgttaagcggcatacgaatgtttccatcctatacgccgacatagtaggcttcaccagattggctagtgattgtagccctggagaactggttcacatgctgaatgagttatttggcaagttcgatcagatcgccaaggagaatgagtgcatgagaatcaaaatactgggagactgctactactgcgtttctgggttgcccatctccctgcccaatcacgctaagaattgtgtcaaaatgggtctcgacatgtgcgaagctattaagaaggtcagggacgccacaggcgtcgatatcaacatgagggtcggtgtgcattccggcaacgttctgtgcggggtgattggtttgcagaaatggcaatacgacgtctggagtcacgatgtgaccctcgcgaatcacatggaggctggcggagtgcccggtcgggtgcacatcagtagcgtgacactggaacacttaaatggggcttataaagtggaagaaggcgatggggacataagggacccatacctgaagcagcacttggtgaagacatactttgtcattaatcctaaaggcgagcggaggagtccccagcatctgttccgtccgagacataccttggacggagcaaaaatgcgggcatcagtcagaatgaccagatatctggaatcttggggcgcagcaaaaccttttgcacacctccatcatcgtgattctatgaccaccgaaaacggcaagatatccactaccgacgtccctatgggtcagcataatttccagaatcggacactgagaactaagtcacagaagaaaagattcgaagaagagctcaatgaaagaatgatacaggcaatcgatggcatcaatgctcagaagcagtggctcaagtccgaagatattcagaggatcagccttctgttctacaacaaggtgttggagaaggagtaccgcgcaactgccttgcccgctttcaagtactacgtgacttgtgcctgtttaatttttttctgtatctttattgtgcagattcttgtactccctaagacatctgtcttgggtatttcctttggcgctgcatttttgcttctagccttcatcctgttcgtgtgttttgccggacagctgttgcaatgcagtaagaaggcctcccccctgctgatgtggctcctgaagagcagcggcattatcgccaaccggccatggcctcgtatttccctgactattatcacaactgctatcattctaatgatggccgttttcaacatgttcttcctttctgactctgaggagaccataccacctactgccaacactacgaacacatccttctccgcaagcaacaatcaggtcgcaatccttagggcacagaacctctttttcctgccatattttatttatagctgcatcctcggcctgatatcctgtagcgtatttctccgcgttaattacgaactgaaaatgctgattatgatggtcgctctcgtcggttacaatacaatacttcttcatactcacgcccacgtgctgggcgactacagtcaggtgctcttcgagcgccctggaatctggaaggatttgaaaacaatgggcagtgtctcactgtcaattttctttatcacgctgcttgttctcgggcgacaaaacgaatattactgccgtcttgacttcttatggaagaataagttcaagaaggaaagggaagaaatagaaactatggagaacttgaatcgggtgctgctggaaaacgtgctcccggctcatgttgccgagcacttcctcgctcgctcattgaagaacgaggaactctatcaccagtcttacgactgtgtctgcgtaatgtttgcgtccatccccgactttaaggagttttatacagagagcgacgtgaataaggaggggttagaatgtctacgcctgctgaacgaaatcatcgcggactttgacgacttgctgtcgaaacccaaatttagcggggtagagaagatcaaaactatcgggtctacctatatggccgcaaccggactgagcgccgtaccttcgcaggagcatagccaggagcctgagaggcaatatatgcacattggaaccatggtggagttcgccttcgcattggttggcaagctggacgccatcaacaagcactcgtttaatgacttcaaattgcgcgtgggtattaatcatggccctgttattgctggggtcattggcgctcagaagccccagtacgacatctggggtaacaccgttaatgttgctagtagaatggactctacgggagtactagataagatccaagtcaccgaagagacatccctggtgctgcagaccttaggctacacatgcacttgccgtgggataataaacgttaaaggaaaaggcgatctcaagacttacttcgtgaacactgaaatgtcccgtagcttatctcagtcaaatgtggccagctag

SEQ ID NO: 204779 - DNA, 2736 bp, Artificial Sequence
  derived and/or modified sequence
atggacctgagatgggcccgagatctgcacttaagagaggccagtcggtcagtcgcctttacaaccttgagattgggtgccgtgacaacgggtctgctgacatttagggagcctggcgacaaggaaaaaagcggaaaggggcttggtaaacggtggcgaatacagagagaggagtcccaggagcggttgctactttctctactgcccgctcacattgctatggagatgaaggctgaaatcattcagagacttcagggtcccaaagctggacagatggagaatacaaacaacttccataatctctacgttaagcggcataccaacgtgagtattctgtatgcagatatcgtgggcttcactagactggccagcgattgctcccccggtgagttagtgcacatgctgaacgagctttttgggaagttcgaccagattgccaaggagaatgaatgtatgcgtatcaagattcttggagattgctactactgcgtctccggattgcctatcagcctacctaaccatgcaaaaaattgcgtaaaaatggggttggatatgtgtgaggcgattaagaaagtgcgcgatgctaccggagtggatataaacatgcgcgtcggcgtccatagcgggaatgtcctatgtggagtgattggactgcagaaatggcagtacgacgtgtggagccacgatgttacactggctaatcatatggaggccggaggcgtccctggacgagtacacatttcaagcgtgacattagaacatctgaacggcgcatataaagttgaagaaggggacggggatatccgggacccatacctgaaacagcacttggtgaagacatatttcgtgatcaatccaaaaggtgaaagacgctctccgcagcacctgtttcgcccacggcacaccctagacggtgctaagatgcgcgcatcggtgaggatgacgcgctatctcgaaagttggggcgcagccaagccattcgcccatctgcaccacagggattccatgacaactgaaaacggtaagatctccaccacagatgttcctatgggccagcacaattttcagaaccgcacactacggaccaagtcacagaaaaaacgcttcgaagaggagctgaacgagcgcatgattcaggccatagacgggattaacgcccagaaacagtggctgaagtctgaagacattcaaagaatcagcctgttgttctacaacaaagttctcgaaaaggagtacagagccactgctctgcctgcctttaagtactatgtcacgtgtgcatgccttatctttttctgcattttcatcgtgcagattctggttttaccgaaaactagcgtcttaggcatttcattcggtgctgcctttttgctgctagcctttatactgttcgtgtgcttcgctggtcagctcctccaatgtagcaaaaaggcctcgcctttactgatgtggttgttaaagtccagtggaatcattgccaatcgaccctggccgcgtatttcccttaccattatcacaacagccattatcctgatgatggctgtctttaatatgttcttcttatccgatagtgaagaaactattccacccaccgcaaataccaccaatacttccttctcggccagtaataaccaagtcgctatactcagagctcaaaacctcttcttcctaccttatttcatctattcttgcattttgggtttaatttcatgctccgtgtttctcagggttaactacgaattgaaaatgctcatcatgatggtggccttggtgggctataatactatcctgcttcacacccacgcccatgtcttgggtgattattcccaggtgctgttcgagcggcctggcatttggaaggacttgaagaccatgggatccgtgtccctttctatcttttttatcacgttactggtgcttggcaggcagaatgagtactattgccggctcgattttttatggaaaaataagttcaagaaggagcgggaagaaattgagaccatggagaatctcaatagagtgttgttggagaatgtcctaccagctcacgtggccgaacattttctcgctaggtcactcaaaaacgaggaactgtaccaccaatcttatgactgcgtgtgcgtgatgttcgcaagcattcctgactttaaagagttctatacagagtctgatgtgaataaagaagggctagagtgtctgaggcttctgaatgaaatcattgctgactttgatgacttgctatcaaagccgaagttcagcggggtggaaaaaatcaagactatcggatcaacctacatggctgcaacgggactgagtgccgtgcctagccaggaacactcccaggagcctgagcgccaatacatgcatattggcactatggtggagtttgctttcgcactcgtcggcaaacttgatgctattaacaagcacagctttaacgactttaagctcagagtggggataaaccatggacctgtcatcgccggagtgatcggggctcagaagccgcagtatgatatttggggcaatactgtcaacgtggctagcaggatggactctaccggggtgctggataaaattcaggttaccgaggaaacctcgttagtgctccaaaccctgggatatacctgtacttgtcgaggcatcattaacgtgaaaggcaagggagatctcaagacatatttcgtgaacacggaaatgagtcgctctttgtcccagagcaacgtagccagttag

SEQ ID NO: 204780 - DNA, 2775 bp, Artificial Sequence
  derived and/or modified sequence
atgctccccttcaacatgcgcgacgcaataattgcttcagtattaacctcatcttcacacacaatagtcctgtcagtctgtttatcagccactcccggaggaaaagagcacttggtgtggcaaatcttggcgaatgtaatcattttcatttgtgggaatctagccggagcatatcacaagcatttgatggagctcgccctacagcagacataccaggacacctgcaactgcattaagagccggatcaaactggaatttgagaaacgccagcaggaacgcctattgctctccctgctgcccgcacatatcgctatggagatgaaggctgagattattcagaggttacagggtcctaaggccggtcaaatggaaaacaccaataactttcacaacctatatgtgaagcgccatactaacgtgtcaatcctctacgctgatattgtaggttttacccgactggcaagtgattgctctccaggcgagctggtccacatgctcaacgaactctttggcaagtttgatcaaatcgctaaggaaaatgaatgtatgcgcatcaagatccttggagattgctactattgcgtgtccggcctcccgatctccctgcctaaccatgccaaaaattgcgtcaaaatggggctcgacatgtgcgaggcaattaagaaagtgagggatgccaccggagtggatattaacatgcgcgtgggcgtacactcagggaacgttctatgcggagtgattggactccagaaatggcaatatgacgtctggtcacatgacgtaacactggcgaaccatatggaagccggaggggtccctggtcgggtgcacatctcctccgttacactggaacaccttaacggcgcttacaaggtcgaggagggcgacggcgatatacgcgatccctatctgaaacaacacctggttaagacgtacttcgtcatcaaccctaaaggcgaacgccgatctccgcagcatctgttccgccctcgacatacactggatggagcgaagccatttgcacatctgcaccaccgggactcaatgactaccgagaatggaaagatctccaccactgatgtgccaatggggcaacacaatttccagaatcggacactccgaaccaagtcccagaagaagagatttgaggaagagctcaacgagaggatgattcaagccattgacggaattaatgcacagaagcagtggctgaagtctgaggatatccagagaatatctctactcttctacaacaaagtgttggagaaagaatatagagccaccgcgctgcctgccttcaagtactacgtcacatgcgcgtgtctgatctttttttgtatcttcatcgtacagatcctcgtattgcctaagacatccgtgttgggcattagctttggcgctgcctttctgctcttggcgttcattctgttcgtttgtttcgctggccagctcctgcaatgcagcaagaaggcttccccgcttctcatgtggctgctcaagagtagcggaataattgccaaccggccatggccacgcattagcctcacaataatcacgaccgccatcatcctaatgatggcggttttcaatatgtttttcctgtcggactcagaggagaccatcccgcctacagcaaacactaccaacactagtttcagcgcctccaacaatcaggtggccatcctccgcgctcagaatctattttttctcccctatttcatctattcctgcatcctagggcttattagctgtagcgtgttcctgagggttaactacgaactgaaaatgctgatcatgatggtggctttggtcggatacaacactatccttctgcacacgcacgcccatgtgttgggcgactacagccaagtactcttcgagagaccaggaatttggaaggatctgaaaaccatgggctccgttagcctgtctatcttcttcattacattactggtactcggacgccaaaatgaatactactgccggctggattttttgtggaaaaacaagttcaagaaagagagggaagaaattgagacaatggaaaacctcaacagagtgcttctggaaaacgtgctgcctgcacatgttgccgagcacttcctcgctcgctcactcaaaaatgaggagctctatcatcagtcctatgattgtgtttgcgtgatgtttgctagcatccccgatttcaaagagttttacacggaatccgatgtgaacaaagagggcttggaatgtctgcggttattgaacgagatcatagctgacttcgatgacctgctctctaagccaaagttttccggagtcgaaaagatcaagaccatcggttccacatacatggctgcgaccggcctcagcgccgtccccagccaagagcactcccaggagcctgaacgccaatacatgcacatcggaactatggttgaatttgcattcgcactcgtcgggaaactcgacgcaattaacaagcactcctttaacgacttcaagctcagagtgggtataaaccacggccctgtgatagccggtgtaataggggcacagaagccgcaatacgatatttggggcaacacagttaatgtcgctagcagaatggactcaaccggcgttctagataagatccaagtgacagaggagacctccttggtcctccagacactcggctacacgtgcacttgccgcggaataatcaacgtcaagggtaagggggatctgaagacctacttcgtcaatactgaaatgagcagatcactttcacagtccaatgtggcctcctag

SEQ ID NO: 204781 - DNA, 3276 bp, Artificial Sequence
  derived and/or modified sequence
atgtggcaggaggccatgagaagaagaagatacctgagagacagaagcgaggaggccgccggcggcggcgacggcctgcccagaagcagagactggctgtacgagagctactactgcatgagccagcagcaccccctgatcgtgttcctgctgctgatcgtgatgggcagctgcctggccctgctggccgtgttcttcgccctgggcctggaggtggaggaccacgtggccttcctgatcaccgtgcccaccgccctggccatcttcttcgccatcttcatcctggtgtgcatcgagagcgtgttcaagaagctgctgagactgttcagcctggtgatctggatctgcctggtggccatgggctacctgttcatgtgcttcggcggcaccgtgagcccctgggaccaggtgagcttcttcctgttcatcatcttcgtggtgtacaccatgctgcccttcaacatgagagacgccatcatcgccagcgtgctgaccagcagcagccacaccatcgtgctgagcgtgtgcctgagcgccacccccggcggcaaggagcacctggtgtggcagatcctggccaacgtgatcatcttcatctgcggcaacctggccggcgcctaccacaagcacctgatggagctggccctgcagcagacctaccaggacacctgcaactgcatcaagagcagaatcaagctggagttcgagaagagacagcaggagagactgctgctgagcctgctgcccgcccacatcgccatggagatgaaggccgagatcatccagagactgcagggccccaaggccggccagatggagaacaccaacaacttccacaacctgtacgtgaagagacacaccaacgtgagcatcctgtacgccgacatcgtgggcttcaccagactggccagcgactgcagccccggcgagctggtgcacatgctgaacgagctgttcggcaagttcgaccagatcgccaaggagaacgagtgcatgagaatcaagatcctgggcgactgctactactgcgtgagcggcctgcccatcagcctgcccaaccacgccaagaactgcgtgaagatgggcctggacatgtgcgaggccatcaagaaggtgagagacgccaccggcgtggacatcaacatgagagtgggcgtgcacagcggcaacgtgctgtgcggcgtgatcggcctgcagaagtggcagtacgacgtgtggagccacgacgtgaccctggccaaccacatggaggccggcggcgtgcccggcagagtgcacatcagcagcgtgaccctggagcacctgaacggcgcctacaaggtggaggagggcgacggcgacatcagagacccctacctgaagcagcacctggtgaagacctacttcgtgatcaaccccaagggcgagagaagaagcccccagcacctgttcagacccagacacaccctggacggcgccaagatgagagccagcgtgagaatgaccagatacctggagagctggggcgccgccaagcccttcgcccacctgcaccacagagacagcatgaccaccgagaacggcaagatcagcaccaccgacgtgcccatgggccagcacaacttccagaacagaaccctgagaaccaagagccagaagaagagattcgaggaggagctgaacgagagaatgatccaggccatcgacggcatcaacgcccagaagcagtggctgaagagcgaggacatccagagaatcagcctgctgttctacaacaaggtgctggagaaggagtacagagccaccgccctgcccgccttcaagtactacgtgacctgcgcctgcctgatcttcttctgcatcttcatcgtgcagatcctggtgctgcccaagaccagcgtgctgggcatcagcttcggcgccgccttcctgctgctggccttcatcctgttcgtgtgcttcgccggccagctgctgcagtgcagcaagaaggccagccccctgctgatgtggctgctgaagagcagcggcatcatcgccaacagaccctggcccagaatcagcctgaccatcatcaccaccgccatcatcctgatgatggccgtgttcaacatgttcttcctgagcgacagcgaggagaccatcccccccaccgccaacaccaccaacaccagcttcagcgccagcaacaaccaggtggccatcctgagagcccagaacctgttcttcctgccctacttcatctacagctgcatcctgggcctgatcagctgcagcgtgttcctgagagtgaactacgagctgaagatgctgatcatgatggtggccctggtgggctacaacaccatcctgctgcacacccacgcccacgtgctgggcgactacagccaggtgctgttcgagagacccggcatctggaaggacctgaagaccatgggcagcgtgagcctgagcatcttcttcatcaccctgctggtgctgggcagacagaacgagtactactgcagactggacttcctgtggaagaacaagttcaagaaggagagagaggagatcgagaccatggagaacctgaacagagtgctgctggagaacgtgctgcccgcccacgtggccgagcacttcctggccagaagcctgaagaacgaggagctgtaccaccagagctacgactgcgtgtgcgtgatgttcgccagcatccccgacttcaaggagttctacaccgagagcgacgtgaacaaggagggcctggagtgcctgagactgctgaacgagatcatcgccgacttcgacgacctgctgagcaagcccaagttcagcggcgtggagaagatcaagaccatcggcagcacctacatggccgccaccggcctgagcgccgtgcccagccaggagcacagccaggagcccgagagacagtacatgcacatcggcaccatggtggagttcgccttcgccctggtgggcaagctggacgccatcaacaagcacagcttcaacgacttcaagctgagagtgggcatcaaccacggccccgtgatcgccggcgtgatcggcgcccagaagccccagtacgacatctggggcaacaccgtgaacgtggccagcagaatggacagcaccggcgtgctggacaagatccaggtgaccgaggagaccagcctggtgctgcagaccctgggctacacctgcacctgcagaggcatcatcaacgtgaagggcaagggcgacctgaagacctacttcgtgaacaccgagatgagcagaagcctgagccagagcaacgtggccagctag

SEQ ID NO: 204782 - DNA, 2736 bp, Artificial Sequence
  derived and/or modified sequence
atggacctgagatgggccagagacctgcacctgagagaggccagcagaagcgtggccttcaccaccctgagactgggcgccgtgaccaccggcctgctgaccttcagagagcccggcgacaaggagaagagcggcaagggcctgggcaagagatggagaatccagagagaggagagccaggagagactgctgctgagcctgctgcccgcccacatcgccatggagatgaaggccgagatcatccagagactgcagggccccaaggccggccagatggagaacaccaacaacttccacaacctgtacgtgaagagacacaccaacgtgagcatcctgtacgccgacatcgtgggcttcaccagactggccagcgactgcagccccggcgagctggtgcacatgctgaacgagctgttcggcaagttcgaccagatcgccaaggagaacgagtgcatgagaatcaagatcctgggcgactgctactactgcgtgagcggcctgcccatcagcctgcccaaccacgccaagaactgcgtgaagatgggcctggacatgtgcgaggccatcaagaaggtgagagacgccaccggcgtggacatcaacatgagagtgggcgtgcacagcggcaacgtgctgtgcggcgtgatcggcctgcagaagtggcagtacgacgtgtggagccacgacgtgaccctggccaaccacatggaggccggcggcgtgcccggcagagtgcacatcagcagcgtgaccctggagcacctgaacggcgcctacaaggtggaggagggcgacggcgacatcagagacccctacctgaagcagcacctggtgaagacctacttcgtgatcaaccccaagggcgagagaagaagcccccagcacctgttcagacccagacacaccctggacggcgccaagatgagagccagcgtgagaatgaccagatacctggagagctggggcgccgccaagcccttcgcccacctgcaccacagagacagcatgaccaccgagaacggcaagatcagcaccaccgacgtgcccatgggccagcacaacttccagaacagaaccctgagaaccaagagccagaagaagagattcgaggaggagctgaacgagagaatgatccaggccatcgacggcatcaacgcccagaagcagtggctgaagagcgaggacatccagagaatcagcctgctgttctacaacaaggtgctggagaaggagtacagagccaccgccctgcccgccttcaagtactacgtgacctgcgcctgcctgatcttcttctgcatcttcatcgtgcagatcctggtgctgcccaagaccagcgtgctgggcatcagcttcggcgccgccttcctgctgctggccttcatcctgttcgtgtgcttcgccggccagctgctgcagtgcagcaagaaggccagccccctgctgatgtggctgctgaagagcagcggcatcatcgccaacagaccctggcccagaatcagcctgaccatcatcaccaccgccatcatcctgatgatggccgtgttcaacatgttcttcctgagcgacagcgaggagaccatcccccccaccgccaacaccaccaacaccagcttcagcgccagcaacaaccaggtggccatcctgagagcccagaacctgttcttcctgccctacttcatctacagctgcatcctgggcctgatcagctgcagcgtgttcctgagagtgaactacgagctgaagatgctgatcatgatggtggccctggtgggctacaacaccatcctgctgcacacccacgcccacgtgctgggcgactacagccaggtgctgttcgagagacccggcatctggaaggacctgaagaccatgggcagcgtgagcctgagcatcttcttcatcaccctgctggtgctgggcagacagaacgagtactactgcagactggacttcctgtggaagaacaagttcaagaaggagagagaggagatcgagaccatggagaacctgaacagagtgctgctggagaacgtgctgcccgcccacgtggccgagcacttcctggccagaagcctgaagaacgaggagctgtaccaccagagctacgactgcgtgtgcgtgatgttcgccagcatccccgacttcaaggagttctacaccgagagcgacgtgaacaaggagggcctggagtgcctgagactgctgaacgagatcatcgccgacttcgacgacctgctgagcaagcccaagttcagcggcgtggagaagatcaagaccatcggcagcacctacatggccgccaccggcctgagcgccgtgcccagccaggagcacagccaggagcccgagagacagtacatgcacatcggcaccatggtggagttcgccttcgccctggtgggcaagctggacgccatcaacaagcacagcttcaacgacttcaagctgagagtgggcatcaaccacggccccgtgatcgccggcgtgatcggcgcccagaagccccagtacgacatctggggcaacaccgtgaacgtggccagcagaatggacagcaccggcgtgctggacaagatccaggtgaccgaggagaccagcctggtgctgcagaccctgggctacacctgcacctgcagaggcatcatcaacgtgaagggcaagggcgacctgaagacctacttcgtgaacaccgagatgagcagaagcctgagccagagcaacgtggccagctag

SEQ ID NO: 204783 - DNA, 2775 bp, Artificial Sequence
  derived and/or modified sequence
atgctgcccttcaacatgagagacgccatcatcgccagcgtgctgaccagcagcagccacaccatcgtgctgagcgtgtgcctgagcgccacccccggcggcaaggagcacctggtgtggcagatcctggccaacgtgatcatcttcatctgcggcaacctggccggcgcctaccacaagcacctgatggagctggccctgcagcagacctaccaggacacctgcaactgcatcaagagcagaatcaagctggagttcgagaagagacagcaggagagactgctgctgagcctgctgcccgcccacatcgccatggagatgaaggccgagatcatccagagactgcagggccccaaggccggccagatggagaacaccaacaacttccacaacctgtacgtgaagagacacaccaacgtgagcatcctgtacgccgacatcgtgggcttcaccagactggccagcgactgcagccccggcgagctggtgcacatgctgaacgagctgttcggcaagttcgaccagatcgccaaggagaacgagtgcatgagaatcaagatcctgggcgactgctactactgcgtgagcggcctgcccatcagcctgcccaaccacgccaagaactgcgtgaagatgggcctggacatgtgcgaggccatcaagaaggtgagagacgccaccggcgtggacatcaacatgagagtgggcgtgcacagcggcaacgtgctgtgcggcgtgatcggcctgcagaagtggcagtacgacgtgtggagccacgacgtgaccctggccaaccacatggaggccggcggcgtgcccggcagagtgcacatcagcagcgtgaccctggagcacctgaacggcgcctacaaggtggaggagggcgacggcgacatcagagacccctacctgaagcagcacctggtgaagacctacttcgtgatcaaccccaagggcgagagaagaagcccccagcacctgttcagacccagacacaccctggacggcgccaagcccttcgcccacctgcaccacagagacagcatgaccaccgagaacggcaagatcagcaccaccgacgtgcccatgggccagcacaacttccagaacagaaccctgagaaccaagagccagaagaagagattcgaggaggagctgaacgagagaatgatccaggccatcgacggcatcaacgcccagaagcagtggctgaagagcgaggacatccagagaatcagcctgctgttctacaacaaggtgctggagaaggagtacagagccaccgccctgcccgccttcaagtactacgtgacctgcgcctgcctgatcttcttctgcatcttcatcgtgcagatcctggtgctgcccaagaccagcgtgctgggcatcagcttcggcgccgccttcctgctgctggccttcatcctgttcgtgtgcttcgccggccagctgctgcagtgcagcaagaaggccagccccctgctgatgtggctgctgaagagcagcggcatcatcgccaacagaccctggcccagaatcagcctgaccatcatcaccaccgccatcatcctgatgatggccgtgttcaacatgttcttcctgagcgacagcgaggagaccatcccccccaccgccaacaccaccaacaccagcttcagcgccagcaacaaccaggtggccatcctgagagcccagaacctgttcttcctgccctacttcatctacagctgcatcctgggcctgatcagctgcagcgtgttcctgagagtgaactacgagctgaagatgctgatcatgatggtggccctggtgggctacaacaccatcctgctgcacacccacgcccacgtgctgggcgactacagccaggtgctgttcgagagacccggcatctggaaggacctgaagaccatgggcagcgtgagcctgagcatcttcttcatcaccctgctggtgctgggcagacagaacgagtactactgcagactggacttcctgtggaagaacaagttcaagaaggagagagaggagatcgagaccatggagaacctgaacagagtgctgctggagaacgtgctgcccgcccacgtggccgagcacttcctggccagaagcctgaagaacgaggagctgtaccaccagagctacgactgcgtgtgcgtgatgttcgccagcatccccgacttcaaggagttctacaccgagagcgacgtgaacaaggagggcctggagtgcctgagactgctgaacgagatcatcgccgacttcgacgacctgctgagcaagcccaagttcagcggcgtggagaagatcaagaccatcggcagcacctacatggccgccaccggcctgagcgccgtgcccagccaggagcacagccaggagcccgagagacagtacatgcacatcggcaccatggtggagttcgccttcgccctggtgggcaagctggacgccatcaacaagcacagcttcaacgacttcaagctgagagtgggcatcaaccacggccccgtgatcgccggcgtgatcggcgcccagaagccccagtacgacatctggggcaacaccgtgaacgtggccagcagaatggacagcaccggcgtgctggacaagatccaggtgaccgaggagaccagcctggtgctgcagaccctgggctacacctgcacctgcagaggcatcatcaacgtgaagggcaagggcgacctgaagacctacttcgtgaacaccgagatgagcagaagcctgagccagagcaacgtggccagctag

SEQ ID NO: 204784 - protein, 573 aa, Artificial Sequence
  derived and/or modified sequence
MLGSLGLWALLPTAVEAPPNRRTCVFFEAPGVRGSTKTLGELLDTGTELPRAIRCLYSRCCFGIWNLTQDRAQVEMQGCRDSDEPGCESLHCDPSPRAHPSPGSTLFTCSCGTDFCNANYSHLPPPGSPGTPGSQGPQAAPGESIWMALVLLGLFLLLLLLLGSIILALLQRKNYRVRGEPVPEPRPDSGRDWSVELQELPELCFSQVIREGGHAVVWAGQLQGKLVAIKAFPPRSVAQFQAERALYELPGLQHDHIVRFITASRGGPGRLLSGPLLVLELHPKGSLCHYLTQYTSDWGSSLRMALSLAQGLAFLHEERWQNGQYKPGIAHRDLSSQNVLIREDGSCAIGDLGLALVLPGLTQPPAWTPTQPQGPAAIMEAGTQRYMAPELLDKTLDLQDWGMALRRADIYSLALLLWEILSRCPDLRPDSSPPPFQLAYEAELGNTPTSDELWALAVQERRRPYIPSTWRCFATDPDGLRELLEDCWDADPEARLTAECVQQRLAALAHPQESHPFPESCPRGCPPLCPEDCTSIPAPTILPCRPQRSACHFSVQQGPCSRNPQPACTLSPV

SEQ ID NO: 204785 - DNA, 1722 bp, Artificial Sequence
  derived and/or modified sequence
atgctcggctccctgggcttatgggctctgctccctacagccgtcgaagcccctcccaatcggcggacctgcgtgttcttcgaggcacccggcgttcgagggtctactaaaacactgggcgagctcctagatacagggaccgaactcccgagggccattcgatgcctgtactcacgatgctgttttgggatttggaatctcacccaagaccgcgcccaggtcgagatgcaggggtgcagggattctgacgagcctggatgtgagtccttacattgcgatccttctcctcgagctcatcccagccctggttccacgcttttcacgtgcagctgtggtaccgacttctgcaatgccaactacagccacctgccacccccagggagccccgggacgccaggcagccaaggaccacaggctgcccccggagagtccatttggatggctctggtgctgcttgggctgtttctcctgctcctgcttctactgggctcaattatcctagcactgttgcagcgaaagaactacagggtccgaggcgagcccgtgcctgaacctcggcctgactccggaagagattggtccgttgagctccaagagttaccagaactttgtttctcccaggtgatccgcgagggagggcacgcagtcgtgtgggccggtcagctgcagggcaagttagtagcaatcaaagcattcccccctcggagcgttgcccagttccaggctgagcgggcgctttatgagctgccaggcctccagcatgaccacatcgtcagatttatcaccgccagcagaggcggcccaggacgcctgcttagcggaccgctcctggtactggaactccaccccaaaggatccttatgccattatctcactcagtatacgtccgactggggctctagcctccgcatggccctgtctctggctcaggggctcgcatttctgcacgaggagagatggcaaaatgggcagtacaaaccagggatcgcccacagagacttgagcagtcagaacgtgctaattcgggaagacggcagttgcgccatcggggacctgggcttggcactggtgctacctgggctgacccagcctccagcctggactccgactcagccacagggtcccgccgctatcatggaggcgggaactcagagatatatggcaccagaattgctggataaaacactggatctgcaggactggggtatggcactgcgccgtgcagatatatacagtcttgcactgctactttgggagatcctgagtcgttgcccagatctcagacccgactcttcgccccctccgttccagctggcctacgaggcggaacttggcaatactcctactagcgatgaactgtgggccttagccgtgcaggaacgaagacgcccgtatatcccttctacctggagatgctttgccacagacccagacggcctgcgcgagctgctcgaggactgctgggatgctgatcccgaagccaggctgacagccgagtgcgtccagcagagattagctgcactcgcacaccctcaggaatcccaccccttccctgagtcctgtcccagggggtgcccacccctctgcccagaagactgtacttctatcccggctccgactattttaccatgtaggcctcagaggtctgcttgccatttcagcgtccagcaggggccatgttcaaggaatccccagccggcctgcactctgtctcccgtatag

SEQ ID NO: 204786 - DNA, 1722 bp, Artificial Sequence
  derived and/or modified sequence
atgctgggcagcctgggcctgtgggccctgctgcccacagctgtggaggccccacccaacagaaggacctgtgtgttctttgaggcccctggggtgcggggcagcaccaagaccctgggggagctgctggacacaggaacagagctgccccgggccatccgctgcctgtacagccgctgctgcttcggcatctggaacctgacccaggaccgggcccaggtggagatgcagggctgccgggacagtgatgagcccggctgtgagagcctgcactgtgaccccagcccccgggcccaccccagccctggcagcaccctcttcacctgcagctgtggcacagacttctgcaatgccaactacagccacctgcccccacctggcagccctggcaccccaggcagccagggcccccaggccgcccctggagagagcatctggatggccctggtgctgctgggcctcttcctgctgctgctgctgctgctgggcagcatcatcctggccctgctgcagaggaagaactacagagtgcggggggagcctgtgcctgagcccaggccagattctggccgggactggagcgtggagctgcaggagctgcctgagctgtgcttcagccaggtgatccgggagggcggccatgctgtggtgtgggccggccagctgcagggcaagctggtggccatcaaggccttccccccaagatctgtggcccagttccaggccgagcgggccctgtatgagctgcccggcctgcagcacgaccacatcgtgcgcttcatcacagccagccggggcggccctggccgcctgctgagcggccccctgctggtgctggagctgcaccccaagggcagcctgtgccactacctgacccagtacaccagtgactggggcagcagcctgaggatggccctgagcctggcccagggcctggccttcctgcacgaggagcgctggcagaatggccagtacaagccaggcatcgcccaccgggacctgagcagccagaatgtgctgatcagagaagatggcagctgtgccatcggggacctgggcctggccctggtgctgcccggcctgacccagcccccagcctggacccccacccagccccagggccctgctgccatcatggaggccggcacccagcgctacatggcccctgagctgctggacaagaccctggacctgcaggactggggcatggccctgcggcgggctgacatctacagcctggccctgctgctgtgggagatcctgagccgctgcccagacctgcggccagacagcagccccccacccttccagctggcctatgaggccgagctgggcaacacccccaccagtgatgagctgtgggccctggccgtgcaggagcggcggcggccctacatccccagcacctggcgctgctttgccacagatcctgatggcctgcgggagctgctggaggactgctgggatgctgaccctgaggcccggctgacagcagaatgtgtgcagcagaggctggccgccctggcccacccccaggagagccaccccttccctgagagctgcccccggggctgcccccccctgtgcccagaggactgcaccagcatcccagcccccaccatcctgccctgccggccccagaggtctgcctgccacttctctgtgcagcagggcccctgcagcaggaacccccagcctgcctgcaccctgagccctgtgtag

SEQ ID NO: 204787 - DNA, 1722 bp, Artificial Sequence
  derived and/or modified sequence
atgctgggcagcctgggcctgtgggccctgctgcccaccgccgtggaagcccccccgaaccgacggacatgcgtgtttttcgaggccccaggcgtgcgcggctccacaaaaacacttggcgaactgctcgacactggcacagagcttcctcgtgcaatccggtgtttatactccaggtgttgtttcggaatctggaatcttacgcaggaccgcgcacaggtggaaatgcagggatgtagggattcagacgaacccggctgcgaatccttgcactgcgacccttctcctagagcccacccgagcccaggcagtactctgtttacttgttcgtgcggtactgacttttgcaatgcaaactacagccacttacctcctcctggcagtccagggacccctggcagccaggggcctcaagccgcacctggggagtctatttggatggctcttgtgttgctagggctgttcttgctgctgctgctgctgctcgggagtatcatcctcgccctgcttcagcgtaagaattacagagtgagaggggaacccgtacccgaaccgagaccagactctggacgcgactggtccgtggagctgcaggagttgcccgaactgtgcttctcacaggtcattcgcgagggggggcatgccgtggtgtgggctggccagcttcaaggaaagctggtggccatcaaggccttccctccacgatctgttgcccaattccaggcagagcgggccctatatgaactccccggactgcagcatgaccatattgttaggttcatcacagcaagccgtggcggtccgggacgtttgttgagtggaccactgctcgtgctggagttacaccctaaaggctcactctgccactacctgacccaatataccagcgattgggggtccagcctgagaatggccctcagcctggcacaaggactggcttttctgcacgaggaacggtggcagaacggtcagtataagccagggatagctcacagggatctgtcatcccagaacgtcctgatcagggaggacggctcttgcgccataggggacctgggtctcgctttggtgctcccaggcctcactcaaccacccgcctggacaccaacccaaccacaggggccagcagccatcatggaggcgggcactcagagatacatggcccccgagctgttggataaaacccttgatctccaggactgggggatggccctccggagggccgacatctactctctggccctcttgctgtgggagatcctgagtcgttgtcctgacctgagaccagactcatcacctcccccatttcagctcgcctatgaagctgaacttgggaatactccgaccagcgacgaactctgggctctggctgtgcaggagcgccgacgcccctatataccctcaacctggaggtgcttcgccacggaccctgacggcttgcgcgagcttttggaagactgttgggacgctgacccagaagcaaggctaactgctgagtgcgtgcaacaaagactcgcagctctagcccatccccaagagtcccaccccttccctgaatcatgcccacgaggatgtccacccctttgccccgaggactgcaccagcattccagcaccaacgattctgccttgcaggcctcagagatccgcgtgtcatttttccgtccagcagggtccatgctcccggaatcctcagcccgcgtgcacactcagtccggtgtag

SEQ ID NO: 204788 - DNA, 1722 bp, Artificial Sequence
  derived and/or modified sequence
atgcttggatccctgggactgtgggcattactccccactgcggtggaagcaccacctaaccgaaggacctgtgtctttttcgaggctcctggtgtcagaggctctaccaagacactcggcgagctactagatacagggacagaactccctagggctatcagatgcctttacagtaggtgctgttttggcatttggaacttgacccaggaccgcgcacaggtagaaatgcaagggtgccgcgattccgatgagcctggttgtgaatccctgcactgcgatccgtcgccaagggcccatccttccccaggcagcacgttgtttacctgctcatgtggcaccgacttttgtaacgccaattactcccatctgcccccaccaggatcaccaggcactcccggatcccaaggaccgcaagccgctccaggcgagtctatctggatggcgctggtgttgttgggcttgttcttactgctgctgctgcttctcggcagcattatactggctctgctgcagcgtaaaaactaccgcgttcgaggtgagccagttccggagcctcgccctgactcaggacgagactggtcagtggaactgcaggagttgccggagctgtgtttcagccaagtaatccgcgaggggggacacgccgttgtgtgggccggtcagttgcaaggcaaactggttgccatcaaggccttcccccctagaagcgtggcccagttccaggcagagcgagcgttatacgagctgcccggtctgcagcatgaccacatcgtaagatttattacagcttccaggggcggtcctgggagactgctcagcggccctcttctcgttctggagcttcaccctaaaggcagtctctgtcattatctgacgcagtacacctctgattggggatctagcctgaggatggccctgagcctggctcagggtctggcctttctgcacgaagagagatggcagaatggacagtataagcctgggatcgcccatcgggacctttcttcacagaatgtgctaatccgcgaggatggctcatgcgcgatcggagatctcggattagctctggtgctgccgggtctaactcagcctccggcatggacacctactcagccacaggggccagccgctataatggaagctggtactcagcgctatatggctcccgagctgctggataagactctagatctgcaggactggggaatggcactcagacgagccgatatctacagcctggccctcctcctgtgggagatactgtcccgctgccccgatctgcgccctgacagttctccacctcccttccagctcgcttacgaagccgaactgggcaataccccaacatccgatgagctctgggccctggccgtgcaggagcgccgacggccttacatcccgtctacttggagatgcttcgcgaccgatcccgacggcctgcgggagctgctggaggactgctgggatgctgaccccgaggccaggttgacagcagagtgcgtgcagcagcgcctggccgcactggcacatccacaggagtcacatccattccccgagtcctgtccacgcggatgccctcccctatgtcctgaagactgcacgagtattcctgctccaaccatcttaccttgtcgccctcagcgatcggcctgccacttcagtgtccagcaaggtccctgcagcaggaatccccagccggcttgtaccctttcccctgtgtag

SEQ ID NO: 204789 - DNA, 1863 bp, Artificial Sequence
  derived and/or modified sequence
gtatctgaagaaagatttggccaggggcagctgtgctggcttatgctcttctccttctgctgctgccatcctccagcaagatgctagggtctttggggctttgggcattacttcccacagctgtggaagcacccccaaacaggcgaacctgtgtgttctttgaggcccctggagtgcggggaagcacaaagacactgggagagctgctagatacaggcacagagctccccagagctatccgctgcctctacagccgctgctgctttgggatctggaacctgacccaagaccgggcacaggtggaaatgcaaggatgccgagacagtgatgagccaggctgtgagtccctccactgtgacccaagtccccgagcccaccccagccctggctccactctcttcacctgctcctgtggcactgacttctgcaatgccaattacagccatctgcctcctccagggagccctgggactcctggctcccagggtccccaggctgccccaggtgagtccatctggatggcactggtgctgctggggctgttcctcctcctcctgctgctgctgggcagcatcatcttggccctgctacagcgaaagaactacagagtgcgaggtgagccagtgccagagccaaggccagactcaggcagggactggagtgtggagctgcaggagctgcctgagctgtgtttctcccaggtaatccgggaaggaggtcatgcagtggtttgggccgggcagctgcaaggaaaactggttgccatcaaggccttcccaccgaggtctgtggctcagttccaagctgagagagcattgtacgaacttccaggcctacagcacgaccacattgtccgatttatcactgccagccgggggggtcctggccgcctgctctctgggcccctgctggtactggaactgcatcccaagggctccctgtgccactacttgacccagtacaccagtgactggggaagttccctgcggatggcactgtccctggcccagggcctggcatttctccatgaggagcgctggcagaatggccaatataaaccaggtattgcccaccgagatctgagcagccagaatgtgctcattcgggaagatggatcgtgtgccattggagacctgggccttgccttggtgctccctggcctcactcagccccctgcctggacccctactcaaccacaaggcccagctgccatcatggaagctggcacccagaggtacatggcaccagagctcttggacaagactctggacctacaggattggggcatggccctccgacgagctgatatttactctttggctctgctcctgtgggagatactgagccgctgcccagatttgaggcctgacagcagtccaccacccttccaactggcctatgaggcagaactgggcaatacccctacctctgatgagctatgggccttggcagtgcaggagaggaggcgtccctacatcccatccacctggcgctgctttgccacagaccctgatgggctgagggagctcctagaagactgttgggatgcagacccagaagcacggctgacagctgagtgtgtacagcagcgcctggctgccttggcccatcctcaagagagccacccctttccagagagctgtccacgtggctgcccacctctctgcccagaagactgtacttcaattcctgcccctaccatcctcccctgtaggcctcagcggagtgcctgccacttcagcgttcagcaaggcccttgttccaggaatcctcagcctgcctgtaccctttctcctgtgtaaatatgcagtttatgtgtcatcaatgtacatgccaacataaatatggcgattgtatagctgt

SEQ ID NO: 204790 - DNA, 1722 bp, Artificial Sequence
  derived and/or modified sequence
atgctgggcagcctgggcctgtgggccctgctgcccaccgccgtggaggccccccccaacagaagaacctgcgtgttcttcgaggcccccggcgtgagaggcagcaccaagaccctgggcgagctgctggacaccggcaccgagctgcccagagccatcagatgcctgtacagcagatgctgcttcggcatctggaacctgacccaggacagagcccaggtggagatgcagggctgcagagacagcgacgagcccggctgcgagagcctgcactgcgaccccagccccagagcccaccccagccccggcagcaccctgttcacctgcagctgcggcaccgacttctgcaacgccaactacagccacctgcccccccccggcagccccggcacccccggcagccagggcccccaggccgcccccggcgagagcatctggatggccctggtgctgctgggcctgttcctgctgctgctgctgctgctgggcagcatcatcctggccctgctgcagagaaagaactacagagtgagaggcgagcccgtgcccgagcccagacccgacagcggcagagactggagcgtggagctgcaggagctgcccgagctgtgcttcagccaggtgatcagagagggcggccacgccgtggtgtgggccggccagctgcagggcaagctggtggccatcaaggccttcccccccagaagcgtggcccagttccaggccgagagagccctgtacgagctgcccggcctgcagcacgaccacatcgtgagattcatcaccgccagcagaggcggccccggcagactgctgagcggccccctgctggtgctggagctgcaccccaagggcagcctgtgccactacctgacccagtacaccagcgactggggcagcagcctgagaatggccctgagcctggcccagggcctggccttcctgcacgaggagagatggcagaacggccagtacaagcccggcatcgcccacagagacctgagcagccagaacgtgctgatcagagaggacggcagctgcgccatcggcgacctgggcctggccctggtgctgcccggcctgacccagccccccgcctggacccccacccagccccagggccccgccgccatcatggaggccggcacccagagatacatggcccccgagctgctggacaagaccctggacctgcaggactggggcatggccctgagaagagccgacatctacagcctggccctgctgctgtgggagatcctgagcagatgccccgacctgagacccgacagcagccccccccccttccagctggcctacgaggccgagctgggcaacacccccaccagcgacgagctgtgggccctggccgtgcaggagagaagaagaccctacatccccagcacctggagatgcttcgccaccgaccccgacggcctgagagagctgctggaggactgctgggacgccgaccccgaggccagactgaccgccgagtgcgtgcagcagagactggccgccctggcccacccccaggagagccaccccttccccgagagctgccccagaggctgcccccccctgtgccccgaggactgcaccagcatccccgcccccaccatcctgccctgcagaccccagagaagcgcctgccacttcagcgtgcagcagggcccctgcagcagaaacccccagcccgcctgcaccctgagccccgtgtag

SEQ ID NO: 204791 - protein, 104 aa, Artificial Sequence
  derived and/or modified sequence
MWGDLWLLPPASANPGTGTEAEFEKAAEEVRHLKTKPSDEEMLFIYGHYKQATVGDINTERPGMLDFTGKAKWDAWNELKGTSKEDAMKAYINKVEELKKKYGI

SEQ ID NO: 204792 - DNA, 315 bp, Artificial Sequence
  derived and/or modified sequence
atgtggggcgacctgtggctgctgccccccgccagcgccaaccccggcaccggcaccgaggccgagttcgagaaggccgccgaggaggtgagacacctgaagaccaagcccagcgacgaggagatgctgttcatctacggccactacaagcaggccaccgtgggcgacatcaacaccgagagacccggcatgctggacttcaccggcaaggccaagtgggacgcctggaacgagctgaagggcaccagcaaggaggacgccatgaaggcctacatcaacaaggtggaggagctgaagaagaagtacggcatctag

SEQ ID NO: 204793 - DNA, 714 bp, Artificial Sequence
  derived and/or modified sequence
gtgcacagccaggctgcgaaggtgcagcgggcgggaggcccgttgggggctcagccggctgccagaagctctcgggctctttccttccgtgcccctcacttgctcatgggcccatgcctagccctgattcgttggacagagcctttgtagacccttgtctgagaccgagctatgtggggcgacctctggctcctcccgcctgcctctgccaatccgggcactgggacagaggctgagtttgagaaagctgcagaggaggttaggcaccttaagaccaagccatcggatgaggagatgctgttcatctatggccactacaaacaagcaactgtgggcgacataaatacagaacggcccgggatgttggacttcacgggcaaggccaagtgggatgcctggaatgagctgaaagggacttccaaggaagatgccatgaaagcttacatcaacaaagtagaagagctaaagaaaaaatacgggatatgagagactggatttggttactgtgccatgtgtttatcctaaactgagacaatgccttgtttttttctaataccgtggatggtgggaattcgggaaaataaccagttaaaccagctactcaaggctgctcaccatacggctctaacagattaggggctaaaacgattactgactttccttgagtagtttttatctgaaatcaattaaaagtgtatttgttactttaaataa

SEQ ID NO: 204794 - DNA, 576 bp, Artificial Sequence
  derived and/or modified sequence
gcgatcgcttcctggtcctcgcctcctccgctgtctccctggagttcttgcaagtcggccaggatgtctcagtgtagacccttgtctgagaccgagctatgtggggcgacctctggctcctcccgcctgcctctgccaatccgggcactgggacagaggctgagtttgagaaagctgcagaggaggttaggcaccttaagaccaagccatcggatgaggagatgctgttcatctatggccactacaaacaagcaactgtgggcgacataaatacagaacggcccgggatgttggacttcacgggcaaggccaagtgggatgcctggaatgagctgaaagggacttccaaggaagatgccatgaaagcttacatcaacaaagtagaagagctaaagaaaaaatacgggatatgagagactggatttggttactgtgccatgtgtttatcctaaactgagacaatgccttgtttttttctaataccgtggatggtgggaattcgggaaaataaccagttaaaccagctactcaaggctgctcaccatacggctctaacagattaggggctaaaacgat

SEQ ID NO: 204795 - DNA, 672 bp, Artificial Sequence
  derived and/or modified sequence
agtgcaatctgggcgatcgcttcctggtcctcgcctcctccgctgtctccctggagttcttgcaagtcggccaggatgtctcaggtacagcgcgtgcacagccaggctgcgaagacccttgtctgagaccgagctatgtggggcgacctctggctcctcccgcctgcctctgccaatccgggcactgggacagaggctgagtttgagaaagctgcagaggaggttaggcaccttaagaccaagccatcggatgaggagatgctgttcatctatggccactacaaacaagcaactgtgggcgacataaatacagaacggcccgggatgttggacttcacgggcaaggccaagtgggatgcctggaatgagctgaaagggacttccaaggaagatgccatgaaagcttacatcaacaaagtagaagagctaaagaaaaaatacgggatatgagagactggatttggttactgtgccatgtgtttatcctaaactgagacaatgccttgtttttttctaataccgtggatggtgggaattcgggaaaataaccagttaaaccagctactcaaggctgctcaccatacggctctaacagattaggggctaaaacgattactgactttccttgagtagtttttatctgaaatcaattaaaagtgtatttgttacttt

SEQ ID NO: 204796 - DNA, 315 bp, Artificial Sequence
  derived and/or modified sequence
atgtggggagacttgtggttgcttcccccagcgtcagctaatcccggtactgggaccgaggccgagttcgagaaggcggccgaagaagtgagacaccttaaaactaagcctagtgatgaggaaatgctgttcatatacgggcactacaagcaggctacggtgggtgacatcaacaccgaacgtcccggcatgctggattttactgggaaggctaaatgggatgcgtggaacgagctgaagggcacaagcaaagaggatgctatgaaggcatacattaataaggtggaggagttgaaaaagaaatacggaatttag

SEQ ID NO: 204797 - DNA, 315 bp, Artificial Sequence
  derived and/or modified sequence
atgtggggcgatctctggttattaccccctgcctctgctaaccccgggacggggaccgaagctgagtttgagaaagccgcagaagaagttcgccacctcaagacgaagcccagcgatgaggaaatgctgtttatttacggccactataaacaggcaacagtaggcgacattaacaccgagcgcccaggaatgctggattttactggcaaggccaagtgggacgcatggaatgaattgaaaggcactagcaaagaagacgcgatgaaggcatatattaacaaggtcgaggaattaaagaaaaagtatgggatttag

SEQ ID NO: 204798 - DNA, 315 bp, Artificial Sequence
  derived and/or modified sequence
atgtggggcgacttgtggttgcttccgcctgccagcgccaatcctggcactggaacagaggcagaatttgagaaagctgctgaggaggtaagacacttgaagactaagccttccgacgaagagatgctgttcatatatggccactacaaacaagccaccgtcggcgatatcaacacagaacgcccgggcatgctggattttaccggcaaggctaagtgggatgcatggaatgagctcaaggggacttccaaggaggatgccatgaaggcatatattaataaggtggaggagcttaaaaagaaatatggaatatag

SEQ ID NO: 204799 - DNA, 315 bp, Artificial Sequence
  derived and/or modified sequence
atgtggggagacctgtggctgctgcccccagccagcgccaaccctggcactggaacagaagctgagtttgagaaggctgctgaggaggtgcgccacctgaagaccaagcccagtgatgaggagatgctgttcatctacggccactacaagcaggccaccgtgggggacatcaacacagagcggcccggcatgctggacttcaccgggaaggccaagtgggatgcctggaatgagctgaagggcaccagcaaagaagatgccatgaaggcctacatcaacaaggtggaggagctgaagaagaagtatggcatctag

SEQ ID NO: 204800 - DNA, 315 bp, Artificial Sequence
  derived and/or modified sequence
atgtggggcgacctgtggctgctgccccccgccagcgccaaccccgggaccggaacagaggcagagttcgaaaaggccgcggaagaggtgaggcacttaaagacaaaacccagcgatgaggagatgctttttatttacggtcattacaaacaggccacggtgggcgacattaacactgagagacccggcatgctggatttcacagggaaggctaaatgggatgcttggaatgagctgaagggcacatcaaaagaagacgcaatgaaggcctatatcaacaaggtcgaggagctgaagaagaagtacggtatttag

SEQ ID NO: 204801 - DNA, 315 bp, Artificial Sequence
  derived and/or modified sequence
atgtggggcgacctgtggctgctgccccccgccagcgccaaccccggcacaggaactgaggccgaattcgaaaaggccgccgaggaagttcgtcatcttaagactaaacctagcgacgaagagatgctctttatctacggccattataaacaggccacagtgggcgatattaacactgagagacctggaatgctggacttcacaggaaaggccaaatgggacgcctggaatgagctcaaaggcacgtcaaaagaagatgcaatgaaagcctacattaataaagtggaggaactaaagaagaaatacggcatttag

SEQ ID NO: 204802 - DNA, 315 bp, Artificial Sequence
  derived and/or modified sequence
atgtggggcgacctgtggctgctgccccccgccagcgccaaccccggaacagggaccgaggcagaattcgagaaagcagctgaggaagttaggcatcttaagactaagccttctgacgaggagatgttgttcatatacgggcactacaaacaggccactgttggggatatcaatacagaaaggccaggaatgctagactttacagggaaggccaaatgggatgcttggaatgaactgaaaggtacctctaaggaagatgccatgaaggcctatatcaataaagtggaggagctcaagaagaaatacggcatttag

SEQ ID NO: 204803 - DNA, 315 bp, Artificial Sequence
  derived and/or modified sequence
atgtggggggacctttggctgcttcccccagcgtctgccaacccaggcacaggcacagaggctgagtttgagaaggcagcggaggaagttaggcatcttaaaacaaaaccttccgatgaagagatgctattcatctacggccattacaagcaagctactgtgggcgatattaacaccgaaaggcccggaatgttagattttactgggaaggcgaagtgggacgcttggaatgaactcaaggggacctcgaaagaagacgctatgaaggcatatattaataaggtggaggagctgaagaaaaaatacggcatctag

SEQ ID NO: 204804 - DNA, 315 bp, Artificial Sequence
  derived and/or modified sequence
atgtggggcgacctatggctgttgcctcccgctagcgccaatccaggcaccgggaccgaggctgaattcgagaaggctgcagaagaggtgcgacacctgaaaacaaaacctagcgacgaggaaatgttattcatatacggccactacaagcaggctactgttggggacataaatactgagcggcctggtatgctggactttactggcaaggcaaaatgggatgcatggaatgaactgaaaggcaccagcaaggaagacgccatgaaagcctatataaacaaagtggaggagcttaaaaaaaaatacggcatctag

SEQ ID NO: 204805 - DNA, 315 bp, Artificial Sequence
  derived and/or modified sequence
atgtggggggatctttggctcctaccacccgcatcagcaaacccagggacaggtacggaggccgagttcgagaaggcagccgaagaggtgcgtcacctaaagaccaagccaagcgacgaggagatgctgttcatctacgggcactataaacaagctacggtcggtgatattaatacagaacgacctggaatgctggacttcacgggaaaagccaagtgggatgcctggaacgaactcaaaggcactagtaaagaagacgcaatgaaggcatacattaataaagtcgaggagcttaaaaaaaaatacggaatctag

SEQ ID NO: 204806 - protein, 748 aa, Artificial Sequence
  derived and/or modified sequence
MGLRTAKKRGLGGGGKWKREEGGGTRGRREVRPACFLQSGGRGDPGDVGGPAGNPGCSPHPRAATRPPPLPAHTPAHTPEWCGAASAEAAEPRRAGPHLCIPAPGLTKTPILEKVPRKMAAKTPSSEESGLPKLPVPPLQQTLATYLQCMRHLVSEEQFRKSQAIVQQFGAPGGLGETLQQKLLERQEKTANWVSEYWLNDMYLNNRLALPVNSSPAVIFARQHFPGTDDQLRFAASLISGVLSYKALLDSHSIPTDCAKGQLSGQPLCMKQYYGLFSSYRLPGHTQDTLVAQNSSIMPEPEHVIVACCNQFFVLDVVINFRRLSEGDLFTQLRKIVKMASNEDERLPPIGLLTSDGRSEWAEARTVLVKDSTNRDSLDMIERCICLVCLDAPGGVELSDTHRALQLLHGGGYSKNGANRWYDKSLQFVVGRDGTCGVVCEHSPFDGIVLVQCTEHLLKHVTQSSRKLIRADSVSELPAPRRLRWKCSPEIQGHLASSAEKLQRIVKNLDFIVYKFDNYGKTFIKKQKCSPDAFIQVALQLAFYRLHRRLVPTYESASIRRFQEGRVDNIRSATPEALAFVRAVTDHKAAVPASEKLLLLKDAIRAQTAYTVMAITGMAIDNHLLALRELARAMCKELPEMFMDETYLMSNRFVLSTSQVPTTTEMFCCYGPVVPNGYGACYNPQPETILFCISSFHSCKETSSSKFAKAVEESLIDMRDLCSLLPPTESKPLATKEKATRPSQGHQP

SEQ ID NO: 204807 - DNA, 2247 bp, Artificial Sequence
  derived and/or modified sequence
atggggctgcgcaccgccaagaaaaggggccttggaggcgggggcaagtggaagcgcgaggaaggtggaggtacccgagggcgccgagaggtgcgccccgcctgctttctgcaaagcgggggcagaggagatcctggtgatgtcggagggcccgccggaaaccctgggtgcagtccccacccgcgggctgccactcgacccccccccctgccggcccatacccctgctcacacacctgaatggtgtggtgctgctagtgctgaggcagccgaaccccgcagagccggaccccatctgtgcattcccgctcctggcttgacaaagacacctatactggaaaaggtgcctagaaagatggccgccaagactcctagtagcgaagagtcggggctgccaaaactgcctgtgccacccctgcaacagacactcgctacatacctgcaatgtatgcgtcacttagtgtcagaggaacagttcaggaaatcccaagctatcgtgcaacagtttggggctcctggcgggctcggggaaaccctgcaacagaagctgttagaacgacaggaaaaaacagccaattgggtgtccgagtattggcttaacgacatgtatctaaataatcgtctcgcgctccccgtgaactcatcacccgctgttatctttgcgcgccaacacttccctggcactgatgaccagctcaggttcgcggcaagcctgatcagtggcgtgctcagctacaaagccctgttagacagccattccatccccacagattgtgctaagggacagctttccgggcagcccctgtgcatgaaacagtactacggcctgtttagctcttataggctccccggtcacacgcaggacacccttgtggctcaaaactctagtatcatgcctgagccagaacacgtgatcgtcgcatgctgtaaccaattcttcgtcctggatgtggtaattaactttcgaaggctgtctgaaggggatctattcacccagctccgaaaaatcgtcaaaatggcctccaacgaggacgaaagacttccccctattgggctgctgacttctgatggcaggagcgaatgggctgaagcaaggaccgtgctggtaaaggattctaccaatagggacagcctggacatgattgagcggtgcatttgcttggtgtgcctggatgctcccgggggagtcgagctatcagacactcatcgagcacttcagctattacacggtggtgggtattcgaaaaatggggccaaccggtggtatgacaagtctctgcagttcgtggtggggagggacggtacttgcggagtggtatgtgagcactctcctttcgacggcatcgtgctggtgcagtgcactgaacatctcctgaagcacgtgacccagagcagcagaaaactcattagggcggattcagtgtcagaactacccgcgccacgacgcttgcggtggaagtgttctccagagatccagggacacctcgctagttccgcggagaaactccagagaattgtgaagaacctcgactttatagtgtataaattcgataactacggaaagacctttataaaaaaacagaaatgctcgcccgatgccttcattcaagtggcattgcagctcgctttttacaggctgcatcgccgtctggtgccaacctatgagtctgcttcaatccgcagattccaagagggaagagtggataacatcaggtccgccacacctgaggccctcgcattcgtgagggcggtaactgatcataaagccgccgtgccggcctccgaaaagttgctgctgttgaaagacgcaatccgggcacagaccgcctacactgttatggcgatcacgggcatggcgatcgacaaccatttgcttgcattgcgcgaactcgcccgagccatgtgcaaagaacttcctgagatgttcatggacgagacatacctcatgtcaaaccgtttcgtgttgtcaaccagccaggtgcccaccacaaccgaaatgttttgctgctatggtcctgtggttccaaatggatacggcgcatgctacaatcctcagcccgaaaccatcttattctgcatatctagctttcactcctgtaaagagacatccagtagcaaattcgccaaggctgtcgaagaaagtttaatcgacatgcgcgatctgtgcagtctgctgccccccacagaatcaaaaccactagccaccaaggagaaagcgacaagaccttcgcaagggcaccaaccctag

SEQ ID NO: 204808 - DNA, 2247 bp, Artificial Sequence
  derived and/or modified sequence
atgggcctgaggacagccaagaagaggggcctgggcggcggcggcaagtggaagcgggaggagggcggcggcacccggggccggcgggaggtgcggcctgcctgcttcctgcagagcggcggccgcggggaccctggagatgtgggcggccctgctggcaaccctggctgcagcccccaccccagggctgccacccggcccccacccctgcctgcccacaccccagcccacaccccagagtggtgtggggccgccagcgctgaggccgctgagcccaggagagctggcccccacctgtgcatcccagcccctggcctgaccaagacccccatcctggagaaggtgcccaggaagatggccgccaagacccccagcagcgaggagagcggcctgcccaagctgcctgtgccccccctgcagcagaccctggccacctacctgcagtgcatgaggcacctggtgtctgaggagcagttcaggaagagccaggccatcgtgcagcagtttggagcccctgggggcctgggggagaccctgcagcagaagctgctggagcggcaggagaagacagccaactgggtgtctgagtactggctgaatgacatgtacctgaacaaccggctggccctgcctgtgaacagcagccctgctgtgatctttgcccggcagcacttccctggaacagatgaccagctgcgctttgctgccagcctcatcagcggcgtgctgagctacaaggccctgctggacagccacagcatccccacagactgtgccaagggccagctgagcggccagcccctgtgcatgaagcagtactacggcctcttcagcagctaccgcctgcccggccacacccaggacaccctggtggcccagaacagcagcatcatgcctgagcctgagcacgtgattgtggcctgctgcaaccagttctttgtgctggatgtggtgatcaacttccggcggctgtctgagggggacctcttcacccagctgaggaagatcgtgaagatggccagcaatgaagatgagcggctgccccccatcggcctgctgaccagtgatggccgctctgagtgggccgaggccaggacagtgctggtgaaggacagcaccaacagagacagcctggacatgattgagcgctgcatctgcctggtgtgcctggatgcccctggaggagtggagctgagtgacacccaccgggccctgcagctgctgcatggaggcggctacagcaagaatggagccaaccgctggtatgacaagagcctgcagtttgtggtgggcagagatggcacctgtggggtggtgtgtgagcacagcccctttgatggcatcgtgctggtgcagtgcacagagcacctgctgaagcacgtgacccagagcagcaggaagctgatccgggctgacagcgtgtctgagctgcctgccccccggcggctgcgctggaagtgcagccctgagatccagggccacctggccagcagcgctgagaagctgcagagaattgtgaagaacctggacttcatcgtgtacaagtttgacaactacggcaagaccttcatcaagaagcagaagtgcagcccagatgccttcatccaggtggccctgcagctggccttctaccgcctgcaccggcggctggtgcccacctatgagagcgccagcatccgccgcttccaggagggccgggtggacaacatccgcagcgccaccccagaggccctggcctttgtgcgggctgtgacagaccacaaggctgctgtgcctgccagcgagaagctgctgctgctgaaggatgccatccgggcccagacagcctacacagtgatggccatcaccggcatggccatcgacaaccacctgctggccctgcgggagctggcccgggccatgtgcaaggagctgcctgagatgttcatggatgagacctacctgatgagcaacagatttgtgctgagcaccagccaggtgcccaccaccacagagatgttctgctgctacggccctgtggtgcccaacggctacggggcctgctacaacccccagcctgagaccatcctcttctgcatcagcagcttccacagctgcaaggagaccagcagcagcaagtttgccaaggctgtggaggagagcctgattgacatgagggacctgtgcagcctgctgcccccaacagagagcaagcccctggccaccaaggagaaggccacccggcccagccagggccaccagccctag

SEQ ID NO: 204809 - DNA, 2247 bp, Artificial Sequence
  derived and/or modified sequence
atgggcctgcggaccgccaagaagcggggcctgggcggcggcggcaagtggaagcgtgaggaaggaggcggaacacgagggcggagggaggttcggcctgcttgcttcttgcagagcggcggccggggggatcccggagacgtgggtggccctgccggcaacccgggctgctctccccatcccagggccgccacaagacctccccctctgcctgctcatacacctgcacacacccctgaatggtgtggagcagcttctgctgaggcagctgagccgcgaagagccggaccacatctatgcatccccgctcctgggttgacgaaaacccctatcctcgagaaggttccacgaaagatggccgcaaagacaccttcttccgaagagtcgggccttccgaaactcccggtccctcccctgcagcagaccttggccacttatctccaatgcatgaggcatctggtgtcagaggagcagttcaggaaaagccaggccattgtccagcagtttggcgctcctggtggactcggggagacgctgcagcagaagctcctcgagcgccaagagaagaccgccaactgggtgtcagagtactggctgaacgacatgtacctgaacaacaggttggcgctaccagttaactcttccccagccgtgatttttgcgcggcagcattttccagggaccgacgatcagttacgcttcgcagcatccctgatttctggtgtgctgagttacaaggccctgctggacagccatagtatccctaccgactgtgctaaagggcagctgagcggccagccgctgtgcatgaagcagtattacggcctcttctccagctatcgattgcctggccatacccaggacaccctcgtagcccagaactccagtataatgcctgaacccgaacacgtaatagtcgcatgttgcaaccagttctttgtgttggatgtcgtcatcaacttccgcaggctctctgaaggtgacctatttactcagctgcgcaaaatcgtgaaaatggctagcaatgaggatgagaggctcccacctataggattgctcacttctgacggcaggtcagagtgggcggaggcccgcactgtattggtgaaggattcgacaaatagggactccctggatatgatagagagatgcatttgcttggtttgcctggacgccccgggcggggtggaactgagcgacacgcaccgggccctccaactccttcacgggggagggtattctaaaaacggggccaacaggtggtatgacaagagcctccagtttgtcgttgggcgagacggcacctgtggggtcgtgtgcgaacattctccttttgacggaatcgtgctggtccagtgtactgagcatctgcttaaacacgttacccagtccagccggaaattgattagagccgactcagtttccgagctgcccgccccgaggcggctgagatggaaatgcagtcctgagattcaagggcacctcgcgtcttccgccgagaaactacaacggatcgtgaagaacttagatttcatcgtgtataagttcgacaattacgggaaaacatttatcaaaaagcaaaagtgtagcccagatgcttttattcaagtagcgctgcaacttgccttctataggctgcataggcgactcgtacccacctacgaatctgcctccattcgtagattccaggagggaagagtagataatatccggagcgcgacacctgaagccctggccttcgtacgcgccgttaccgaccacaaggccgctgtccccgcctccgaaaaactccttcttttgaaggacgccatcagagctcagactgcatataccgtgatggccatcactggcatggccattgataatcatctgctggccttgcgcgagcttgcccgtgcaatgtgcaaagaattgccagagatgttcatggacgagacgtatctaatgagcaatcgtttcgtactatctacttcacaggtacccactaccacagagatgttttgttgctacgggcctgttgtaccaaacggctatggagcctgttacaatccccagcctgagaccatacttttctgcatctcaagcttccactcttgtaaggagacaagctcctcaaaattcgctaaagcagttgaagagtctctgattgacatgcgcgacctgtgcagcctgctgcctcccaccgaatcaaaacctctcgcaactaaagaaaaagcgactagaccttcccagggacaccagccatag

SEQ ID NO: 204810 - DNA, 2247 bp, Artificial Sequence
  derived and/or modified sequence
atgggattgcgcaccgctaaaaagcgcggtctgggcggtggcggaaaatggaagagagaggaagggggtggaacaagaggtcggcgagaggttagacctgcatgcttcctgcagtcaggcggaaggggagatcctggcgatgttggagggcctgccggaaacccgggatgctctccccacccaagggccgcaacccggcctccccctctacccgctcacacaccggctcacacacctgagtggtgcggtgccgcatccgccgaagccgctgagcctcgcagggccggtccacatctgtgcatacctgctcccggtctgaccaaaacacccattctggagaaagtccctcgcaaaatggctgctaagacaccttcttcagaagagagcggactccccaagctgccagttcccccattgcaacagaccttggctacatacctccagtgtatgcgtcatctggtgagcgaggaacagtttagaaagagccaggctatcgtgcagcagtttggagctccaggcggactgggcgagaccctgcaacaaaagctgttggagaggcaggaaaaaactgctaactgggtaagcgagtactggctcaacgatatgtatttgaataacaggttggctctgccggtgaattctagccccgctgtcatattcgccaggcaacactttcctggcactgatgaccagctgcgattcgctgccagccttatcagtggcgtactctcatataaagcactgttggacagtcattccattcctactgattgtgcgaaaggacaactgagcgggcaacccctgtgtatgaaacagtactatggattattcagttcgtataggctccctggacacacccaggacaccttggtcgcacagaacagttccattatgccagaaccggagcacgttattgttgcctgttgcaaccaattcttcgtcctggacgtggttattaacttcagaagactgagtgaaggcgacttatttacacaactccgaaagattgtcaagatggcttccaatgaggatgaaaggttaccgcctatcggactgctgacttctgacggaagatcagagtgggccgaggcccgtactgttctcgttaaagatagcaccaacagagatagcctggatatgattgaacggtgcatttgcttagtctgcttagacgcacccggaggcgtcgaactgtccgatacacatcgagcccttcaactgctgcacgggggaggatactctaaaaatggagccaatcgctggtacgacaaaagcctccaatttgtcgtcggcagagacggtacttgtggcgtggtgtgcgaacatagccctttcgacggaattgtattggtgcaatgcaccgagcacctgttaaagcacgtgacacagtcctcaagaaagctcatccgtgccgactcagtaagcgaacttccagctcctcggaggctacggtggaagtgctcgcctgagatacagggccatcttgcctccagcgctgagaaactgcaaagaatcgttaagaatctggatttcatcgtgtacaagttcgataactacggcaagaccttcatcaagaagcagaagtgctcaccagacgccttcattcaggtggcacttcagttggctttctaccgcctccatcggcgactggtcccgacttatgaatccgcgagcatacggcgattccaagaaggcagagtggataacattagatctgcaacgcctgaggccctggcctttgtccgtgccgtcacggaccacaaagcagctgtaccggctagcgagaagctgttgctgctcaaagacgccattcgcgctcagaccgcatatacagtcatggccatcacaggcatggccatagacaatcacctattggcactccgggagctggcccgtgccatgtgcaaagaacttcctgagatgtttatggacgagacatatcttatgagcaatagattcgtgctgtctaccagccaggtacccaccaccactgagatgttctgctgttacgggcctgtggtgcctaatggttacggagcctgctataaccctcagcccgagaccattttgttttgcatcagttcttttcactcatgcaaggaaacatcatcttccaaattcgcaaaggcagtcgaggaatccctgatcgacatgagagacctctgctcattgctcccacccaccgaatcaaaaccactggccacaaaagaaaaggctacccggcctagtcaaggccaccaaccatag

SEQ ID NO: 204811 - DNA, 2458 bp, Artificial Sequence
  derived and/or modified sequence
aaatgctgagctaggggcaggaggcatgggcgggacagtgttctgtgcccccttctagagcctaaatttgttgcccgagttcctccgggaagcgctccgggtagattctgggggccgggagctgagatccctgggcggggagctggggaagggatggggctgaggacagcgaagaagagggggcttgggggaggggggaaatggaagagagaggagggaggaggtacaagaggaaggagagaagtgcggccagcttgctttctccagtcgggtggccgcggggacccgggcgacgtcggaggccctgccgggaacccaggctgcagcccccacccccgcgctgcgacacgccccccaccccttccggctcacacccccgcccacactcctgagtggtgcggtgcagcgtcggccgaggcagcagagccgaggagagcaggtccacacctctgcatccctgcaccaggactcaccaagacgcccatcctggaaaaggtcccccgtaagatggcagcaaaaactcccagcagtgaggagtctgggctgcccaaactgcccgtgcccccgctgcagcagaccctggccacgtacctgcagtgcatgcgacacttggtgtctgaggagcagttcaggaagagccaggccattgtgcagcagtttggggcccctggtggcctcggcgagaccctgcagcagaaactcctggagcggcaggagaagacagccaactgggtgtctgagtactggctgaatgacatgtatctcaacaaccgcctggccctgcctgtcaactccagccctgccgtgatctttgctcggcagcacttccctggcaccgatgaccagctgaggtttgcagccagcctcatctctggtgtactcagctacaaggccctgctggacagccactccattcccactgactgtgccaaaggccagctgtcagggcagcccctttgcatgaagcaatactatgggctcttctcctcctaccggctccccggccatacccaggacacgctggtggctcagaacagcagcatcatgccggagcctgagcacgtcatcgtagcctgctgcaatcagttctttgtcttggatgttgtcattaatttccgccgtctcagtgagggggatctgttcactcagttgagaaagatagtcaaaatggcttccaacgaggacgagcgtttgcctccaattggcctgctgacgtctgacgggaggagcgagtgggccgaggccaggacggtcctcgtgaaagactccaccaaccgggactcgctggacatgattgagcgctgcatctgccttgtatgcctggacgcgccaggaggcgtggagctcagcgacacccacagggcactccagctccttcacggcggaggctacagcaagaacggggccaatcgctggtacgacaagtccctgcagtttgtggtgggccgagacggcacctgcggtgtggtgtgcgaacactccccattcgatggcatcgtcctggtgcagtgcactgagcatctgctcaagcacgtgacgcagagcagcaggaagctgatccgagcagactccgtcagcgagctccccgccccccggaggctgcggtggaaatgctccccggaaattcaaggccacttagcctcctcggcagaaaaacttcaacgaatagtaaagaaccttgacttcattgtctataagtttgacaactatgggaaaacattcattaagaagcagaaatgcagccctgatgccttcatccaggtggccctccagctggccttctacaggctccatcgaagactggtgcccacctacgagagcgcgtccatccgccgattccaggagggacgcgtggacaacatcagatcggccactccagaggcactggcttttgtgagagccgtgactgaccacaaggctgctgtgccagcttctgagaagcttctgctcctgaaggatgccatccgtgcccagactgcatacacagtcatggccataacagggatggccattgacaaccacctgctggcactgcgggagctggcccgggccatgtgcaaggagctgcccgagatgttcatggatgaaacctacctgatgagcaaccggtttgtcctctccactagccaggtgcccacaaccacggagatgttctgctgctatggtcctgtggtcccaaatgggtatggtgcctgctacaacccccagccagagaccatccttttctgcatctctagctttcacagctgcaaagagacttcttctagcaagtttgcaaaagctgtggaagaaagcctcattgacatgagagacctctgcagtctgctgccgcctactgagagcaagccattggcaacaaaggaaaaagccacgaggcccagccagggacaccaaccttgactcctgccactaggtttcacctcccaaacccagcctctagaacagccagaccctgcag

SEQ ID NO: 204812 - DNA, 2124 bp, Artificial Sequence
  derived and/or modified sequence
tcaacgccgctctggggacgcgtcaggcccagcgcacagcctgggcagctcagcctgtcagctgagcacgggcgcctcaaggggtgcggccctctcagaaggaaggtccacacctctgcatccctgcaccaggactcaccaagacgcccatcctggaaaaggtcccccgtaagatggcagcaaaaactcccagcagtgaggagtctgggctgcccaaactgcccgtgcccccgctgcagcagaccctggccacgtacctgcagtgcatgcgacacttggtgtctgaggagcagttcaggaagagccaggccattgtgcagcagtttggggcccctggtggcctcggcgagaccctgcagcagaaactcctggagcggcaggagaagacagccaactgggtgtctgagtactggctgaatgacatgtatctcaacaaccgcctggccctgcctgtcaactccagccctgccgtgatctttgctcggcagcacttccctggcaccgatgaccagctgaggtttgcagccagcctcatctctggtgtactcagctacaaggccctgctggacagccactccattcccactgactgtgccaaaggccagctgtcagggcagcccctttgcatgaagcaatactatgggctcttctcctcctaccggctccccggccatacccaggacacgctggtggctcagaacagcagcatcatgccggagcctgagcacgtcatcgtagcctgctgcaatcagttctttgtcttggatgttgtcattaatttccgccgtctcagtgagggggatctgttcactcagttgagaaagatagtcaaaatggcttccaacgaggacgagcgtttgcctccaattggcctgctgacgtctgacgggaggagcgagtgggccgaggccaggacggtcctcgtgaaagactccaccaaccgggactcgctggacatgattgagcgctgcatctgccttgtatgcctggacgcgccaggaggcgtggagctcagcgacacccacagggcactccagctccttcacggcggaggctacagcaagaacggggccaatcgctggtacgacaagtccctgcagtttgtggtgggccgagacggcacctgcggtgtggtgtgcgaacactccccattcgatggcatcgtcctggtgcagtgcactgagcatctgctcaagcacgtgacgcagagcagcaggaagctgatccgagcagactccgtcagcgagctccccgccccccggaggctgcggtggaaatgctccccggaaattcaaggccacttagcctcctcggcagaaaaacttcaacgaatagtaaagaaccttgacttcattgtctataagtttgacaactatgggaaaacattcattaagaagcagaaatgcagccctgatgccttcatccaggtggccctccagctggccttctacaggctccatcgaagactggtgcccacctacgagagcgcgtccatccgccgattccaggagggacgcgtggacaacatcagatcggccactccagaggcactggcttttgtgagagccgtgactgaccacaaggctgctgtgccagcttctgagaagcttctgctcctgaaggatgccatccgtgcccagactgcatacacagtcatggccataacagggatggccattgacaaccacctgctggcactgcgggagctggcccgggccatgtgcaaggagctgcccgagatgttcatggatgaaacctacctgatgagcaaccggtttgtcctctccactagccaggtgcccacaaccacggagatgttctgctgctatggtcctgtggtcccaaatgggtatggtgcctgctacaacccccagccagagaccatccttttctgcatctctagctttcacagctgcaaagagacttcttctagcaagtttgcaaaagctgtggaagaaagcctcattgacatgagagacctctgcagtctgctgccgcctactgagagcaagccattggcaacaaaggaaaaagccacgaggcccagccagggacaccaaccttgactcctgccactaggtttcacctcccaaacccagcctctagaacagccagaccctgcag

SEQ ID NO: 204813 - DNA, 2286 bp, Artificial Sequence
  derived and/or modified sequence
cccgccccgttgaggctttgagaaaggagtaggagccgagcattccggcagaggaagaaaaacggcccatcttttagagtccgacctctggaaattcgggtggccgcggggacccgggcgacgtcggaggccctgccgggaacccaggctgcagcccccacccccgcgctgcgacacgccccccaccccttccggctcacacccccgcccacactcctgagtggtgcggtgcagcgtcggccgaggcagcagagccgaggagagcaggtccacacctctgcatccctgcaccaggactcaccaagacgcccatcctggaaaaggtcccccgtaagatggcagcaaaaactcccagcagtgaggagtctgggctgcccaaactgcccgtgcccccgctgcagcagaccctggccacgtacctgcagtgcatgcgacacttggtgtctgaggagcagttcaggaagagccaggccattgtgcagcagtttggggcccctggtggcctcggcgagaccctgcagcagaaactcctggagcggcaggagaagacagccaactgggtgtctgagtactggctgaatgacatgtatctcaacaaccgcctggccctgcctgtcaactccagccctgccgtgatctttgctcggcagcacttccctggcaccgatgaccagctgaggtttgcagccagcctcatctctggtgtactcagctacaaggccctgctggacagccactccattcccactgactgtgccaaaggccagctgtcagggcagcccctttgcatgaagcaatactatgggctcttctcctcctaccggctccccggccatacccaggacacgctggtggctcagaacagcagcatcatgccggagcctgagcacgtcatcgtagcctgctgcaatcagttctttgtcttggatgttgtcattaatttccgccgtctcagtgagggggatctgttcactcagttgagaaagatagtcaaaatggcttccaacgaggacgagcgtttgcctccaattggcctgctgacgtctgacgggaggagcgagtgggccgaggccaggacggtcctcgtgaaagactccaccaaccgggactcgctggacatgattgagcgctgcatctgccttgtatgcctggacgcgccaggaggcgtggagctcagcgacacccacagggcactccagctccttcacggcggaggctacagcaagaacggggccaatcgctggtacgacaagtccctgcagtttgtggtgggccgagacggcacctgcggtgtggtgtgcgaacactccccattcgatggcatcgtcctggtgcagtgcactgagcatctgctcaagcacgtgacgcagagcagcaggaagctgatccgagcagactccgtcagcgagctccccgccccccggaggctgcggtggaaatgctccccggaaattcaaggccacttagcctcctcggcagaaaaacttcaacgaatagtaaagaaccttgacttcattgtctataagtttgacaactatgggaaaacattcattaagaagcagaaatgcagccctgatgccttcatccaggtggccctccagctggccttctacaggctccatcgaagactggtgcccacctacgagagcgcgtccatccgccgattccaggagggacgcgtggacaacatcagatcggccactccagaggcactggcttttgtgagagccgtgactgaccacaaggctgctgtgccagcttctgagaagcttctgctcctgaaggatgccatccgtgcccagactgcatacacagtcatggccataacagggatggccattgacaaccacctgctggcactgcgggagctggcccgggccatgtgcaaggagctgcccgagatgttcatggatgaaacctacctgatgagcaaccggtttgtcctctccactagccaggtgcccacaaccacggagatgttctgctgctatggtcctgtggtcccaaatgggtatggtgcctgctacaacccccagccagagaccatccttttctgcatctctagctttcacagctgcaaagagacttcttctagcaagtttgcaaaagctgtggaagaaagcctcattgacatgagagacctctgcagtctgctgccgcctactgagagcaagccattggcaacaaaggaaaaagccacgaggcccagccagggacaccaaccttgactcctgccactaggtttcacctcccaaacccagcctctagaacagccagaccctgcag

SEQ ID NO: 204814 - DNA, 2247 bp, Artificial Sequence
  derived and/or modified sequence
atgggcctgagaaccgccaagaagagaggcctgggcggcggcggcaagtggaagagagaggagggcggcggcaccagaggcagaagagaggtgagacccgcctgcttcctgcagagcggcggcagaggcgaccccggcgacgtgggcggccccgccggcaaccccggctgcagcccccaccccagagccgccaccagacccccccccctgcccgcccacacccccgcccacacccccgagtggtgcggcgccgccagcgccgaggccgccgagcccagaagagccggcccccacctgtgcatccccgcccccggcctgaccaagacccccatcctggagaaggtgcccagaaagatggccgccaagacccccagcagcgaggagagcggcctgcccaagctgcccgtgccccccctgcagcagaccctggccacctacctgcagtgcatgagacacctggtgagcgaggagcagttcagaaagagccaggccatcgtgcagcagttcggcgcccccggcggcctgggcgagaccctgcagcagaagctgctggagagacaggagaagaccgccaactgggtgagcgagtactggctgaacgacatgtacctgaacaacagactggccctgcccgtgaacagcagccccgccgtgatcttcgccagacagcacttccccggcaccgacgaccagctgagattcgccgccagcctgatcagcggcgtgctgagctacaaggccctgctggacagccacagcatccccaccgactgcgccaagggccagctgagcggccagcccctgtgcatgaagcagtactacggcctgttcagcagctacagactgcccggccacacccaggacaccctggtggcccagaacagcagcatcatgcccgagcccgagcacgtgatcgtggcctgctgcaaccagttcttcgtgctggacgtggtgatcaacttcagaagactgagcgagggcgacctgttcacccagctgagaaagatcgtgaagatggccagcaacgaggacgagagactgccccccatcggcctgctgaccagcgacggcagaagcgagtgggccgaggccagaaccgtgctggtgaaggacagcaccaacagagacagcctggacatgatcgagagatgcatctgcctggtgtgcctggacgcccccggcggcgtggagctgagcgacacccacagagccctgcagctgctgcacggcggcggctacagcaagaacggcgccaacagatggtacgacaagagcctgcagttcgtggtgggcagagacggcacctgcggcgtggtgtgcgagcacagccccttcgacggcatcgtgctggtgcagtgcaccgagcacctgctgaagcacgtgacccagagcagcagaaagctgatcagagccgacagcgtgagcgagctgcccgcccccagaagactgagatggaagtgcagccccgagatccagggccacctggccagcagcgccgagaagctgcagagaatcgtgaagaacctggacttcatcgtgtacaagttcgacaactacggcaagaccttcatcaagaagcagaagtgcagccccgacgccttcatccaggtggccctgcagctggccttctacagactgcacagaagactggtgcccacctacgagagcgccagcatcagaagattccaggagggcagagtggacaacatcagaagcgccacccccgaggccctggccttcgtgagagccgtgaccgaccacaaggccgccgtgcccgccagcgagaagctgctgctgctgaaggacgccatcagagcccagaccgcctacaccgtgatggccatcaccggcatggccatcgacaaccacctgctggccctgagagagctggccagagccatgtgcaaggagctgcccgagatgttcatggacgagacctacctgatgagcaacagattcgtgctgagcaccagccaggtgcccaccaccaccgagatgttctgctgctacggccccgtggtgcccaacggctacggcgcctgctacaacccccagcccgagaccatcctgttctgcatcagcagcttccacagctgcaaggagaccagcagcagcaagttcgccaaggccgtggaggagagcctgatcgacatgagagacctgtgcagcctgctgccccccaccgagagcaagcccctggccaccaaggagaaggccaccagacccagccagggccaccagccctag

SEQ ID NO: 204815 - protein, 1072 aa, Artificial Sequence
  derived and/or modified sequence
MAKATSGAAGLRLLLLLLLPLLGKVALGLYFSRDAYWEKLYVDQAAGTPLLYVHALRDAPEEVPSFRLGQHLYGTYRTRLHENNWICIQEDTGLLYLNRSLDHSSWEKLSVRNRGFPLLTVYLKVFLSPTSLREGECQWPGCARVYFSFFNTSFPACSSLKPRELCFPETRPSFRIRENRPPGTFHQFRLLPVQFLCPNISVAYRLLEGEGLPFRCAPDSLEVSTRWALDREQREKYELVAVCTVHAGAREEVVMVPFPVTVYDEDDSAPTFPAGVDTASAVVEFKRKEDTVVATLRVFDADVVPASGELVRRYTSTLLPGDTWAQQTFRVEHWPNETSVQANGSFVRATVHDYRLVLNRNLSISENRTMQLAVLVNDSDFQGPGAGVLLLHFNVSVLPVSLHLPSTYSLSVSRRARRFAQIGKVCVENCQAFSGINVQYKLHSSGANCSTLGVVTSAEDTSGILFVNDTKALRRPKCAELHYMVVATDQQTSRQAQAQLLVTVEGSYVAEEAGCPLSCAVSKRRLECEECGGLGSPTGRCEWRQGDGKGITRNFSTCSPSTKTCPDGHCDVVETQDINICPQDCLRGSIVGGHEPGEPRGIKAGYGTCNCFPEEEKCFCEPEDIQDPLCDELCRTVIAAAVLFSFIVSVLLSAFCIHCYHKFAHKPPISSAEMTFRRPAQAFPVSYSSSGARRPSLDSMENQVSVDAFKILEDPKWEFPRKNLVLGKTLGEGEFGKVVKATAFHLKGRAGYTTVAVKMLKENASPSELRDLLSEFNVLKQVNHPHVIKLYGACSQDGPLLLIVEYAKYGSLRGFLRESRKVGPGYLGSGGSRNSSSLDHPDERALTMGDLISFAWQISQGMQYLAEMKLVHRDLAARNILVAEGRKMKISDFGLSRDVYEEDSYVKRSQGRIPVKWMAIESLFDHIYTTQSDVWSFGVLLWEIVTLGGNPYPGIPPERLFNLLKTGHRMERPDNCSEEMYRLMLQCWKQEPDKRPVFADISKDLEKMMVKRRDYLDLAASTPSDSLIYDDGLSEEETPLVDCNNAPLPRALPSTWIENKLYGRISHAFTRF

SEQ ID NO: 204816 - protein, 458 aa, Artificial Sequence
  derived and/or modified sequence
MAKATSGAAGLRLLLLLLLPLLGKVALGLYFSRDAYWEKLYVDQAAGTPLLYVHALRDAPEEVPSFRLGQHLYGTYRTRLHENNWICIQEDTGLLYLNRSLDHSSWEKLSVRNRGFPLLTVYLKVFLSPTSLREGECQWPGCARVYFSFFNTSFPACSSLKPRELCFPETRPSFRIRENRPPGTFHQFRLLPVQFLCPNISVAYRLLEGEGLPFRCAPDSLEVSTRWALDREQREKYELVAVCTVHAGAREEVVMVPFPVTVYDEDDSAPTFPAGVDTASAVVEFKRKEDTVVATLRVFDADVVPASGELVRRYTSTLLPGDTWAQQTFRVEHWPNETSVQANGSFVRATVHDYRLVLNRNLSISENRTMQLAVLVNDSDFQGPGAGVLLLHFNVSVLPVSLHLPSTYSLSVSRRARRFAQIGKVCVENCLADLTGDAVSGRDEARSSGLGSQKHPGS

SEQ ID NO: 204817 - DNA, 3219 bp, Artificial Sequence
  derived and/or modified sequence
atggctaaggctacgtctggagcggccggcttacggttgctgctgctgctgctgctgccacttctgggcaaggttgccctgggactttatttttcacgggatgcctactgggagaagttgtacgtcgatcaggcagccggaacaccacttttgtatgtccatgctctgagagacgctcctgaagaagtgcccagttttcggctagggcagcatctctacggcacctaccggaccaggctgcacgagaacaactggatctgtatacaagaggatacaggactgttataccttaatcgatccctagatcatagtagctgggagaaattgagcgtgcggaatcgtggatttcctctcctgacagtgtatctgaaggttttcttgtcgcccacctcattgcgggaaggcgaatgccaatggcctggctgcgctagagtttatttttccttctttaacacctccttccccgcctgtagcagcctaaaacctcgggaactttgcttcccagagacgcggccttccttcaggatcagagaaaaccgaccccccggcactttccatcagtttcggttgttgcctgtgcagttcctgtgcccgaatatttccgttgcgtatcgtcttctggaaggcgagggccttccattccgatgcgcaccagacagccttgaggtttcaacccggtgggccttggaccgcgagcagagagagaaatacgagctagtcgccgtctgtacggtccacgcgggggcacgtgaagaggtggtgatggtccctttccctgtcacagtgtacgatgaggacgattctgctccaacattcccggcaggcgtggacactgcatcagccgtagtcgagttcaaaaggaaggaagataccgtggtggcgaccctgcgcgtctttgacgctgatgtggtgcccgccagtggtgagctcgtgcgcagatacacaagtacgctactccctggtgatacttgggctcagcagaccttcagagttgaacattggcccaacgaaacttccgtgcaggccaacgggtccttcgttcgggcaaccgtgcatgactacaggttggtcctgaatcggaacctttcaattagcgaaaatcgcaccatgcagctggcagttcttgtgaatgactctgattttcagggaccgggtgccggagtcctcttactccactttaatgtatcagtgctaccagtatccctccacctaccgtccacttactccctttctgtgagtaggagggctagacggtttgcacagattggcaaagtgtgtgtagagaactgccaggccttttccggtatcaatgttcagtacaaattgcacagctcaggagcgaactgtagcactctgggggtcgtgacttctgccgaagacacaagtggaatccttttcgtaaacgacacaaaagcattacgacgtcccaaatgtgcagaacttcactacatggtcgtagcgacagatcagcagacctctcggcaggcacaagcgcagctgctggtcacagttgagggtagttatgtcgctgaagaagcaggctgtccactcagctgcgcagtgtccaagcgtaggctggaatgtgaggagtgtggcggtcttgggtcgccaacgggcaggtgcgagtggagacagggagacggcaagggcattacccgaaatttctctacctgcagcccaagtacgaagacatgccccgatggacactgtgacgtcgtcgaaacgcaggatatcaatatctgcccccaagactgcctgcgaggatcaattgttggagggcacgaaccaggggaaccaagagggatcaaagccgggtacggtacttgcaattgctttcctgaagaagagaagtgtttctgtgagcccgaggacatccaggaccctctgtgtgacgagttatgccgtacagtaatcgcggcagccgttctctttagtttcattgtgtctgtgcttctgagcgcattctgcatacactgctaccataaatttgcccataagcctccaatcagctcagccgaaatgacctttcggcgccctgcccaagctttcccagtgtcctatagtagctccggggcgagacgtccttctttagatagcatggaaaaccaggtgtccgtcgacgctttcaagatcttggaagacccgaaatgggagtttcctcggaagaacctggtgctgggtaaaaccctgggcgaaggagagtttggtaaggtggtcaaggcaactgcatttcatctgaaagggagggctggatacactactgtcgcagtgaagatgctcaaagaaaatgcgtccccctcggagttaagggatcttttgagcgaatttaatgtgctcaaacaggtcaatcaccctcacgttattaaactttatggagcttgttctcaggatggtccccttctgcttattgtggagtacgcgaaatacggctctctgcgtggttttttacgcgaatctcgcaaggtgggacccggttacttgggttcggggggatctcgaaatagttcctccctggaccacccagatgaaagagccttaaccatgggggatttgatcagctttgcctggcagatttctcaggggatgcagtatctcgccgagatgaagctggttcatcgggacctggccgctcggaacatccttgttgccgagggaagaaagatgaaaatcagcgacttcggtttatctcgggacgtgtatgaagaggattcctacgtcaaaagaagtcagggacggatccccgtgaagtggatggcaatcgagtccttgtttgaccatatctatactacccagtccgacgtgtggagcttcggggtcctgctttgggagatcgtcactctggggggcaacccttatccagggatcccgcccgagagattattcaatctgctgaagacaggccatcggatggaaaggcccgacaattgtagtgaggaaatgtacagacttatgttgcaatgctggaagcaagagcccgacaaacgaccagtgtttgcggatatctccaaggacctggagaaaatgatggtgaaaaggcgagattacttggacctggctgccagcaccccatccgattcgctcatttacgacgatgggctgagcgaagaggagacacctctggtcgactgtaacaacgccccactgcctagagcccttccaagtacctggatcgaaaacaagctgtacggccgcatcagccacgcctttacgcgtttttag

SEQ ID NO: 204818 - DNA, 1377 bp, Artificial Sequence
  derived and/or modified sequence
atggctaaggccacttctggggcagcggggttaaggttgttgctgttgctgctccttcctctgcttggcaaagtcgcactcggtctgtatttcagccgggacgcctactgggagaaactgtacgtggatcaggcagccgggactccactcctatacgtccatgccctgcgcgacgcccctgaggaggtgccttcattccggttaggacagcacctgtatggaacttaccgaactcgcctgcacgagaataactggatttgcatccaggaagacacagggctgctttatttaaatcggtcattggaccactccagctgggagaaactgtccgttaggaaccgcggcttccctctgttgaccgtgtacctcaaggtttttctgtcccccacgagtctgagggaaggagaatgtcagtggccaggatgtgcccgcgtttatttctctttcttcaacacatctttccctgcatgttccagtctgaagccacgagaactgtgttttcccgaaactcggccctcgttcaggattcgggaaaacaggcctcctggaactttccaccaatttagactgctgcctgttcagtttctctgccccaacatttccgtggcttacaggctgctcgagggcgaaggcttaccctttcgctgcgctcccgactccttagaagtttccactcgatgggctttggaccgtgaacagagggagaagtacgaattagtggccgtctgtaccgttcacgcaggggcccgtgaagaggtagtgatggtcccgttccccgtcacagtgtacgacgaagacgactcggctcccacttttcccgccggtgtggataccgcttcagctgtggtggagttcaagcggaaggaagacactgtagtggcgaccctgagggtttttgatgccgacgtggtccccgcctccggcgagctggtgaggcgatataccagcacactgttgcccggcgatacctgggcccagcagacattccgggtagagcactggcctaacgagacatccgtccaggcgaatgggtcatttgtgagagctaccgtgcacgactacaggttagtgctgaatcgaaacctgtccatatctgagaaccgcaccatgcagttagccgtgttggttaacgatagtgactttcaagggcccggtgccggggttttactccttcactttaacgtgtctgtgttgccggtctctctgcatctgcccagcacttactccctttctgtctctcggcgagcccggcgcttcgcccagatcggaaaggtctgcgttgagaattgcctggctgacctgactggagatgctgtgtctggtcgcgatgaggcacgcagctccggactcggatctcagaagcaccctggctcgtag

SEQ ID NO: 204819 - DNA, 3219 bp, Artificial Sequence
  derived and/or modified sequence
atggccaaggccaccagcggggctgctggcctgcggctgctgctgctgctgctgctgcccctgctgggcaaggtggccctgggcctgtacttcagcagagatgcctactgggagaagctgtatgtggaccaggccgccggcacccccctgctgtatgtgcacgccctgagagatgcccctgaggaggtgcccagcttccggctgggccagcacctgtatggcacctaccgcacccggctgcacgagaacaactggatctgcatccaggaggacaccggcctgctgtacctgaacagaagcctggaccacagctcctgggagaagctgtctgtgaggaacagaggcttccccctgctgactgtgtacctgaaggtgttcctgagccccaccagcctgcgggagggggagtgccagtggccaggctgtgcccgggtgtacttctccttcttcaacaccagcttccctgcctgcagcagcctgaagccccgggagctgtgcttccctgagacccggcccagcttccgcatccgggagaacagacctcctggcaccttccaccagttccggctgctgcctgtgcagttcctgtgccccaacatctctgtggcctaccgcctgctggagggggagggcctgcccttccgctgtgccccagacagcctggaggtgtccacccgctgggccctggaccgggagcagcgggagaagtatgagctggtggccgtgtgcaccgtgcatgctggggcccgggaggaggtggtgatggtgcccttccctgtgacagtgtatgatgaagatgacagcgcccccaccttccctgctggggtggacacagccagcgctgtggtggagttcaagaggaaagaagatactgtggtggccaccctgcgggtgtttgatgctgatgtggtgcctgccagcggggagctggtgcggcgctacaccagcaccctgctgcccggggacacctgggcccagcagaccttccgggtggagcactggcccaatgagacctctgtgcaggccaacggcagctttgtgcgggccaccgtgcatgactaccgcctggtgctgaacagaaacctgagcatcagcgagaacagaaccatgcagctggccgtgctggtgaatgacagcgacttccagggccctggggccggcgtgctgctgctgcacttcaacgtgtctgtgctgcctgtgtccctgcacctgcccagcacctacagcctgtctgtgtcccggcgggccaggagatttgcccagatcggcaaggtgtgtgtggagaactgccaggccttcagcggcatcaacgtgcagtacaagctgcacagcagcggggccaactgcagcaccctgggcgtggtgaccagcgctgaggacaccagcggcatcctgtttgtgaatgacaccaaggccctgcggcggcccaagtgtgccgagctgcactacatggtggtggccacagaccagcagaccagccggcaggcccaggcccagctgctggtgacagtggagggcagctatgtggccgaggaggccggctgccccctgagctgtgctgtgtccaagaggcggctggagtgtgaggagtgtggcggcctgggcagccccaccggccgctgtgagtggaggcagggagatggcaagggcatcaccaggaacttcagcacctgcagccccagcaccaagacctgcccagatggccactgtgatgtggtggagacccaggacatcaacatctgcccccaggactgcctgcggggcagcatcgtgggcggccacgagcccggggagccccggggcatcaaggccggctacggcacctgcaactgcttccctgaggaggagaagtgcttctgtgagcctgaggacatccaggaccccctgtgtgatgagctgtgcaggacagtgattgctgctgctgtgctcttctccttcatcgtgtctgtgctgctgagcgccttctgcatccactgctaccacaagtttgcccacaagccacccatcagcagcgctgagatgaccttcagaagacctgcccaggccttccctgtgtcctacagcagcagcggggcccggcggcccagcctggacagcatggagaaccaggtgtctgtggatgccttcaagatcctggaggaccccaagtgggagttccccaggaagaacctggtgctgggcaagaccctgggggagggggagtttgggaaggtggtgaaggccacagccttccacctgaagggccgggccggctacaccaccgtggccgtgaagatgctgaaggaaaatgccagccccagcgagctgcgggacctgctgtctgagttcaacgtgctgaagcaggtgaaccacccccacgtgatcaagctgtatggagcctgcagccaggacggccccctgctgctgattgtggagtatgccaagtatggcagcctgcggggcttcctgcgggagagcaggaaggtgggccctggctacctgggcagcggcggcagcaggaacagcagcagcctggaccacccagatgagcgggccctgaccatgggagacctgatcagctttgcctggcagatcagccagggcatgcagtacctggccgagatgaagctggtgcaccgggacctggccgccaggaacatcctggtggccgagggcaggaagatgaagatcagtgactttggcctgagcagagatgtgtatgaggaggacagctatgtgaagaggagccagggccgcatccctgtgaagtggatggccatcgagagcctgtttgaccacatctacaccacccagagtgatgtgtggagctttggagtgctgctgtgggagatcgtgaccctgggcggcaacccctacccaggcatccccccagagcggctcttcaacctgctgaagacaggccacaggatggagaggccagacaactgcagcgaggagatgtaccgcctgatgctgcagtgctggaagcaggagccagacaagaggcctgtgtttgctgacatcagcaaggacctggagaagatgatggtgaagaggcgggactacctggacctggccgccagcacccccagcgacagcctcatctatgatgatggcctgtctgaggaggagacccccctggtggactgcaacaatgcccccctgccccgggccctgcccagcacctggattgagaacaagctgtatggccgcatcagccacgccttcacccgcttctag

SEQ ID NO: 204820 - DNA, 1377 bp, Artificial Sequence
  derived and/or modified sequence
atggccaaggccaccagcggggctgctggcctgcggctgctgctgctgctgctgctgcccctgctgggcaaggtggccctgggcctgtacttcagcagagatgcctactgggagaagctgtatgtggaccaggccgccggcacccccctgctgtatgtgcacgccctgagagatgcccctgaggaggtgcccagcttccggctgggccagcacctgtatggcacctaccgcacccggctgcacgagaacaactggatctgcatccaggaggacaccggcctgctgtacctgaacagaagcctggaccacagctcctgggagaagctgtctgtgaggaacagaggcttccccctgctgactgtgtacctgaaggtgttcctgagccccaccagcctgcgggagggggagtgccagtggccaggctgtgcccgggtgtacttctccttcttcaacaccagcttccctgcctgcagcagcctgaagccccgggagctgtgcttccctgagacccggcccagcttccgcatccgggagaacagacctcctggcaccttccaccagttccggctgctgcctgtgcagttcctgtgccccaacatctctgtggcctaccgcctgctggagggggagggcctgcccttccgctgtgccccagacagcctggaggtgtccacccgctgggccctggaccgggagcagcgggagaagtatgagctggtggccgtgtgcaccgtgcatgctggggcccgggaggaggtggtgatggtgcccttccctgtgacagtgtatgatgaagatgacagcgcccccaccttccctgctggggtggacacagccagcgctgtggtggagttcaagaggaaagaagatactgtggtggccaccctgcgggtgtttgatgctgatgtggtgcctgccagcggggagctggtgcggcgctacaccagcaccctgctgcccggggacacctgggcccagcagaccttccgggtggagcactggcccaatgagacctctgtgcaggccaacggcagctttgtgcgggccaccgtgcatgactaccgcctggtgctgaacagaaacctgagcatcagcgagaacagaaccatgcagctggccgtgctggtgaatgacagcgacttccagggccctggggccggcgtgctgctgctgcacttcaacgtgtctgtgctgcctgtgtccctgcacctgcccagcacctacagcctgtctgtgtcccggcgggccaggagatttgcccagatcggcaaggtgtgtgtggagaactgcctggccgacctgactggagatgctgtgtctggaagagatgaggcccggagcagcggcctgggcagccagaagcaccctggcagctag

SEQ ID NO: 204821 - DNA, 3219 bp, Artificial Sequence
  derived and/or modified sequence
atggccaaggccaccagcggcgccgccggcctgcggctgctgctgctgctgctgctgccactcctgggcaaggtggcgctcggactctacttttccagagacgcgtattgggagaaattgtatgtggatcaggctgccggcacaccactgctttatgttcacgccctgcgggatgccccggaagaggtaccatcctttcggctgggccagcacctgtacgggacttaccggaccaggctccacgagaataactggatttgtatacaagaggatacagggctgctctatcttaacagatcactcgatcatagctcctgggagaagttgagcgtgcggaatcgaggcttcccacttctcaccgtgtatctgaaggtttttttgtcacccacgagcctgagggagggtgagtgtcagtggcctggatgcgcaagggtgtatttctctttcttcaatactagcttccctgcttgcagttctctgaaaccccgggagctgtgttttccagagacacggccaagctttaggatccgtgaaaaccgccccccagggacatttcaccagttcagattgctccccgtacagtttctgtgccctaatattagtgtggcttatcgcttgctcgaaggggaaggtctcccttttaggtgcgcaccagatagcctggaagtttcaaccaggtgggccctcgatcgcgagcaacgggagaaatacgaactggttgcagtttgcactgtgcatgctggggccagggaagaagtggtcatggtgccctttcccgtaaccgtctacgatgaggacgacagtgccccaacatttcctgctggcgtggataccgcgagtgcggtcgtggaatttaaacgcaaggaagataccgtcgtggcaactctccgagtatttgacgccgacgtcgttccagcaagcggagaactggtgaggcgatacacgtcaaccttgctccctggagacacctgggctcagcaaacattccgggttgagcactggcccaatgagacatccgtccaggccaacggttcgttcgtaagggccaccgttcacgattatcgcctggtcctgaaccgcaatctgagtatttcagagaacagaactatgcagctcgctgtgttagtgaatgattctgactttcaggggcccggggcaggggtcctgctgcttcacttcaacgtcagcgtgttgcccgtctcactgcatttaccgtccacctattccctgtctgttagtcggcgagcacgcaggttcgcccagatcggcaaagtctgtgtggagaattgccaggctttttccggcattaatgtacaatataagctccacagctctggcgccaattgtagtacgttgggcgtagtgacctcggctgaagatacttctggcatcctgtttgtgaatgacacaaaggctctcaggaggcctaaatgtgccgaactgcactatatggttgtcgccaccgaccagcagaccagtcgccaggcacaagcccaactgctggtcactgtcgaggggagctacgttgccgaagaagcaggctgccctctgtcctgtgcagtaagcaagcgtcggctggagtgcgaggagtgcgggggtttaggctctcctacaggaaggtgtgaatggcgccagggtgatggcaaaggcattacgcgaaactttagtacatgctcccctagcaccaagacatgccccgacggtcattgtgacgtggtggaaacacaggacattaatatctgcccccaggattgtctgcgcggctccatcgtaggaggccacgaaccaggcgagcccaggggtattaaggctgggtacggaacatgcaattgttttcccgaagaggaaaaatgcttttgtgagcctgaggacattcaggatccactgtgcgacgagctgtgcagaacagtcattgccgccgccgtgcttttttcttttattgtctcagttttgttatcggccttctgtattcattgctaccacaaatttgcccataaaccgccgatctctagcgcagagatgacattccgacgcccagctcaggcatttcccgtgtcgtatagcagctcgggtgctcggcgacctagcctcgattcaatggagaaccaggttagcgtggatgcgttcaagattctggaggaccctaagtgggagttccccagaaagaaccttgtcctcgggaagactctgggtgaaggggaatttggtaaggtcgtgaaggctaccgccttccacctcaaaggtagggcaggctacacgactgtcgctgttaaaatgctgaaggaaaatgcatcaccctccgagctccgggacctcctaagtgaattcaatgtgcttaagcaggtcaaccacccacatgtaatcaaattatacggtgcatgttcccaggatggacctcttcttcttattgtggaatacgcaaaatatggtagtctcagaggattcctgagagagtcacgaaaagttggccccgggtacttgggtagtggaggaagccggaactcgtcaagccttgaccaccccgatgagcgcgcactgaccatgggcgatcttatcagttttgcttggcaaatctcccagggcatgcaatacttggcagagatgaagctggtgcaccgggacctggccgctagaaacattctggtcgctgaagggagaaaaatgaagattagcgatttcgggttgtccagggacgtgtacgaagaggatagctacgtcaagcgaagtcagggaagaatacccgtaaaatggatggcgattgaatcactatttgatcacatctatactactcagtccgacgtgtggagctttggggtattactctgggagattgtgaccctgggtgggaacccttaccccggtatcccacccgagcggctcttcaacctgcttaagacgggacatcgtatggagcgccccgacaattgttctgaagagatgtacagacttatgctacaatgctggaaacaggagcccgacaaaagaccagtgttcgccgacatctctaaggatctcgagaagatgatggtgaagagaagagactatcttgatctggccgcatccactcctagtgattccctcatatatgatgatgggctgtcagaggaagagacgcccctggtcgactgcaataacgcacccctgccccgggcccttccatctacctggatcgaaaataaactttacggccgcatttcacacgcattcacacggttttag

SEQ ID NO: 204822 - DNA, 1377 bp, Artificial Sequence
  derived and/or modified sequence
atggccaaggccaccagcggcgccgccggcctgcggctgctgctgttgctcctactcccattactgggcaaggtcgccttgggattatatttttcacgggacgcctactgggaaaagctctacgttgatcaggctgcgggaacaccattactgtatgtgcacgccttaagagatgcccccgaggaggtgcctagtttccggctgggtcagcacttgtatgggacctatcgaaccaggcttcatgaaaataattggatctgtatccaggaggacacagggctcttgtacctgaatcgcagcttggaccattcttcctgggagaagctgagcgtgcggaaccggggcttccctctcctcaccgtttatttgaaagttttcttgtcccctacgagcctgcgcgagggtgagtgccagtggcctggttgcgcccgcgtttactttagttttttcaataccagcttccccgcatgctcctccctgaaaccccgggaactgtgtttccctgaaacacgcccctccttcagaatcagggagaacaggccacctggcacttttcatcaattccgcttgttacctgtacagttcttgtgtccaaacatctccgtggcctaccggctgttggagggtgaggggcttcccttccggtgcgctcctgacagtctggaggtctcgaccagatgggctctggaccgcgagcagagagagaaatatgaacttgtcgccgtctgtactgttcacgctggagcgagagaggaggtcgttatggttcctttccctgtgaccgtatatgacgaggacgatagcgctcctacctttcctgcaggcgtggacaccgctagtgccgtcgtcgaatttaagcgcaaagaagatacagtggtggccacgctgcgggttttcgacgccgatgtcgtgccagcatccggcgagctggtgcgacggtacacttcaactctactgccaggtgacacctgggcgcagcagaccttccgcgttgagcactggcccaatgagacctccgtgcaggccaatggatcctttgtgcgggcaaccgtgcatgactatcgactggtcctgaataggaacctttcgatttcagagaatagaaccatgcagttagccgtgctggtaaacgactcggacttccaaggtcctggcgccggcgttcttctgctgcattttaacgtgtcggtgctgccagtttccctgcacctgccttccacgtatagcttgtctgtgagccgccgggcacgccgcttcgcacagattggaaaagtctgtgtggagaactgcctggctgacctcacaggagacgctgtgagtggtagagacgaggctcgttcatctggcctgggtagtcaaaaacaccccggctcgtag

SEQ ID NO: 204823 - DNA, 3219 bp, Artificial Sequence
  derived and/or modified sequence
atggcgaaagccaccagcggagccgctgggctccgacttctgctactgctgcttctgccactcctcggcaaggttgcgctggggttgtacttctctcgggatgcctactgggagaagctttacgtagaccaggctgcaggcactcctctgctgtacgtgcatgcgctccgcgatgcccctgaagaagttccatccttcaggctgggtcagcatctttacggcacatacagaacacgtctgcatgaaaacaactggatatgtattcaggaagacactgggttgctgtacttgaaccggagcttggaccactctagctgggaaaagctgtcggtcaggaacagagggttccctcttctcacagtatacctgaaggtgtttctcagcccaacctcccttagagagggggagtgtcagtggcccggttgcgccagggtgtatttcagcttttttaacacctccttccctgcttgcagctctcttaagcctcgcgagctgtgctttcccgagacgcgcccttctttccgcatacgcgagaatcgccctccaggcacatttcaccagtttaggctcctacctgtgcagttcttgtgccccaatatcagtgtggcttatcgcctcctcgagggtgaaggcctgcccttcaggtgcgcccctgattcacttgaggtgtctacccgctgggctctcgatcgggagcagcgcgaaaaatacgagctggtagccgtctgtacagttcatgccggtgccagagaggaggtcgtcatggttccctttcccgtcacagtgtatgatgaggatgattcggctcctacctttcctgcaggcgtggataccgcgagcgctgtcgttgagttcaaacgcaaagaggatacggtcgtcgctacgctgcgcgtcttcgatgccgacgtggtgccggcttctggtgagttagttcgtcgctacaccagtacactgcttcctggtgacacctgggcccagcagaccttccgggtcgagcactggcccaatgaaacatctgttcaggctaatggaagcttcgtgcgagcaactgtccacgactacaggttagttctgaaccggaacctgtctatctccgaaaatcgcacaatgcagctcgccgtgctggttaatgactctgatttccaggggccaggcgctggagttctcttactgcactttaatgtctccgtcctgcctgtttcactgcacctgcccagcacctactcgctgagcgtttcacggagggctaggagatttgcacagattggaaaagtttgtgtcgagaactgtcaggccttctccgggattaacgttcagtataagcttcatagtagcggagctaactgctcaacgctaggggtggtgacttccgcagaggataccagcgggattttatttgttaatgatactaaggctctgagaagaccaaaatgcgccgaactgcactacatggtagtcgcgacggaccaacagacgtcccggcaggcacaggcgcagctattagtgacagtggagggctcttatgtcgccgaggaagccggttgtcccttatcttgtgccgtttccaagcgcagactcgaatgtgaagagtgcggcggactaggatccccaacaggcaggtgcgagtggagacagggcgatggcaaagggattaccaggaatttttccacttgctctccatctacgaaaacttgcccggatgggcactgtgacgtagtggagacccaggacataaatatatgccctcaagattgcctgcggggttccattgtagggggtcatgagcctggggaaccacggggaatcaaagccggatatggaacttgtaactgcttccctgaggaggaaaaatgtttctgcgaacccgaagatatccaggacccgctctgtgatgagctttgtagaacagtcatcgcagctgccgtgctgtttagtttcatcgtgtctgtgttactgagcgctttctgcatccactgttatcataaattcgcacacaaaccccctatctcaagcgccgagatgactttccgacggcctgcccaggcattccctgtctcatactcatcaagtggggcaaggagacccagcctcgattccatggaaaaccaagtgagcgttgatgcgtttaagatcttggaagaccccaagtgggaatttcccaggaagaacctcgtgcttggcaagactttgggagagggagaatttgggaaagttgttaaggctacagcttttcacctcaagggcagggcgggttacacaacagtggctgttaagatgctcaaagagaatgcatcccccagcgagctgcgggacctacttagcgagtttaacgtgctgaagcaggtaaatcatccgcacgtgattaaactgtatggggcttgcagccaggatgggccattactgctgatcgtggagtatgccaaatacggctctctgcgagggtttctgcgggagtcacggaaggtgggaccgggatatctgggctccggaggttctaggaactcctctagtctcgaccacccagacgagcgcgctcttacaatgggggatctgatttcttttgcctggcagatcagtcagggtatgcagtaccttgccgagatgaaactcgttcatcgtgacctggccgctaggaacatcctcgtagctgaggggcgaaaaatgaaaatctccgatttcggtctgtcccgcgacgtgtacgaggaagactcatacgtcaaaagatctcagggtaggattccagtaaaatggatggctattgagtctctatttgatcatatctacacgacgcagtccgacgtgtggagttttggggtgttactgtgggagattgttaccctagggggaaacccttatcccggtataccgcctgaacggttgttcaatctcctgaaaaccggacatcgcatggagcgcccagacaattgctcagaagaaatgtatcggttgatgctgcaatgctggaaacaagagcctgacaagcggccagttttcgcggatatttctaaggacttggaaaagatgatggtgaaacgcagggactatttggatctggctgctagcacaccatcagatagtctgatatatgacgatggactgtccgaagaggagaccccactggttgattgcaataacgcccctctccctcgcgcacttccctctacatggatcgaaaacaaattatatggaagaatcagtcacgccttcactcgcttttag

SEQ ID NO: 204824 - DNA, 1377 bp, Artificial Sequence
  derived and/or modified sequence
atggccaaagctacttcaggcgctgctggcctccggttgctattgctgctgctccttcccctcctcggaaaagtggcccttggtttgtattttagtcgggacgcatattgggagaaattatacgtcgatcaagcggcaggcactccccttttgtatgtacatgcgctgagagacgcccctgaagaggtgccatcatttcgacttgggcagcacctgtatgggacctaccgtaccagattacacgaaaataactggatctgcatccaggaagacaccgggctcctgtacctgaacaggagtctggaccactccagctgggagaaactaagcgtccggaaccgcggtttccctctgctgaccgtctacttgaaagtgttcctgtctcccacttctctgagagagggggagtgccaatggcctggatgtgcgcgagtgtattttagttttttcaacacctctttccccgcatgctcctcgctgaaacctagggagctctgtttccctgagacacgccctagttttcggatacgggagaacaggccccctggaactttccatcaattcaggcttctgcccgtgcaattcctatgtccgaatatcagtgtagcatataggctgctggaaggagaaggattaccattcagatgtgctccagactcacttgaagtctctactagatgggctttggatagggagcagcgcgagaagtacgaactcgttgctgtctgtacggttcacgcaggtgccagagaggaggtagttatggtgccgtttccagtaaccgtgtacgatgaagatgactctgcgccaacatttccagccggtgtcgataccgcgtctgctgtggtagagttcaaacgcaaggaggataccgtcgtagctactcttcgtgtgtttgacgccgatgtggtgccagctagcggagaactggttcgcaggtacacatccaccctgctgccaggcgacacgtgggcccagcagaccttcagggtggaacattggcccaacgaaactagcgttcaggccaacggctcatttgtgcgggcaacagtgcacgattatcgcctggttctgaatcgcaaccttagcatcagcgagaaccgcaccatgcaacttgctgtactcgtcaacgactcagatttccaggggcctggagcaggtgtgctgcttttgcattttaacgttagtgtgctgccggtctcgttgcatctcccttcaacctattccctctcggtaagccgcagagccaggcggttcgcccagattggtaaagtgtgcgtcgaaaactgtctggccgacctcactggggatgccgtgtccgggagggacgaggccagatcgtctggtcttggatctcagaaacaccccggttcatag

SEQ ID NO: 204825 - DNA, 4097 bp, Artificial Sequence
  derived and/or modified sequence
ccgaagcagggcgcgcagcagcgctgagtgccccggaacgtgcgtcgcgcccccagtgtccgtcgcgtccgccgcgccccgggcggggatggggcggccagactgagcgccgcacccgccatccagacccgccggccctagccgcagtccctccagccgtggccccagcgcgcacgggcgatggcgaaggcgacgtccggtgccgcggggctgcgtctgctgttgctgctgctgctgccgctgctaggcaaagtggcattgggcctctacttctcgagggatgcttactgggagaagctgtatgtggaccaggcagccggcacgcccttgctgtacgtccatgccctgcgggacgcccctgaggaggtgcccagcttccgcctgggccagcatctctacggcacgtaccgcacacggctgcatgagaacaactggatctgcatccaggaggacaccggcctcctctaccttaaccggagcctggaccatagctcctgggagaagctcagtgtccgcaaccgcggctttcccctgctcaccgtctacctcaaggtcttcctgtcacccacatcccttcgtgagggcgagtgccagtggccaggctgtgcccgcgtatacttctccttcttcaacacctcctttccagcctgcagctccctcaagccccgggagctctgcttcccagagacaaggccctccttccgcattcgggagaaccgacccccaggcaccttccaccagttccgcctgctgcctgtgcagttcttgtgccccaacatcagcgtggcctacaggctcctggagggtgagggtctgcccttccgctgcgccccggacagcctggaggtgagcacgcgctgggccctggaccgcgagcagcgggagaagtacgagctggtggccgtgtgcaccgtgcacgccggcgcgcgcgaggaggtggtgatggtgcccttcccggtgaccgtgtacgacgaggacgactcggcgcccaccttccccgcgggcgtcgacaccgccagcgccgtggtggagttcaagcggaaggaggacaccgtggtggccacgctgcgtgtcttcgatgcagacgtggtacctgcatcaggggagctggtgaggcggtacacaagcacgctgctccccggggacacctgggcccagcagaccttccgggtggaacactggcccaacgagacctcggtccaggccaacggcagcttcgtgcgggcgaccgtacatgactataggctggttctcaaccggaacctctccatctcggagaaccgcaccatgcagctggcggtgctggtcaatgactcagacttccagggcccaggagcgggcgtcctcttgctccacttcaacgtgtcggtgctgccggtcagcctgcacctgcccagtacctactccctctccgtgagcaggagggctcgccgatttgcccagatcgggaaagtctgtgtggaaaactgccaggcattcagtggcatcaacgtccagtacaagctgcattcctctggtgccaactgcagcacgctaggggtggtcacctcagccgaggacacctcggggatcctgtttgtgaatgacaccaaggccctgcggcggcccaagtgtgccgaacttcactacatggtggtggccaccgaccagcagacctctaggcaggcccaggcccagctgcttgtaacagtggaggggtcatatgtggccgaggaggcgggctgccccctgtcctgtgcagtcagcaagagacggctggagtgtgaggagtgtggcggcctgggctccccaacaggcaggtgtgagtggaggcaaggagatggcaaagggatcaccaggaacttctccacctgctctcccagcaccaagacctgccccgacggccactgcgatgttgtggagacccaagacatcaacatttgccctcaggactgcctccggggcagcattgttgggggacacgagcctggggagccccgggggattaaagctggctatggcacctgcaactgcttccctgaggaggagaagtgcttctgcgagcccgaagacatccaggatccactgtgcgacgagctgtgccgcacggtgatcgcagccgctgtcctcttctccttcatcgtctcggtgctgctgtctgccttctgcatccactgctaccacaagtttgcccacaagccacccatctcctcagctgagatgaccttccggaggcccgcccaggccttcccggtcagctactcctcttccggtgcccgccggccctcgctggactccatggagaaccaggtctccgtggatgccttcaagatcctggaggatccaaagtgggaattccctcggaagaacttggttcttggaaaaactctaggagaaggcgaatttggaaaagtggtcaaggcaacggccttccatctgaaaggcagagcagggtacaccacggtggccgtgaagatgctgaaagagaacgcctccccgagtgagctgcgagacctgctgtcagagttcaacgtcctgaagcaggtcaaccacccacatgtcatcaaattgtatggggcctgcagccaggatggcccgctcctcctcatcgtggagtacgccaaatacggctccctgcggggcttcctccgcgagagccgcaaagtggggcctggctacctgggcagtggaggcagccgcaactccagctccctggaccacccggatgagcgggccctcaccatgggcgacctcatctcatttgcctggcagatctcacaggggatgcagtatctggccgagatgaagctcgttcatcgggacttggcagccagaaacatcctggtagctgaggggcggaagatgaagatttcggatttcggcttgtcccgagatgtttatgaagaggattcctacgtgaagaggagccagggtcggattccagttaaatggatggcaattgaatccctttttgatcatatctacaccacgcaaagtgatgtatggtcttttggtgtcctgctgtgggagatcgtgaccctagggggaaacccctatcctgggattcctcctgagcggctcttcaaccttctgaagaccggccaccggatggagaggccagacaactgcagcgaggagatgtaccgcctgatgctgcaatgctggaagcaggagccggacaaaaggccggtgtttgcggacatcagcaaagacctggagaagatgatggttaagaggagagactacttggaccttgcggcgtccactccatctgactccctgatttatgacgacggcctctcagaggaggagacaccgctggtggactgtaataatgcccccctccctcgagccctcccttccacatggattgaaaacaaactctatggtagaatttcccatgcatttactagattctagcaccgctgtcccctttgcactatccttcctctctgtgatgctttttaaaaatgtttctggtctgaacaaaaccaaagtctgctctgaacctttttatttgtaaatgtctgactttgcatccagtttacatttaggcattattgcaactatgtttttctaaaaggatgtgaaaataagtgtaattaccacattgcccagcaacttaggatggtagaggaaaaaacagatcagggcggaactctcaggggagaccaagaacaggttgaataaggcgcttctggggtgggaatcaagtcatagtacttctactttaactaagtggataaatatacaaatctggggaggtattcagttgagaaaggagccaccagcaccactcagcctgcactgggagcacagccaggttcccccagacccctcctgggcaggcaggtgcctctcagaggccacccggcactggcgagcagccactggccaagcctcagccccagtcccagccacatgtcctccatcaggggtagcgaggttgcaggagctggctggccctgggaggacgcacccccactgctgttttcacatcctttcccttacccaccttcaggacggttgtcacttatgaagtcagtgctaaagctggagcagttgctttttgaaagaacatggtctgtggtgctgtggtcttacaatggacagtaaat

SEQ ID NO: 204826 - DNA, 2189 bp, Artificial Sequence
  derived and/or modified sequence
ccgaagcagggcgcgcagcagcgctgagtgccccggaacgtgcgtcgcgcccccagtgtccgtcgcgtccgccgcgccccgggcggggatggggcggccagactgagcgccgcacccgccatccagacccgccggccctagccgcagtccctccagccgtggccccagcgcgcacgggcgatggcgaaggcgacgtccggtgccgcggggctgcgtctgctgttgctgctgctgctgccgctgctaggcaaagtggcattgggcctctacttctcgagggatgcttactgggagaagctgtatgtggaccaggcagccggcacgcccttgctgtacgtccatgccctgcgggacgcccctgaggaggtgcccagcttccgcctgggccagcatctctacggcacgtaccgcacacggctgcatgagaacaactggatctgcatccaggaggacaccggcctcctctaccttaaccggagcctggaccatagctcctgggagaagctcagtgtccgcaaccgcggctttcccctgctcaccgtctacctcaaggtcttcctgtcacccacatcccttcgtgagggcgagtgccagtggccaggctgtgcccgcgtatacttctccttcttcaacacctcctttccagcctgcagctccctcaagccccgggagctctgcttcccagagacaaggccctccttccgcattcgggagaaccgacccccaggcaccttccaccagttccgcctgctgcctgtgcagttcttgtgccccaacatcagcgtggcctacaggctcctggagggtgagggtctgcccttccgctgcgccccggacagcctggaggtgagcacgcgctgggccctggaccgcgagcagcgggagaagtacgagctggtggccgtgtgcaccgtgcacgccggcgcgcgcgaggaggtggtgatggtgcccttcccggtgaccgtgtacgacgaggacgactcggcgcccaccttccccgcgggcgtcgacaccgccagcgccgtggtggagttcaagcggaaggaggacaccgtggtggccacgctgcgtgtcttcgatgcagacgtggtacctgcatcaggggagctggtgaggcggtacacaagcacgctgctccccggggacacctgggcccagcagaccttccgggtggaacactggcccaacgagacctcggtccaggccaacggcagcttcgtgcgggcgaccgtacatgactataggctggttctcaaccggaacctctccatctcggagaaccgcaccatgcagctggcggtgctggtcaatgactcagacttccagggcccaggagcgggcgtcctcttgctccacttcaacgtgtcggtgctgccggtcagcctgcacctgcccagtacctactccctctccgtgagcaggagggctcgccgatttgcccagatcgggaaagtctgtgtggaaaactgcctggcagatctcacaggggatgcagtatctggccgagatgaagctcgttcatcgggacttggcagccagaaacatcctggtagctgaggggcggaagatgaagatttcggatttcggcttgtcccgagatgtttatgaagaggattcctacgtgaagaggagccagggtcggattccagttaaatggatggcaattgaatccctttttgatcatatctacaccacgcaaagtgatgtatggtcttttggtgtcctgctgtgggagatcgtgaccctagggggaaacccctatcctgggattcctcctgagcggctcttcaaccttctgaagaccggccaccggatggagaggccagacaactgcagcgaggagatgtaccgcctgatgctgcaatgctggaagcaggagccggacaaaaggccggtgtttgcggacatcagcaaagacctggagaagatgatggttaagaggagagactacttggaccttgcggcgtccactccatctgactccctgatttatgacgacggcctctcagaggaggagacaccgctggtggactgtaataatgcccccctccctcgagccctcccttccacatggattgaaaacaaactctatggtagaatttcccatgcatttactagattctagcaccgctgtcccctttgcactatccttcctctctgtgatgctttttaaaaatgtttctggtctg

SEQ ID NO: 204827 - DNA, 3219 bp, Artificial Sequence
  derived and/or modified sequence
atggccaaggccaccagcggcgccgccggcctgagactgctgctgctgctgctgctgcccctgctgggcaaggtggccctgggcctgtacttcagcagagacgcctactgggagaagctgtacgtggaccaggccgccggcacccccctgctgtacgtgcacgccctgagagacgcccccgaggaggtgcccagcttcagactgggccagcacctgtacggcacctacagaaccagactgcacgagaacaactggatctgcatccaggaggacaccggcctgctgtacctgaacagaagcctggaccacagcagctgggagaagctgagcgtgagaaacagaggcttccccctgctgaccgtgtacctgaaggtgttcctgagccccaccagcctgagagagggcgagtgccagtggcccggctgcgccagagtgtacttcagcttcttcaacaccagcttccccgcctgcagcagcctgaagcccagagagctgtgcttccccgagaccagacccagcttcagaatcagagagaacagaccccccggcaccttccaccagttcagactgctgcccgtgcagttcctgtgccccaacatcagcgtggcctacagactgctggagggcgagggcctgcccttcagatgcgcccccgacagcctggaggtgagcaccagatgggccctggacagagagcagagagagaagtacgagctggtggccgtgtgcaccgtgcacgccggcgccagagaggaggtggtgatggtgcccttccccgtgaccgtgtacgacgaggacgacagcgcccccaccttccccgccggcgtggacaccgccagcgccgtggtggagttcaagagaaaggaggacaccgtggtggccaccctgagagtgttcgacgccgacgtggtgcccgccagcggcgagctggtgagaagatacaccagcaccctgctgcccggcgacacctgggcccagcagaccttcagagtggagcactggcccaacgagaccagcgtgcaggccaacggcagcttcgtgagagccaccgtgcacgactacagactggtgctgaacagaaacctgagcatcagcgagaacagaaccatgcagctggccgtgctggtgaacgacagcgacttccagggccccggcgccggcgtgctgctgctgcacttcaacgtgagcgtgctgcccgtgagcctgcacctgcccagcacctacagcctgagcgtgagcagaagagccagaagattcgcccagatcggcaaggtgtgcgtggagaactgccaggccttcagcggcatcaacgtgcagtacaagctgcacagcagcggcgccaactgcagcaccctgggcgtggtgaccagcgccgaggacaccagcggcatcctgttcgtgaacgacaccaaggccctgagaagacccaagtgcgccgagctgcactacatggtggtggccaccgaccagcagaccagcagacaggcccaggcccagctgctggtgaccgtggagggcagctacgtggccgaggaggccggctgccccctgagctgcgccgtgagcaagagaagactggagtgcgaggagtgcggcggcctgggcagccccaccggcagatgcgagtggagacagggcgacggcaagggcatcaccagaaacttcagcacctgcagccccagcaccaagacctgccccgacggccactgcgacgtggtggagacccaggacatcaacatctgcccccaggactgcctgagaggcagcatcgtgggcggccacgagcccggcgagcccagaggcatcaaggccggctacggcacctgcaactgcttccccgaggaggagaagtgcttctgcgagcccgaggacatccaggaccccctgtgcgacgagctgtgcagaaccgtgatcgccgccgccgtgctgttcagcttcatcgtgagcgtgctgctgagcgccttctgcatccactgctaccacaagttcgcccacaagccccccatcagcagcgccgagatgaccttcagaagacccgcccaggccttccccgtgagctacagcagcagcggcgccagaagacccagcctggacagcatggagaaccaggtgagcgtggacgccttcaagatcctggaggaccccaagtgggagttccccagaaagaacctggtgctgggcaagaccctgggcgagggcgagttcggcaaggtggtgaaggccaccgccttccacctgaagggcagagccggctacaccaccgtggccgtgaagatgctgaaggagaacgccagccccagcgagctgagagacctgctgagcgagttcaacgtgctgaagcaggtgaaccacccccacgtgatcaagctgtacggcgcctgcagccaggacggccccctgctgctgatcgtggagtacgccaagtacggcagcctgagaggcttcctgagagagagcagaaaggtgggccccggctacctgggcagcggcggcagcagaaacagcagcagcctggaccaccccgacgagagagccctgaccatgggcgacctgatcagcttcgcctggcagatcagccagggcatgcagtacctggccgagatgaagctggtgcacagagacctggccgccagaaacatcctggtggccgagggcagaaagatgaagatcagcgacttcggcctgagcagagacgtgtacgaggaggacagctacgtgaagagaagccagggcagaatccccgtgaagtggatggccatcgagagcctgttcgaccacatctacaccacccagagcgacgtgtggagcttcggcgtgctgctgtgggagatcgtgaccctgggcggcaacccctaccccggcatcccccccgagagactgttcaacctgctgaagaccggccacagaatggagagacccgacaactgcagcgaggagatgtacagactgatgctgcagtgctggaagcaggagcccgacaagagacccgtgttcgccgacatcagcaaggacctggagaagatgatggtgaagagaagagactacctggacctggccgccagcacccccagcgacagcctgatctacgacgacggcctgagcgaggaggagacccccctggtggactgcaacaacgcccccctgcccagagccctgcccagcacctggatcgagaacaagctgtacggcagaatcagccacgccttcaccagattctag

SEQ ID NO: 204828 - DNA, 1377 bp, Artificial Sequence
  derived and/or modified sequence
atggccaaggccaccagcggcgccgccggcctgagactgctgctgctgctgctgctgcccctgctgggcaaggtggccctgggcctgtacttcagcagagacgcctactgggagaagctgtacgtggaccaggccgccggcacccccctgctgtacgtgcacgccctgagagacgcccccgaggaggtgcccagcttcagactgggccagcacctgtacggcacctacagaaccagactgcacgagaacaactggatctgcatccaggaggacaccggcctgctgtacctgaacagaagcctggaccacagcagctgggagaagctgagcgtgagaaacagaggcttccccctgctgaccgtgtacctgaaggtgttcctgagccccaccagcctgagagagggcgagtgccagtggcccggctgcgccagagtgtacttcagcttcttcaacaccagcttccccgcctgcagcagcctgaagcccagagagctgtgcttccccgagaccagacccagcttcagaatcagagagaacagaccccccggcaccttccaccagttcagactgctgcccgtgcagttcctgtgccccaacatcagcgtggcctacagactgctggagggcgagggcctgcccttcagatgcgcccccgacagcctggaggtgagcaccagatgggccctggacagagagcagagagagaagtacgagctggtggccgtgtgcaccgtgcacgccggcgccagagaggaggtggtgatggtgcccttccccgtgaccgtgtacgacgaggacgacagcgcccccaccttccccgccggcgtggacaccgccagcgccgtggtggagttcaagagaaaggaggacaccgtggtggccaccctgagagtgttcgacgccgacgtggtgcccgccagcggcgagctggtgagaagatacaccagcaccctgctgcccggcgacacctgggcccagcagaccttcagagtggagcactggcccaacgagaccagcgtgcaggccaacggcagcttcgtgagagccaccgtgcacgactacagactggtgctgaacagaaacctgagcatcagcgagaacagaaccatgcagctggccgtgctggtgaacgacagcgacttccagggccccggcgccggcgtgctgctgctgcacttcaacgtgagcgtgctgcccgtgagcctgcacctgcccagcacctacagcctgagcgtgagcagaagagccagaagattcgcccagatcggcaaggtgtgcgtggagaactgcctggccgacctgaccggcgacgccgtgagcggcagagacgaggccagaagcagcggcctgggcagccagaagcaccccggcagctag

SEQ ID NO: 204829 - protein, 364 aa, Artificial Sequence
  derived and/or modified sequence
MLRFLPDLAFSFLLILALGQAVQFQEYVFLQFLGLDKAPSPQKFQPVPYILKKIFQDREAAATTGVSRDLCYVKELGVRGNVLRFLPDQGFFLYPKKISQASSCLQKLLYFNLSAIKEREQLTLAQLGLDLGPNSYYNLGPELELALFLVQEPHVWGQTTPKPGKMFVLRSVPWPQGAVHFNLLDVAKDWNDNPRKNFGLFLEILVKEDRDSGVNFQPEDTCARLRCSLHASLLVVTLNPDQCHPSRKRRAAIPVPKLSCKNLCHRHQLFINFRDLGWHKWIIAPKGFMANYCHGECPFSLTISLNSSNYAFMQALMHAVDPEIPQAVCIPTKLSPISMLYQDNNDNVILRHYEDMVVDECGCG

SEQ ID NO: 204830 - DNA, 1095 bp, Artificial Sequence
  derived and/or modified sequence
atgctgagattcctgcctgacctggcttttagctttcttctgattctggcgttgggccaggcggtgcagtttcaggagtatgtattcctgcagttccttggtctagacaaagcacccagcccacagaaatttcaacccgtgccgtacattctcaaaaaaatcttccaagaccgggaagctgcggcgaccaccggcgtgagtagggacctttgttatgtaaaggagctcggcgtgcgtgggaacgtgttgcgcttcctgcccgaccagggcttttttttgtatcctaagaaaatctcccaagcctcgtcatgcctccagaaactgctttattttaacctctccgcaattaaagaaagagaacaactgactcttgcccaactcgggctggatctgggcccaaacagctactataatcttggccccgaattggaactcgccctattcctcgtacaggaacctcatgtatggggccagactacccccaaacctggaaaaatgttcgtcttaagatctgtcccttggcctcaaggggccgtgcacttcaatctgttagatgtggctaaagactggaacgacaatccgcgcaaaaattttggcctttttttggagatcctggtcaaagaagatagggatagcggcgtgaacttccaacctgaagacacgtgtgcaagattgcggtgcagtctgcatgcctcccttctcgtggtgacactgaatccagaccagtgccatccttctcgtaagagacgcgctgccatccctgttcccaagctgtcctgcaaaaatctctgccaccgtcaccagctgttcataaactttagagacctgggctggcacaaatggataatagcaccaaagggctttatggcgaactattgtcacggagaatgtccgttcagccttaccatcagtctcaactcatctaactacgcttttatgcaggcactgatgcatgccgtggatccagaaataccccaggctgtgtgcatccccaccaaactgagtcctatctctatgctgtatcaagacaataatgataacgtcattctgagacactacgaagacatggtggtggacgaatgtggctgcggctag

SEQ ID NO: 204831 - DNA, 1239 bp, Artificial Sequence
  derived and/or modified sequence
cagtctggcagtggagctctccccggtctgacagccactccagaggccatgcttcgtttcttgccagatttggctttcagcttcctgttaattctggctttgggccaggcagtccaatttcaagaatatgtctttctccaatttctgggcttagataaggcgccttcaccccagaagttccaacctgtgccttatatcttgaagaaaattttccaggatcgcgaggcagcagcgaccactggggtctcccgagacttatgctacgtaaaggagctgggcgtccgcgggaatgtacttcgctttctcccagaccaaggtttctttctttacccaaagaaaatttcccaagcttcctcctgcctgcagaagctcctctactttaacctgtctgccatcaaagaaagggaacagttgacattggcccagctgggcctggacttggggcccaattcttactataacctgggaccagagctggaactggctctgttcctggttcaggagcctcatgtgtggggccagaccacccctaagccaggtaaaatgtttgtgttgcggtcagtcccatggccacaaggtgctgttcacttcaacctgctggatgtagctaaggattggaatgacaacccccggaaaaatttcgggttattcctggagatactggtcaaagaagatagagactcaggggtgaattttcagcctgaagacacctgtgccagactaagatgctcccttcatgcttccctgctggtggtgactctcaaccctgatcagtgccacccttctcggaaaaggagagcagccatccctgtccccaagctttcttgtaagaacctctgccaccgtcaccagctattcattaacttccgggacctgggttggcacaagtggatcattgcccccaaggggttcatggcaaattactgccatggagagtgtcccttctcactgaccatctctctcaacagctccaattatgctttcatgcaagccctgatgcatgccgttgacccagagatcccccaggctgtgtgtatccccaccaagctgtctcccatttccatgctctaccaggacaataatgacaatgtcattctacgacattatgaagacatggtagtcgatgaatgtgggtgtgggtaggatgtcagaaatgggaatagaaggagtgttcttagggtaaatcttttaataaaactacctatctggtttatgaccacttagatcgaaatgtcaata

SEQ ID NO: 204832 - DNA, 1095 bp, Artificial Sequence
  derived and/or modified sequence
atgctgcgcttcctgcctgacctggccttctccttcctgctgatcctggccctgggccaggccgtgcagttccaggagtatgtgttcctgcagttcctgggcctggacaaggcccccagcccccagaagttccagcctgtgccctacatcctgaagaagatcttccaggaccgggaggccgccgccaccaccggggtgtcccgggacctgtgctacgtgaaggagctgggcgtgagaggaaatgtgctgcgcttcctgcctgaccagggcttcttcctgtaccccaagaagatcagccaggccagcagctgcctgcagaagctgctgtacttcaacctgagcgccatcaaggagcgggagcagctgaccctggcccagctgggcctggacctgggccccaacagctactacaacctgggccctgagctggagctggccctcttcctggtgcaggagccccacgtgtggggccagaccacccccaagccaggcaagatgtttgtgctgcggtctgtgccctggccccagggcgctgtgcacttcaacctgctggatgtggccaaggactggaatgacaaccccaggaagaactttggcctcttcctggagatcctggtgaaggaggaccgggacagcggcgtgaacttccagcctgaggacacctgtgcccggctgcgctgcagcctgcacgccagcctgctggtggtgaccctgaacccagaccagtgccaccccagcaggaagagaagagctgccatccctgtgcccaagctgagctgcaagaacctgtgccaccgccaccagctgttcatcaacttccgggacctgggctggcacaagtggatcatcgcccccaagggcttcatggccaactactgccacggggagtgccccttcagcctgaccatcagcctgaacagcagcaactatgccttcatgcaggccctgatgcatgctgtggaccctgagatcccccaggccgtgtgcatccccaccaagctgagccccatctccatgctgtaccaggacaacaatgacaacgtcatcctgcggcactatgaggacatggtggtggatgaatgtggctgcggctag

SEQ ID NO: 204833 - DNA, 1095 bp, Artificial Sequence
  derived and/or modified sequence
atgctgcggttcctgcccgacctggccttcagcttcctgctgatcctagctctcggccaggcagttcagttccaagagtatgtatttctgcagtttctaggactggacaaagcaccttcgccgcaaaaatttcagcccgtcccatacattcttaaaaaaatcttccaggatagagaggcagcagctacaaccggcgtgagcagggatctgtgttacgttaaagaactaggggtgaggggcaacgtactaagattcttacctgaccagggcttcttcttgtacccgaagaagattagccaagcctcgtcttgtcttcagaaattgctctacttcaatctttctgccatcaaggagcgcgagcagctgacacttgcccagttgggcttggatttagggcctaacagctactataaccttggacctgagctggaactggctctgttcctcgtacaagagccccatgtgtgggggcagaccaccccaaaaccgggcaaaatgttcgtgctgaggtcagtgccgtggccccagggagccgtccatttcaatctgcttgacgtcgctaaggactggaatgacaatccacgcaagaactttggcctattcctggagatcctcgtcaaggaggatcgcgattccggagtaaacttccagcctgaagatacctgcgctcggttacgctgctctctgcatgcgagtctgttggtcgtgactctgaaccctgaccaatgtcatccttcgaggaaaagaagggccgctatccccgtacccaaacttagctgcaagaatttgtgtcaccgccaccagctcttcatcaatttcagagacctagggtggcacaaatggattatagctcctaagggctttatggccaattattgccacggagagtgccctttcagcctgactatcagccttaattcgagtaactacgccttcatgcaagcccttatgcacgcagtggatcccgaaatcccccaggccgtctgcatccctacgaagctttctccgattagtatgctatatcaagataataacgataacgtgattctgaggcattacgaggatatggtcgttgatgagtgtggatgcggttag

SEQ ID NO: 204834 - DNA, 1095 bp, Artificial Sequence
  derived and/or modified sequence
atgctgcggttcctgccagacctggccttcagcttcctgttgatactggctctgggtcaagcagttcagtttcaggagtatgtctttctgcagttcctcggcctggacaaagcgccatcccctcaaaagtttcagccggtgccctacatcctcaagaaaatttttcaggaccgggaggctgctgctactacaggagtttcacgcgacttatgttatgtgaaagagctaggggtaagaggaaacgtgctgagattcctgccggaccagggctttttcctgtatcccaagaaaatatcacaagcctcatcctgcctgcagaagctgctgtattttaatttgtctgccattaaagaaagggaacagttgacactcgctcagctaggactcgacctcggcccaaactcctactataacctgggaccagagctggaacttgccttattcctggtacaggagcctcatgtctggggtcagacgacacccaaaccgggaaagatgtttgtcctccggagcgtgccttggcctcagggagcggtgcattttaatctgctggatgttgccaaagactggaacgacaacccaagaaaaaatttcggcctgtttctggaaatcttggttaaggaagaccgggactcaggggttaattttcaacctgaggatacatgcgccagactccgctgttctctgcacgctagccttctggttgtgactcttaatcctgaccaatgtcacccatcccggaagagacgtgctgccatccccgtgccgaagctatcatgtaagaacttatgccaccgccatcagctgtttatcaactttcgggacctgggctggcataaatggattatcgctccaaagggcttcatggcgaactactgtcacggtgaatgtcctttctccctcactatcagtttgaatagttccaactacgccttcatgcaggcgttgatgcatgctgtggaccccgaaatcccccaggcagtgtgtatccctacaaaacttagccccatttccatgctgtaccaggataacaacgataatgtgatcttgcgtcactatgaagacatggtcgtcgatgagtgtggctgtggctag

SEQ ID NO: 204835 - DNA, 1095 bp, Artificial Sequence
  derived and/or modified sequence
atgctgagattcctgcccgacctggccttcagcttcctgctgatcctggccctgggccaggccgtgcagttccaggagtacgtgttcctgcagttcctgggcctggacaaggcccccagcccccagaagttccagcccgtgccctacatcctgaagaagatcttccaggacagagaggccgccgccaccaccggcgtgagcagagacctgtgctacgtgaaggagctgggcgtgagaggcaacgtgctgagattcctgcccgaccagggcttcttcctgtaccccaagaagatcagccaggccagcagctgcctgcagaagctgctgtacttcaacctgagcgccatcaaggagagagagcagctgaccctggcccagctgggcctggacctgggccccaacagctactacaacctgggccccgagctggagctggccctgttcctggtgcaggagccccacgtgtggggccagaccacccccaagcccggcaagatgttcgtgctgagaagcgtgccctggccccagggcgccgtgcacttcaacctgctggacgtggccaaggactggaacgacaaccccagaaagaacttcggcctgttcctggagatcctggtgaaggaggacagagacagcggcgtgaacttccagcccgaggacacctgcgccagactgagatgcagcctgcacgccagcctgctggtggtgaccctgaaccccgaccagtgccaccccagcagaaagagaagagccgccatccccgtgcccaagctgagctgcaagaacctgtgccacagacaccagctgttcatcaacttcagagacctgggctggcacaagtggatcatcgcccccaagggcttcatggccaactactgccacggcgagtgccccttcagcctgaccatcagcctgaacagcagcaactacgccttcatgcaggccctgatgcacgccgtggaccccgagatcccccaggccgtgtgcatccccaccaagctgagccccatcagcatgctgtaccaggacaacaacgacaacgtgatcctgagacactacgaggacatggtggtggacgagtgcggctgcggctag

SEQ ID NO: 204836 - protein, 251 aa, Artificial Sequence
  derived and/or modified sequence
MLGARLRLWVCALCSVCSMSVLRAYPNASPLLGSSWGGLIHLYTATARNSYHLQIHKNGHVDGAPHQTIYSALMIRSEDAGFVVITGVMSRRYLCMDFRGNIFGSHYFDPENCRFQHQTLENGYDVYHSPQYHFLVSLGRAKRAFLPGMNPPPYSQFLSRRNEIPLIHFNTPIPRRHTRSAEDDSERDPLNVLKPRARMTPAPASCSQELPSAEDNSPMASDPLGVVRGGRVNTHAGGTGPEGCRPFAKFI

SEQ ID NO: 204837 - protein, 18 aa, Artificial Sequence
  derived and/or modified sequence
VNTHAGGTGPEGCRPFAK

SEQ ID NO: 204838 - protein, 15 aa, Artificial Sequence
  derived and/or modified sequence
RNEIPLIHFNTPIPR

SEQ ID NO: 204839 - protein, 124 aa, Artificial Sequence
  derived and/or modified sequence
MLGARLRLWVCALCSVCSMSVLRASAEDDSERDPLNVLKPRARMTPAPASCSQELPSAEDNSPMASDPLGVVRGGRVNTHAGGTGPEGCRPFAKFISSSSKAPPPSLPSPSRLPGPSDTPILPQ

SEQ ID NO: 204840 - protein, 152 aa, Artificial Sequence
  derived and/or modified sequence
MKWVSFISLLFLFSSAYSGSLDKRSAEDDSERDPLNVLKPRARMTPAPASCSQELPSAEDNSPMASDPLGVVRGGRVNTHAGGTGPEGCRPFAKFISSSSKAPPPSLPSPSRLPGPSDTPILPQSSSSKAPPPSLPSPSRLPGPSDTPILPQ

SEQ ID NO: 204841 - protein, 72 aa, Artificial Sequence
  derived and/or modified sequence
SAEDDSERDPLNVLKPRARMTPAPASCSQELPSAEDNSPMASDPLGVVRGGRVNTHAGGTGPEGCRPFAKFI

SEQ ID NO: 204842 - protein, 24 aa, Artificial Sequence
  derived and/or modified sequence
MLGARLRLWVCALCSVCSMSVLRA

SEQ ID NO: 204843 - DNA, 756 bp, Artificial Sequence
  derived and/or modified sequence
atgctgggcgccagactgagactgtgggtgtgcgccctgtgcagcgtgtgcagcatgagcgtgctgagagcctaccccaacgccagccccctgctgggcagcagctggggcggcctgatccacctgtacaccgccaccgccagaaacagctaccacctgcagatccacaagaacggccacgtggacggcgccccccaccagaccatctacagcgccctgatgatcagaagcgaggacgccggcttcgtggtgatcaccggcgtgatgagcagaagatacctgtgcatggacttcagaggcaacatcttcggcagccactacttcgaccccgagaactgcagattccagcaccagaccctggagaacggctacgacgtgtaccacagcccccagtaccacttcctggtgagcctgggcagagccaagagagccttcctgcccggcatgaacccccccccctacagccagttcctgagcagaagaaacgagatccccctgatccacttcaacacccccatccccagaagacacaccagaagcgccgaggacgacagcgagagagaccccctgaacgtgctgaagcccagagccagaatgacccccgcccccgccagctgcagccaggagctgcccagcgccgaggacaacagccccatggccagcgaccccctgggcgtggtgagaggcggcagagtgaacacccacgccggcggcaccggccccgagggctgcagacccttcgccaagttcatctag

SEQ ID NO: 204844 - DNA, 756 bp, Artificial Sequence
  derived and/or modified sequence
atgttgggcgccaggcttcgcctgtgggtgtgtgccttgtgtagcgtttgcagcatgtctgtgctgcgcgcgtatccaaacgccagtccccttctcggaagcagctggggaggattgattcacctttacaccgccacagcccgcaattcctaccaccttcaaattcacaaaaatggtcacgtcgatggtgctcctcatcagactatctacagcgctctaatgattcgatccgaagatgccgggtttgtggtgattaccggcgtgatgagccgaagatatttgtgcatggattttagagggaacattttcggcagtcattacttcgacccagaaaactgcaggttccagcaccagacattagagaacggctacgatgtctatcatagtccgcagtatcattttctcgtgtcgttgggacgcgccaaacgggcttttctgccggggatgaacccgcctccgtacagccagttccttagcaggcgcaatgagatcccactgatccatttcaatacccccattccgcgacgacatacaagatccgccgaggacgattctgaaagggatccattgaacgtgctgaagccccgagctagaatgacaccagcgcccgcaagctgctctcaggaattaccatccgcagaggacaactcaccgatggcctccgatcctctgggggttgtgcgggggggacgcgtcaacacacatgctggcggtacgggccccgaaggctgcagaccattcgcaaaattcatatag

SEQ ID NO: 204845 - DNA, 756 bp, Artificial Sequence
  derived and/or modified sequence
atgctgggcgcccggctgcggctgtgggtgtgtgccctgtgcagcgtgtgcagcatgtctgtgctgcgggcctacccaaatgccagccccctgctgggcagctcctggggcggcctcatccacctgtacacagccacagccaggaacagctaccacctgcagatccacaagaatggccacgtggatggagccccccaccagaccatctacagcgccctgatgatccgctcagaagatgctggctttgtggtgatcaccggggtgatgagccgccgctacctgtgcatggacttccggggcaacatcttcggcagccactactttgatcctgagaactgccgcttccagcaccagaccctggagaatggctatgatgtgtaccacagcccccagtaccacttcctggtgtccctgggccgggccaagagggccttcctgcccggcatgaaccccccaccctacagccagttcctgagcagaagaaatgagatccccctcatccacttcaacacccccatccccaggaggcacaccaggtctgcagaagatgattctgagcgggaccccctgaatgtgctgaagccccgggccaggatgaccccagccccagccagctgcagccaggagctgcccagcgctgaggacaacagccccatggccagtgaccccctgggcgtggtgcggggcggccgggtgaacacccacgccggcggcactggacctgagggctgccggccctttgccaagttcatctag

SEQ ID NO: 204846 - DNA, 756 bp, Artificial Sequence
  derived and/or modified sequence
atgctgggcgcccggctgcggctgtgggtgtgcgccctgtgcagcgtgtgttcaatgtccgtccttagagcctaccccaatgccagcccgttgctgggatcatcatggggcggcctaattcacctgtacacagcaactgctaggaacagctatcacctccagatccacaaaaacggccacgtcgacggcgccccacaccagaccatttattctgcgcttatgatacggtcggaagacgctgggtttgtggttatcaccggagtcatgtcccgcagatacctttgcatggatttccggggaaacatttttggcagccattatttcgatcccgagaactgcaggtttcagcaccagactctggaaaacgggtacgacgtctaccactctccacagtatcactttttggtaagtttgggtagagcgaagcgcgcattcctgccgggcatgaaccctcctccttattcccagtttctgtctcggaggaacgagattcccctcatccacttcaacacaccaattccacggaggcacacgcggtccgcagaggatgatagcgaacgggatcccttgaatgtactgaagccaagagccagaatgaccccggctcctgcgagttgttctcaggaactcccaagtgcagaagacaattccccaatggcctcagatccactcggcgtcgtgcgcgggggaagggtcaacacgcatgccggcggcacagggcccgaggggtgccgtccctttgccaagttcatctag

SEQ ID NO: 204847 - DNA, 756 bp, Artificial Sequence
  derived and/or modified sequence
atgttaggcgctcggctccgcctgtgggtgtgtgccctgtgctccgtgtgctctatgtctgtcctaagagcctatccgaacgcaagtcccctgcttggatcctcttgggggggattgattcacctgtataccgccaccgccagaaactcctatcacctgcaaattcataaaaacggccacgtggacggagcaccgcaccaaaccatctattccgccctgatgattagatccgaggatgcgggattcgtggttataactggtgtgatgtcgagacggtatctatgtatggatttccgcggaaatatcttcggctctcactatttcgaccctgagaattgccgctttcagcaccagacactggaaaatggttatgatgtataccactctcctcagtaccactttctcgtgtcgctcggaagagccaaaagagcctttctgcccggtatgaatccaccaccatattcacagttcctgagtcgtagaaatgaaattcctcttattcactttaatacccctatcccgaggcggcacactcgctctgcggaagacgatagcgagcgagaccccctgaacgttttaaagcctcgggctcggatgactcccgctccagcaagttgcagccaggagctccctagcgcagaggataactctcccatggcatccgacccccttggggtcgtgcgtggaggcagggtcaatacgcacgcaggaggtactgggcctgagggatgcagaccctttgccaaattcatctag

SEQ ID NO: 204848 - DNA, 753 bp, Artificial Sequence
  derived and/or modified sequence
atgcttggcgctcgcctgcgactttgggtctgtgcactttgttcagtgtgttcaatgtccgtgcttcgggcataccctaacgcatcaccacttcttggttcatcatggggaggtctgatccacctttacactgcaactgcaagaaactcctaccacctgcaaattcacaagaacgggcatgtggatggagcacctcatcagacgatttactccgcactgatgatacgctccgaggacgcaggatttgtggtgattaccggagtgatgtcaagacgatatttgtgtatggactttcgaggaaatatcttcggcagccattactttgatccggaaaactgccggtttcaacaccaaacccttgaaaatggttatgacgtgtaccattcgccacagtaccatttcctcgtctccctcgggcgtgcaaaaagagcattccttcctggcatgaatccacccccctactcccagtttctctctaggcggaatgagatcccgctcattcactttaacactccaataccacggcgtcacactagatcagccgaagatgactcggaacgggatccactgaacgtgctcaagccaagagccagaatgactcctgcacctgcatcatgttcgcaggaattgccgagcgccgaggataactctcctatggcatccgatccactgggtgtggtgcggggtggaagagtgaatacccatgcaggaggaaccggccctgaggggtgtagaccgttcgcgaagtttatc

SEQ ID NO: 204849 - DNA, 753 bp, Artificial Sequence
  derived and/or modified sequence
atgctcggggcaagactgcgcttgtgggtctgcgcgctctgctctgtttgttccatgtccgttctccgagcctatcccaatgcttctcccctacttggaagttcctggggaggattaatacatctttatactgcaacagccagaaattcctatcatttacagatccataaaaatgggcatgttgatggagccccacatcagactatttactcagcccttatgatacggtccgaagatgccggatttgtggtcataactggggtgatgtctcgaaggtatctgtgtatggattttcgggggaatatctttggatcccactactttgaccccgagaactgtaggtttcagcatcagacgctcgagaatggatacgacgtctatcattcaccccagtaccatttcttagttagtctaggacgagcaaagcgggccttccttcccgggatgaaccctccaccatacagtcaattcctgtcccgcaggaacgaaatcccacttatacacttcaatacacctatacccaggagacacacacggtcagccgaagatgatagtgaaagggatcctctcaatgttctcaaaccccgtgcacggatgacaccagcacccgcttcctgttctcaggaactcccttctgccgaggacaatagtcccatggcatccgatccattaggagtagtaagagggggaagggtcaatacacatgcagggggaactggaccagaaggatgccggccgttcgctaaatttatc

SEQ ID NO: 204850 - DNA, 753 bp, Artificial Sequence
  derived and/or modified sequence
atgctgggagcgagactgagactttgggtgtgcgccctctgttcggtgtgctccatgagtgttttgcgggcctacccgaatgcttccccgttgctcgggtcatcttggggaggactcattcacctgtatactgccaccgcccgcaactcataccacctgcagatccataagaatggtcatgtcgacggagccccccaccaaacgatctactcagcactgatgatccggtcagaagatgccggcttcgtggtcatcaccggagtgatgtcccgccggtacctgtgcatggactttaggggaaacatcttcggctcccactacttcgatcctgaaaattgtcgcttccaacaccagacgctggagaacggatacgatgtgtaccattccccccaataccacttcctcgtgtcgctcggaagagccaaacgggcattcctccctggaatgaatcctccgccgtactcgcagttcctgtcgcggcgaaatgaaatccctctgatccacttcaatacgccgatcccccgcaggcatactcgctcagcggaggacgattctgagcgggacccacttaatgtcttgaaaccacgggctagaatgactccggcgcctgcctcgtgcagccaagagctgccgtcagcagaggacaattccccaatggcttcggatccattgggagtggtgcggggaggacgggtgaatactcatgccggcgggaccggacctgaaggatgtagaccttttgcgaagttcatc

SEQ ID NO: 204851 - DNA, 753 bp, Artificial Sequence
  derived and/or modified sequence
atgctgggagcccgcttaagactatgggtttgcgccctttgctctgtctgttccatgagcgttctgcgagcctacccgaacgctagtcccctgctgggctcttcgtggggggggcttatccacctttacaccgccactgcacggaacagctaccatttgcaaatccataagaatggccatgtggacggcgctccacaccagaccatatactccgccttgatgattcgttcagaggacgcaggattcgtggtgatcactggggtcatgtcacgaagatatctttgtatggactttcggggaaatattttcggcagccattattttgatccagaaaactgcagattccagcatcagacactcgagaacgggtacgatgtctaccactctccccaatatcacttcctggtttcactgggacgagcaaaacgcgctttcttgccagggatgaacccacccccctattcacaatttctgagccgaagaaatgagatccccctgatccactttaatactcctatccctcgacgtcacacacggtccgccgaggacgactcagaaagagaccctcttaacgtgcttaaaccacgagctaggatgacccctgcaccggcgagttgttctcaggagttgccatctgctgaggataatagcccaatggcctccgaccctctgggagtggtccgtgggggtcgcgtgaatacacacgcagggggcacaggacctgaaggatgcagaccttttgctaaattcata

SEQ ID NO: 204852 - DNA, 753 bp, Artificial Sequence
  derived and/or modified sequence
atgctcggtgctcgactgcggctttgggtgtgcgcactgtgctctgtctgtagtatgtcggttctgagagcctacccaaacgcctcacccctgttgggcagtagctgggggggtctgatacacctttacacagcgactgcaaggaacagttatcatcttcagattcataagaacggtcacgtggacggtgcaccacatcagacaatctattctgcactaatgattaggtctgaagacgcaggtttcgtggtcattactggcgttatgtcccgccggtacctgtgcatggacttcagagggaatatctttggcagtcattactttgaccccgagaactgcagattccagcaccagacactggagaatggatatgatgtctaccatagcccacagtaccacttcctcgtgagcttgggccgggctaagagagccttcctgcccggaatgaaccccccaccatactctcagttcctctcaagacggaacgagattccattaattcattttaacactccaatccctcgcagacacacgcggtctgcagaggacgattcggagagggacccgcttaatgtgctgaaacccagagccaggatgacacccgcaccagcttcctgctcacaggagctgccaagcgccgaagataactcccctatggcctccgaccctcttggcgtggtcagagggggccgggttaacacacatgcgggaggcactggcccggagggatgccggccctttgctaagtttata

SEQ ID NO: 204853 - DNA, 753 bp, Artificial Sequence
  derived and/or modified sequence
atgctaggcgcaagattacgtctgtgggtgtgtgctctttgttcggtgtgcagcatgtccgttttaagagcctacccaaatgctagtccccttctgggtagcagctggggaggactgatccatctctacaccgctactgcacggaatagctaccacctgcagattcacaagaacgggcatgtggatggcgccccacatcagaccatctacagtgccctgatgattcgttccgaagacgcggggttcgtcgtcatcactggcgtcatgtctcgtcgctacctctgtatggacttcagggggaatatcttcgggtcgcattactttgatccggaaaactgccggttccaacaccaaaccctcgaaaacggttacgatgtctatcactctccacaatatcacttcctggtgtcgttagggagagctaagagggccttcttgccgggcatgaacccacctccctatagtcaattcctatccagacggaatgaaatccccctcatccacttcaacacgccaattcctagaagacacacacggtccgctgaagatgacagcgagagggaccctctcaacgtgctcaagcccagggcgcgcatgacaccggcccccgccagctgcagtcaagaactaccctccgccgaagacaactcacctatggcttcggacccactgggggttgtaaggggaggtcgagtaaacacccacgctggtgggacagggccagagggttgcagaccgttcgcaaagtttata

SEQ ID NO: 204854 - DNA, 753 bp, Artificial Sequence
  derived and/or modified sequence
atgcttggggcccgcctgaggctttgggtgtgtgccctgtgctccgtctgttccatgagtgtgctgagggcctacccaaatgcgtcccctctgttaggctcctcatgggggggcctgattcatttgtacacagcgaccgcccgaaattcctatcaccttcaaattcataagaatgggcatgtggatggggcaccccaccagacaatttacagtgctctaatgattcgttctgaggacgcgggtttcgtcgtaattaccggggtgatgtcacgaagatacttatgtatggactttagagggaacatcttcggtagccactacttcgacccggagaactgcaggttccaacatcaaaccctggaaaatggatatgatgtgtatcattcccctcagtaccacttcctcgtttcactgggacgggccaagagagcattccttccgggtatgaatccccctccctactcccagtttctttctagacgtaacgagatccctcttattcacttcaacacacctatccctcgaaggcatacccgaagcgccgaggatgatagcgaacgagaccccctgaatgtattgaaacccagggcaaggatgacccctgctcccgcctcgtgctcccaagaactcccatctgcggaagataactcccccatggcttccgaccccctgggagtagttcggggaggaagagtaaacacccatgcgggaggcaccggcccagaggggtgtcgcccttttgcgaaattcatc

SEQ ID NO: 204855 - DNA, 753 bp, Artificial Sequence
  derived and/or modified sequence
atgctgggtgcccgcttgcgtctgtgggtgtgcgccctctgtagcgtgtgtagtatgagcgtactccgtgcgtaccctaacgcctcccccttgctcggatcgtcctggggtggtctgattcacttgtacaccgccaccgcccgtaactcctaccatctccagatccataagaacggtcacgtcgacggtgctccccaccagactatctactcagccctcatgattcgcagcgaggatgctggcttcgtggtcattaccggtgttatgtccaggcgctacttgtgtatggatttccgcggtaacatcttcggcagtcactacttcgaccccgaaaactgccggttccagcatcagacgctggagaacggctacgacgtttatcattcccctcagtaccattttctagtttcgctgggtagggctaagcgtgccttcctccccggcatgaatccgccgccctatagccagttcctcagcaggcgtaacgaaattcctctcattcacttcaacaccccaattcccaggcgccatacccgttctgccgaggacgatagtgagcgggatcccctcaacgtcttgaagccccgtgctcgtatgactcccgcacctgcatcctgctctcaagagctgccatcggccgaggataactcgcctatggcctccgatcctctcggtgtcgtccgtggaggccgagtgaacacgcacgccggtggtactggtcccgagggctgccggccttttgctaagttcatt

SEQ ID NO: 204856 - DNA, 753 bp, Artificial Sequence
  derived and/or modified sequence
atgcttggagctagactgcgactttgggtctgcgccttgtgctcagtttgctccatgagcgtcttgcgggcctatcccaatgccagtccactcctgggcagttcatgggggggcctcattcacctgtacactgcaactgctcgaaatagttatcatcttcagattcacaagaacggacacgtggatggcgcaccccatcagactatctactctgcgcttatgattcggtctgaggacgcaggtttcgtcgtaattacaggagtgatgagtagacgctacctctgtatggactttagaggtaatattttcgggtctcactactttgacccggaaaactgtcgcttccaacaccagactctggaaaatgggtacgacgtctatcacagccctcagtatcacttcctggtcagtcttgggagggccaagcgcgccttcctgccaggcatgaacccacctccgtattcacaattcttgtctaggaggaacgagattcccttgatacacttcaacactcccattcctaggaggcacaccagaagcgctgaggatgatagtgaacgggaccccttgaacgtgctcaagcccagagctcgcatgacgcccgctccagcctcttgctcccaggaactcccatccgccgaagacaattctcccatggcgtctgaccctctgggcgttgtacggggcgggagagtgaacacacacgcggggggaaccgggcctgaggggtgtcggcctttcgccaaattcatc

SEQ ID NO: 204857 - DNA, 753 bp, Artificial Sequence
  derived and/or modified sequence
atgctcggcgcaagactccggttgtgggtctgcgcgctctgttcggtctgttccatgtctgtgctgagagcataccccaatgcatcacctcttcttggcagctcctggggcgggcttattcacctgtacacggcaactgccagaaattcttatcatctgcaaatacataagaacggacatgtggacggagcaccccatcaaactatctattcggctttgatgattagatcggaagatgctggttttgtggtgatcacgggtgtcatgagtaggcgctacctgtgtatggattttcgcggtaatatcttcggtagtcattactttgacccagaaaactgcagatttcagcaccagaccttggaaaacgggtacgacgtgtaccattccccccagtaccacttccttgtgtcactcggccgggcaaaacgggcgtttctgccggggatgaaccctcctccttacagccagttcctgtcgagacgcaacgaaatcccccttatacatttcaacaccccaattcctcggcgacataccagatccgccgaggatgattccgaacgagatcctttgaatgtcttgaagccacgggcacgtatgaccccagcacctgcttcgtgctcacaagagctgccttcagccgaagataactcgccaatggcatcggaccctcttggagtagtgcgcggaggtagagtgaacacccacgccggtggaactggaccggagggatgtagaccctttgcaaagttcatt

SEQ ID NO: 204858 - DNA, 753 bp, Artificial Sequence
  derived and/or modified sequence
atgctcggtgctaggttgcgtttatgggtatgtgcactctgctctgtttgcagcatgtccgtcctgcgtgcatacccaaacgcgtcaccgcttctgggctccagctggggaggactgatccacctgtatacggctaccgcgcgtaattcataccacttgcaaattcataagaatggccatgtcgatggggccccacatcagacaatctattccgctctgatgattagatcggaggacgccggtttcgtagttataactggagtcatgtctagaagatacctgtgtatggacttcagaggtaacatcttcggctcccactattttgatcccgagaattgcagattccagcatcagaccctcgagaatggctatgacgtctaccactccccgcaataccatttcttagtctccctgggcagggcaaagcgggcttttcttcctggcatgaaccccccaccctactctcagttcctgagtagacgcaacgaaatccctctgattcattttaatactcccattcccagacgccacacccgcagcgccgaggacgactctgagagagatccacttaacgtactgaaaccacgggcgagaatgaccccagctcccgcaagctgctctcaggagctgccctctgcggaagataatagcccgatggctagcgatcccctgggcgtcgtgcgcggcgggcgtgtaaacacccatgctggaggtacagggccagaaggctgcaggccatttgcgaagtttatt

SEQ ID NO: 204859 - DNA, 753 bp, Artificial Sequence
  derived and/or modified sequence
atgctcggggccagactcagattgtgggtctgcgcactctgttctgtttgcagtatgagcgtcttaagagcgtatcccaatgccagcccactgttaggttcatcatgggggggactgatccatttgtacacagccactgccagaaattcttaccatctgcaaattcacaagaatgggcacgtggatggtgcaccccatcagacgatatactctgctctcatgattaggtctgaggatgccggcttcgtcgtgatcacaggcgtgatgtccagacggtacctatgcatggacttccggggaaatatattcggaagccattatttcgaccctgagaattgcagattccagcaccagacgctagagaatggatatgacgtgtaccattccccgcagtaccacttcttggtctccctggggcgggccaaacgggcattcctacctgggatgaaccctcccccttatagccagttcctcagtagaagaaatgagatcccattaattcattttaatacccccattccaaggcgtcacactcgttctgctgaagacgattccgagcgcgatcctctcaacgtcttaaagccccgggcaaggatgactccagccccggcctcctgctctcaggagctgccctctgctgaggataactcccccatggccagcgacccgctcggcgtcgttcgcggagggagggttaatacccatgcgggcgggacgggccctgaaggatgccgaccatttgctaagtttatc

SEQ ID NO: 204860 - DNA, 753 bp, Artificial Sequence
  derived and/or modified sequence
atgcttggagctagactgcgcctctgggtgtgtgccctttgtagtgtctgctcaatgtccgtgctgagggcatatcccaacgcgtcgccattgttaggctcgtcatggggcggactgatccacctgtatacagccactgccagaaacagctaccatttgcagattcataagaatggacacgtcgacggtgcgccccatcagactatttactctgcccttatgatccggtcggaggatgccggcttcgttgttattacaggagtgatgagccgcaggtacctttgtatggacttccgggggaacattttcggctctcactacttcgatcctgagaattgtcgatttcagcaccagaccttggaaaacggatacgacgtgtatcactcgcctcagtaccactttctcgtatcgcttggtcgggcgaaacgcgcctttctaccaggcatgaaccccccaccctattctcaatttctgagtcgccgaaacgaaatcccccttatccattttaatacgcctattccaagaaggcacactcgcagcgccgaggatgatagtgagagagaccctcttaatgttctcaagcctcgggctcggatgacgcctgcgccagcgtcatgctcacaggaactcccctccgccgaggataatagccctatggcgtctgatcctcttggtgtcgtccggggagggagagtgaatactcatgctggtggcaccggacctgagggttgccggccgtttgcaaagttcatc

SEQ ID NO: 204861 - DNA, 753 bp, Artificial Sequence
  derived and/or modified sequence
atgctcggagcaagactgagactatgggtgtgtgctctgtgttctgtgtgcagcatgtctgtgctgcgggcctatcctaacgcctctcccctgctcggatcttcttggggaggcctcatacacttgtataccgctaccgcccgcaatagctatcatttacagatacacaaaaatgggcacgtcgacggagctcctcatcagaccatttattcagcccttatgataaggtccgaagatgcgggatttgtcgtgattacgggggtgatgagtcggaggtatctctgcatggatttccgggggaatatttttggctcacactattttgacccagaaaattgcaggttccagcatcagacactcgagaatggctatgatgtgtaccactcaccacaataccatttcttggtctcactgggaagagcaaaaagagcatttcttccaggtatgaaccctcccccttacagccagttcctgtctagaagaaatgaaattcctctgattcacttcaatacccctatccccagacgccatacccgtagtgccgaggatgattccgaacgcgatccgctcaacgtcttaaaaccgcgggccagaatgacaccagctccggcctcttgtagtcaagagttgccttcagctgaggataactcccccatggcaagtgaccctctcggcgtggtacgaggcgggagggtgaacacccacgcaggtggcacagggcctgagggatgccgtccgttcgcgaagttcatt

SEQ ID NO: 204862 - DNA, 753 bp, Artificial Sequence
  derived and/or modified sequence
atgctcggtgcgcggttgcggttatgggtctgtgcactgtgcagtgtctgctccatgtctgttctccgtgcttatcccaacgcgtctcctttattaggatcatcttgggggggcctgattcatttgtatacagccactgcccgaaactcttatcatctccagatccataagaacggacacgtagacggtgcaccgcaccagaccatatattcggccttgatgatccggagcgaagacgccggcttcgtggtgatcacaggagttatgtcccgacggtacctctgcatggacttcagagggaatatctttggcagtcactactttgaccctgaaaactgtcggtttcagcaccagacgctggagaatgggtatgacgtgtaccacagcccacagtatcatttcctcgtgtcgctgggcagagctaaacgggcatttctccccggcatgaacccaccgccctattcccagttcctgtctaggaggaacgagatccccctgattcatttcaacacacccatccctaggcgacacacaagatcagcagaagatgatagcgagagagaccctcttaacgttctgaagccaagggcacgcatgaccccagcccctgctagttgcagccaagagctacccagtgcagaagacaactcccctatggcctcagaccctctcggagtcgtgaggggcggtcgggtgaacacacatgcaggtgggactgggcccgagggatgcagacctttcgctaagtttata

SEQ ID NO: 204863 - DNA, 753 bp, Artificial Sequence
  derived and/or modified sequence
atgctcggagcgcggctcaggctgtgggtctgcgcactgtgctcagtctgttccatgtccgtgctgagagcatacccgaatgcatcccccttgctcgggtcgtcatggggagggttgatccatctgtacaccgccactgctcggaactcctatcacctgcaaatccataagaacggccatgtggatggagctccgcaccagaccatctacagcgcactgatgatcaggtccgaggatgcaggcttcgtcgtcatcaccggagttatgtcacgcaggtacctgtgtatggactttcggggtaacattttcggctcgcattactttgacccggaaaattgccgattccagcaccagaccctggaaaatggatacgacgtctaccattcccctcagtaccattttctcgtgtcccttggccgcgcgaagcgggcctttcttcccggcatgaatccaccgccgtacagccagttcctcagcagacgcaacgagatcccgctcatccacttcaacactccaatcccacggagacataccaggtccgcagaggacgattcggagcgggacccgcttaacgtgctgaagcctcgggcgcgcatgactccggccccggcaagctgctcccaagaactgccgtcggccgaagataacagccctatggcaagcgacccgctgggtgtggtgcgcggaggtcgggtgaatactcatgccggaggcacgggccccgagggatgcagaccattcgcgaagtttatc

SEQ ID NO: 204864 - DNA, 753 bp, Artificial Sequence
  derived and/or modified sequence
atgcttggagcccgacttagactctgggtgtgcgccttgtgcagtgtatgctccatgagtgtcttgagagcttacccgaacgcgtcacctctcctcggctctagctggggggggctcattcacctctatacagccacagcccgcaactcctaccatctgcagattcataaaaatggccacgtggatggagcgccgcaccaaacaatttatagcgctttgatgattagatccgaggacgccggattcgtggtaatcactggcgtaatgtctcggaggtatctttgtatggattttcgtggcaatatatttggctcccactatttcgacccagaaaactgtcgctttcaacaccaaacgcttgagaacgggtacgacgtttaccactctcctcagtaccattttttggtaagtttaggccgagccaagcgggctttcctgcccggcatgaacccccctccctactctcagtttctgtcaagacgcaatgaaatacccctaattcattttaacacgccaattcctagaagacacacccgctcagcagaagacgatagcgagagagaccctctcaacgtgctgaaacctcgcgctaggatgacacctgcccctgcaagctgttcgcaggagctgcccagtgccgaagataacagccccatggcttctgaccctctgggtgtggtgaggggaggccgcgtaaacactcacgcgggaggtaccggaccggaaggctgccggccctttgcgaagtttatt

SEQ ID NO: 204865 - DNA, 753 bp, Artificial Sequence
  derived and/or modified sequence
atgcttggcgcgcgcctgcgcctctgggtttgtgctctgtgcagcgtttgctctatgtccgttttgcgcgcataccctaacgcgagcccgctgttgggcagcagttggggtggccttattcatctatatacggccactgcacgaaacagctatcacctgcagattcacaaaaacggccacgttgacggtgcacctcatcagaccatttatagcgcactaatgattcgctccgaggatgccggctttgttgtgatcacgggtgttatgagccgccgatatctgtgcatggattttcgcggtaacatctttggctcacactactttgatcctgaaaactgccgcttccagcaccagaccctggaaaacggctatgatgtgtatcacagcccacagtaccattttctggtgagcctgggcagggcgaaacgtgcattcctgccaggtatgaatccgccaccatactcccaatttcttagccgtagaaatgaaatcccgctgatccacttcaatacaccgatcccgcgcaggcatacccggagcgcggaggatgattccgagcgcgatccgctgaacgtgttaaaaccacgtgcccgcatgaccccagcgcctgctagctgttcccaagagctgcctagcgcagaggacaatagcccaatggcctcggaccccctcggcgtggttagaggtgggcgggtgaacacccacgcaggcgggactgggccggaggggtgtcggccgttcgctaagtttatc

SEQ ID NO: 204866 - DNA, 753 bp, Artificial Sequence
  derived and/or modified sequence
atgttgggagcacggcttagactttgggtgtgtgcactgtgtagcgtttgttcgatgtcggtcctgagagcataccccaatgcctcacctctgctgggaagctcctggggtggattgattcacctttacaccgcaactgcaaggaattcgtaccaccttcaaattcataagaatggacatgtggatggagcaccacatcaaaccatctactcggcgctcatgattcggtcagaggatgctggtttcgtcgtgattactggtgttatgagccgcaggtacctttgcatggattttcgcggaaacatatttgggagccattactttgatccagagaattgccgctttcagcaccagaccctggagaacggatatgatgtgtaccattcacctcaataccatttccttgtgtcgctcggtcgggcaaaaagggcgtttctgccaggaatgaatccaccaccgtacagtcagtttctgagccgacgcaacgaaataccattgatacactttaacacgcccattccccgtaggcataccagatctgcggaagatgactcagaaagggaccctcttaacgtgctgaaaccaagagctcgcatgactcctgcaccagccagctgttcccaggagctcccatccgcagaggataactcacccatggcatcagatcccctgggtgtcgtgcgtgggggtcgcgtgaacacccatgccggaggcacgggaccagagggctgtagaccctttgctaaattcatt

SEQ ID NO: 204867 - DNA, 753 bp, Artificial Sequence
  derived and/or modified sequence
atgctcggcgcccgattgcgcctgtgggtttgcgccttgtgttcggtgtgctcaatgtccgttcttagagcataccccaatgcatcaccgcttcttggttcctcatggggagggcttatccacctgtacactgcaactgcacggaactcctaccatctgcagatccacaaaaatggacatgtcgatggggcacctcaccagactatctattccgcattgatgatacggtccgaggatgcaggctttgtggtgatcaccggagtgatgtctcgccgatacctttgcatggattttagaggtaacatttttggaagccactatttcgatcccgaaaattgtcggtttcagcatcaaaccctcgaaaatggttacgacgtttaccattcgcctcagtaccactttctcgtgtcgctcgggagggcaaagcgggcctttctgcctggtatgaatcccccgccatactcacaattcctttctcggcgaaatgaaattccgcttattcatttcaacactccaattccacggcgccatactagatcagccgaagatgactcggaacgggaccctctgaacgtgctgaagcctcgagcccgcatgacccctgctccagcgtcgtgctcacaggaactgccatccgcagaggacaactccccaatggcgtccgatcctctgggagtggtgcggggcgggagagtgaacacccacgctggaggtaccggcccagaaggatgtagaccgttcgcgaagttcatt

SEQ ID NO: 204868 - DNA, 753 bp, Artificial Sequence
  derived and/or modified sequence
atgcttggcgcgaggctgcgcctctgggtgtgtgcactctgttcagtgtgctcaatgtcggtgctgcgcgcatacccgaatgcgagcccgctgctcgggtcctcttggggcggcttgatccacctgtacactgccaccgcccgaaactcctaccacctgcagatccacaagaacggacacgtggacggagcgccgcatcaaaccatctactcggcgttgatgatccgctcggaggacgccggatttgttgtgatcacgggcgtcatgtcgcggcgctacttgtgcatggacttccggggtaacatcttcggatcccactacttcgacccagaaaactgccggtttcaacatcagaccctggagaatggatacgacgtctaccattcaccgcaataccacttccttgtctcgcttggacgcgctaaacgggcattccttccgggcatgaatccacctccgtactcacagtttctgtcccgcagaaacgaaatcccactgatccacttcaatactcctatcccgcggcgccacacccggtccgcagaagatgattccgaacgcgatccgctgaatgtgctcaaaccgcgcgccaggatgactccggccccggcttcgtgcagccaggagctgcccagcgccgaggacaattctccgatggcgagcgacccgctgggggtcgtccggggaggaagggtgaacacccatgccggaggaactggtcctgagggatgccgcccgtttgccaaattcatt

SEQ ID NO: 204869 - DNA, 753 bp, Artificial Sequence
  derived and/or modified sequence
atgttaggcgccaggctgcggctgtgggtgtgcgctttgtgttctgtttgcagcatgtcggtgctgagagcctacccaaatgcgagcccattgctgggatcctcttgggggggactgattcatctgtacacagctacggcgaggaatagttaccacctgcagatacataagaatggacacgttgatggtgctccacaccagacgatatacagcgcgcttatgatcaggtccgaagacgctgggttcgtcgtgatcacaggagtcatgagcagaaggtatctgtgtatggatttccgcggaaacatcttcggttctcactacttcgatcccgagaactgcaggttccagcatcaaaccttggaaaatggttacgacgtgtatcactctccacagtatcactttctggtgagtctgggcagggccaagagagcgttccttcccggcatgaaccctccaccttacagccaatttttgtccaggaggaacgagattcccttaatccacttcaacacccccattccgcggagacatacccgcagcgccgaggatgactctgaaagagatccgcttaacgtgctgaaaccccgtgcgcgtatgaccccggctcctgctagttgctctcaggaacttccttcggctgaggacaatagtcccatggcttcagaccctctaggtgtagtccggggcgggagagtcaacactcatgcaggcggcactgggcccgagggctgtaggccttttgctaagttcatt

SEQ ID NO: 204870 - DNA, 753 bp, Artificial Sequence
  derived and/or modified sequence
atgctgggggctcgtctgagactgtgggtttgcgccctctgctcggtctgcagcatgtccgtccttcgcgcctacccgaacgcctcgccgcttctgggatcgtcatggggcggcctgatccatctgtacacggctactgcaagaaattcgtaccacctgcagatccacaaaaacggccatgtcgacggagcgccacaccagaccatctactctgccctgatgatccgctcagaggacgctggatttgtggtcattaccggggtgatgagcagacgatacctgtgtatggacttccgcggcaatatcttcgggagccactattttgatccggaaaactgccggttccaacatcagactctggagaacggctacgacgtgtaccattcgccacaataccacttcctcgtctcactggggcgggccaagcgcgcctttcttccgggaatgaacccgccaccttactcccagtttctgtctcgacggaatgaaatcccactgatccacttcaacactccaatcccgcgccgccacactcgctcggccgaggacgattcggaacgggaccctctcaacgtactgaagccccgcgctagaatgacccccgcaccggcgtcttgctcccaagaactcccgagcgctgaagataattcaccgatggcatcagatcccctgggtgtggtgaggggtggtcgagtgaatacccatgcagggggcaccggaccagagggctgccgccccttcgccaagttcatc

SEQ ID NO: 204871 - DNA, 753 bp, Artificial Sequence
  derived and/or modified sequence
atgctcggtgcacgactccgtctctgggtgtgcgcactgtgctcggtctgttcgatgtcggtcctccgcgcgtaccccaacgccagcccgttgctgggatcctcctggggtggacttatccacctctacaccgcaaccgcacgcaatagctaccaccttcagattcacaagaatggtcatgtggatggtgcaccgcatcagaccatttactccgcactgatgattcggtcggaagatgcaggttttgtggtgattactggggtgatgtcacgcagatacctttgtatggattttagaggtaacattttcggatcgcactacttcgatccagaaaactgcagatttcaacaccaaacccttgaaaacggatacgatgtgtaccatagcccacaataccattttcttgtgagcctggggagagcaaagagggcattccttccaggaatgaatcctcccccctactcccaatttctgtcgaggcgcaacgagatcccactgatccactttaacacccctatccctcgtcgtcataccagatctgcagaagatgattccgaacgcgatcctctgaacgtcctgaaacctcgcgcccggatgactcctgcacctgcatcatgtagccaagaattgccgtctgctgaagataacagccccatggcgtcggaccccttgggtgttgtcaggggtggccgcgtgaacactcatgcaggagggactggtcctgagggttgtaggccatttgcaaaattcata

SEQ ID NO: 204872 - DNA, 753 bp, Artificial Sequence
  derived and/or modified sequence
atgcttggagcacggcttcgcttgtgggtctgcgctctttgtagcgtctgttccatgtccgtgctgagagcctacccgaacgcctcgccgctccttggctcgagctggggaggtctgatccatctgtacaccgccacggcccgcaactcgtatcacctccagattcacaaaaatgggcacgtggacggcgccccgcaccagactatctactcagccctgatgatccgcagcgaggatgcgggattcgtggtgattactggggttatgtcccgccggtacttgtgtatggactttagaggaaatatctttggttcccactactttgatccagagaattgccggttccagcaccaaaccctcgaaaacggatacgatgtgtaccactcgccgcaataccacttccttgtctccctcgggcgagccaagcgggccttcctgccgggaatgaacccaccgccttacagccagttcctgtcgcggaggaatgaaatcccactgatccacttcaatacccccatccctcggagacacacccgctctgctgaggacgacagcgagagggatccccttaacgtgctcaaacctcgcgcgcgcatgactccggcgccggcttcgtgcagccaggagctgccaagcgcggaagataactcgccgatggcgtcggatccactgggagtggtgaggggaggacgggtgaacactcacgccggtggaacgggacctgaaggttgtcgcccttttgcgaagttcatc

SEQ ID NO: 204873 - DNA, 753 bp, Artificial Sequence
  derived and/or modified sequence
atgttgggagcaagacttcgcctctgggtatgcgcgctgtgttcagtgtgttcaatgtctgttttgagggcttaccctaatgcgagcccgctgctgggttcatcttggggtgggcttatacatctctatactgcaacagctaggaacagttaccatctgcagatccacaagaatgggcacgtggacggggccccccatcagactatctattctgcactgatgatccggagcgaagacgccggattcgtggtgataacgggcgtgatgtctcgccggtacctgtgcatggacttccggggtaatattttcggctctcactacttcgatccggagaactgtcggttccaacaccaaacgttggaaaacgggtacgatgtgtatcactctccccagtaccactttctggtgtcacttggccgtgccaaacgggcattcctgccaggcatgaatccgcctccctactcccaatttttgtcacgcaggaatgagatccctcttatccacttcaatacgccgattcctcgtcggcacacacgatcagccgaagatgacagcgaacgcgaccccctgaacgtgctgaaaccacgcgctagaatgacccctgcccccgccagctgtagccaggagttgccaagcgccgaggacaattcaccaatggcctccgaccctctgggcgtcgtgcggggaggcagagttaacacacacgctggtggaacaggcccagaaggctgccgaccattcgccaaatttatt

SEQ ID NO: 204874 - DNA, 753 bp, Artificial Sequence
  derived and/or modified sequence
atgcttggagcaagacttaggctgtgggtgtgcgccctttgttccgtttgttcaatgtcagtgctgcgcgcgtacccgaatgcatcacctctgctcggttcgagctggggaggacttatccatctgtacaccgcaaccgctaggaatagctaccaccttcagatccataagaacggccacgtggatggagcaccccatcaaactatttacagcgctctgatgatacggtccgaggacgcgggattcgtggtgatcaccggagtgatgagccgtagatacctctgtatggattttcggggaaacattttcggttcgcactactttgaccccgaaaactgcaggtttcagcatcagactctggagaacggatacgatgtgtatcattccccacaatatcatttccttgtctcgctcggccgcgccaagcgggcatttcttcctgggatgaatcctccaccatacagccaatttctgtccagacgaaacgaaattccactcatccatttcaacaccccaattccaagacgtcatacgcggtcggccgaagatgacagcgagagagatcctctcaacgtccttaagcctcgggcgcgcatgaccccagcgcctgcaagctgcagccaagaactgccatcagcggaagataattcaccgatggcatctgacccactcggtgtggtgcggggaggtagagtaaacacccatgcagggggaaccggaccagagggatgtaggccctttgctaagtttatt

SEQ ID NO: 204875 - DNA, 753 bp, Artificial Sequence
  derived and/or modified sequence
atgcttggggctcggctgaggttgtgggtgtgcgccctttgctcggtgtgcagtatgagtgtgctcagggcgtaccccaacgcttcaccactgttaggctctagctgggggggactgatccacctttacaccgctactgccagaaattcgtaccacttacagatccataaaaacggacatgtcgacggagcaccccatcagaccatatattcagcactgatgatccggtccgaggacgccggcttcgtcgtgatcaccggtgtgatgtccagaaggtacctgtgtatggatttcagaggaaacatctttggcagtcactattttgatcctgagaattgccgattccagcatcagaccttggagaatgggtatgacgtgtatcactcccctcagtatcacttcctggtctctctcggtagagcgaagcgcgctttcttgcctggaatgaatccccccccctacagtcaatttctctccaggcgcaacgagatacctcttatccattttaatactcctataccacggcgccacacacgttcagcggaagacgattccgaacgcgaccctttgaacgtccttaagccccgcgcaagaatgacgccagccccagcatcgtgctcccaagagctgccaagcgccgaagataactcacccatggcatccgatcctcttggcgtggtgcgaggcggccgggtgaacacccacgccgggggcacggggcccgagggatgtcggccatttgctaaatttatt

SEQ ID NO: 204876 - DNA, 753 bp, Artificial Sequence
  derived and/or modified sequence
atgctgggagcacggctgcggctctgggtctgcgccctctgtagcgtgtgcagcatgagcgtcctgcgggcatatcctaacgcgtctcctctgctgggctcatcgtggggcggactgattcacctgtacaccgcgactgcccgcaacagctaccatctccagattcacaagaacggccacgtggacggggcgccgcaccagaccatctacagcgcactgatgattaggtcggaagatgcaggatttgtggtgatcacgggagtgatgtcccggcggtatctgtgcatggattttagaggtaacatcttcggatcgcattacttcgaccctgaaaactgccggttccagcaccagaccctggagaacggatacgacgtgtaccacagtccccagtaccacttcttggtgtccttgggaagagccaagcgcgcttttctgccaggaatgaaccctccgccgtacagccaattcctgtccagacgaaatgagatcccactgattcacttcaacaccccaattccaaggcgccacacgagatcagccgaagatgattccgagcgggacccgctcaacgtcctcaaaccccgcgctcgaatgacgcccgcgcctgcttcctgctctcaggaactgccgtccgcagaggacaattcaccaatggcctcggatcccctgggtgtcgtgcgagggggacgcgtgaacactcatgccggaggaactggaccagagggatgtcgccctttcgccaagttcatc

SEQ ID NO: 204877 - DNA, 753 bp, Artificial Sequence
  derived and/or modified sequence
atgcttggagctagattaaggctttgggtttgtgcattatgctcagtatgctcaatgtcagttttaagagcatatcctaatgctagtccacttctaggaagttcatggggaggattaattcatttatatactgcaaccgcaagaaactcttaccatttacaaatccataagaatggtcatgttgatggagctccacatcaaactatttattcagccctaatgattagaagtgaagatgcaggatttgttgttattactggagtaatgtctagaagatatctttgtatggattttagaggaaatatatttggaagtcattattttgatccagaaaactgtagatttcaacatcaaactcttgaaaatggttatgatgtttatcattcacctcaatatcattttcttgtttcacttggaagggctaaaagagctttcttaccaggtatgaatccaccaccttatagtcaatttctatctagaaggaatgaaattccattgattcactttaatactccaatcccaagaagacacactagatcagcagaagacgattcagaaagagatccattaaatgtcttaaaacctagagctagaatgactcctgcaccagcttcatgttcacaggaattgccttctgctgaagataacagtcctatggcatcagatcctttaggagttgttagaggaggtagagttaatacacatgcaggtggtactggaccagaaggatgtagaccttttgctaaattcatt

SEQ ID NO: 204878 - DNA, 753 bp, Artificial Sequence
  derived and/or modified sequence
atgcttggtgcaagactgcgcttgtgggtctgtgcattgtgctcggtgtgtagcatgtcggtcctcagggcatacccaaacgccagccctcttctcggttcgtcttggggaggattgattcacctgtacactgcaaccgcccgaaactcataccatctgcaaattcacaagaatgggcatgtggacggagcacctcatcaaactatctactcagccctcatgatacgttcagaggatgccgggttcgtggtcattactggcgtgatgtcgaggcgctacctctgtatggactttagaggtaatatcttcggtagccactattttgatccagaaaattgtagattccagcatcaaacccttgaaaacggttacgatgtgtaccacagcccacaatatcattttctggtcagcttgggacgcgcaaagcgggcgtttctcccaggcatgaatcctcctccgtactcacaatttctcagccggagaaacgaaatacctcttattcatttcaacactcctatcccaagacgtcataccagatcagccgaagatgattcggaacgggatccattgaacgtactgaagccccgagcccgaatgacgcctgcccctgcgagctgctcgcaagagctgccttcagcggaggataattccccaatggcgtccgacccgcttggagtggtgcgaggtggtagagttaacacccacgcaggaggaaccgggccggaaggctgtcgtccatttgcaaaattcatc

SEQ ID NO: 204879 - DNA, 753 bp, Artificial Sequence
  derived and/or modified sequence
atgctgggggcccggttaaggctgtgggtttgcgctctgtgttcagtgtgcagcatgtctgtcttgagagcctaccctaatgcaagtcccctattaggatctagctggggcggcctgatacacctgtacaccgcaaccgctcggaattcatatcacttgcagatacacaaaaacggccacgtcgacggcgcgccacatcagaccatctattcagcgcttatgatccgctccgaagacgcgggcttcgtggtgatcactggagtgatgtcacgcagatacctgtgtatggacttcagaggtaacattttcggcagtcattacttcgatcctgagaactgccggttccagcatcagaccctggagaatggctacgacgtgtaccacagcccccagtaccatttcctggtgtcacttgggcgagccaaacgggcattcttgccgggtatgaatccccccccgtattcccagttcttgtcgaggcggaatgagattcctctcattcacttcaacacccctattccccggagacacactagatctgctgaggacgactcagaacgggaccccctgaatgttctcaaacccagagctcgcatgaccccagccccagcaagctgttctcaagagctgcccagcgcagaggacaactctcccatggctagtgatcccctgggggtcgtgcggggtggccgggtcaatacacacgccggaggcacaggccctgaaggctgtcgaccgtttgccaagtttatc

SEQ ID NO: 204880 - DNA, 753 bp, Artificial Sequence
  derived and/or modified sequence
atgctgggagcgcggctgagactgtgggtgtgcgcattgtgttcagtgtgttcaatgtctgtgctccgcgcctaccctaatgcatcccccctgctcggttcgagctggggaggactcatccacctctatactgccacggcccggaactcataccatcttcaaattcataagaacggccacgtggacggggctccgcaccagactatctattccgctctgatgatccggagcgaagatgctggttttgtggtgatcactggagtgatgtcacggagatacctctgcatggactttcgcgggaatatcttcggatcacattacttcgatccggagaactgccgcttccagcaccaaacgctcgaaaatggatacgacgtgtaccactccccgcaataccacttcttggtgagcctgggccgcgctaagagagcctttctgccgggtatgaacccgccaccgtactcgcagttcctgtcgcgccgcaacgaaatccctctgatccatttcaacaccccgattccgaggcgccacactcggtccgccgaggacgactcagagagagatccactgaatgttcttaagccacgcgcccgcatgaccccagcaccagcgtcgtgctcacaggaactcccatcggctgaagataactcccccatggcttcagacccactgggtgtggtccggggcgggcgggtcaacactcacgccggtggtactggtccagaaggctgtcgcccttttgccaagtttatc

SEQ ID NO: 204881 - DNA, 753 bp, Artificial Sequence
  derived and/or modified sequence
atgctgggagcccggcttcggctgtgggtctgtgccctctgttccgtgtgctcaatgagcgtcctccgcgcgtatccgaatgcatccccactgcttggcagctcttggggaggactgatacatctctacactgccactgcgaggaactcttaccacctgcaaatacacaaaaatggtcatgtcgatggcgctccacatcagaccatctactctgccctgatgatacgtagcgaggatgcaggtttcgtggtgattaccggcgtgatgtctcggagatacctgtgcatggatttcagaggcaatattttcggaagtcattactttgacccagagaactgccggttccagcaccaaaccctggagaatggatatgatgtgtaccattctccgcaatatcatttccttgtgtcattgggcagggcaaaaagagcgttcctgccaggcatgaatcctcccccctattcccagttcctgtcccggcggaatgaaataccgctgatccacttcaataccccaattcccaggagacacactcggtctgcggaggatgactcagagcgggatcccctaaatgtactgaagcccagggctcggatgactccagcgccagcttcctgcagccaggagctgccctctgccgaagataactcccctatggctagtgacccactgggcgtcgtaagaggtgggagggtgaatacacacgccggagggaccggacccgaaggctgccggcccttcgcaaagttcata

SEQ ID NO: 204882 - DNA, 753 bp, Artificial Sequence
  derived and/or modified sequence
atgctgggcgctcgcctcaggctttgggtttgcgccctctgctctgtgtgctccatgagtgttctacgcgcctatccaaatgcaagcccactcctgggaagtagttggggaggcttgatccatctgtacaccgccaccgcgcggaactcctaccacctccagatccataaaaacggccacgtagacggcgctccccatcagaccatttacagcgcactcatgattaggagcgaggatgccggatttgtggttatcacaggcgtcatgagccgacgatatttgtgcatggattttagaggtaacatttttgggagtcactacttcgatccagagaactgcagattccagcaccagaccttagaaaacggctacgacgtttaccatagtcctcagtaccatttcctcgtttcactcgggagagcaaagagggcctttttgcccgggatgaatccacctccttactcccagttcttgtcaagacgcaatgagatcccacttatccatttcaacacccccatcccccgcaggcacacaaggagtgctgaggatgatagcgagagagaccccttgaacgtactcaaaccacgggctcggatgacacccgcacctgcatcatgttctcaagagcttccgagcgctgaggataatagccctatggcttccgaccccctgggagttgtcaggggaggccgggtaaacacacatgctggcggaacagggccagagggctgtagaccattcgctaagtttatt

SEQ ID NO: 204883 - DNA, 753 bp, Artificial Sequence
  derived and/or modified sequence
atgcttggagctcgtctacgattgtgggtttgtgcgttgtgttccgtctgtagtatgtcggtgctccgagcatatccgaatgcctcaccactgttaggttcgtcttggggtggactgatccatctgtacaccgcaactgctcgtaattcatatcatttgcagatccataaaaatggacacgttgatggagcgccgcatcaaacaatatactcagccctcatgatacgctccgaggatgcgggcttcgtggttattacaggcgtgatgtctagacgctatttatgtatggacttcagaggaaacatttttgggtctcattacttcgacccggaaaactgtagattccaacaccaaacacttgaaaacggatatgatgtgtatcattctcctcaataccatttcctcgtttctctgggaagagctaaacgggcctttctacctggaatgaaccctcctccgtattcgcagtttctcagtagacgaaatgagatcccgttgattcattttaacacaccaatccctcgacgacatactagatcggctgaggatgattcagaacgagatccattgaatgtcttaaaaccgcgagctcgaatgactcctgctccagccagttgttcacaagaactaccgtcagccgaggataatagtccaatggcatcggatcctcttggagtggtgcgtggaggccgcgtcaacacccacgccggaggtacgggtccagagggatgtagaccattcgcaaaattcatc

SEQ ID NO: 204884 - DNA, 753 bp, Artificial Sequence
  derived and/or modified sequence
atgctcggcgcaagacttaggctttgggtgtgtgcgctgtgttcagtttgtagcatgtcagtgcttcgagcttacccgaatgcctcccctctcctcggaagctcttggggtggactgatccatctgtacactgcaactgcgcggaacagctaccatttgcaaattcataagaacgggcatgtcgacggagccccacatcaaaccatttactcggcgctgatgattcggtcagaagatgcagggtttgtggtcatcaccggagtgatgtcgcgacgatacctttgtatggactttaggggcaacatctttggttcccattacttcgatccagagaactgtagatttcagcaccagacccttgaaaatggctacgacgtctaccactcgcctcagtaccactttcttgtctcgcttggaagagcaaagagggccttccttcctggaatgaaccctcccccctactcacaattcctttcgcgtagaaatgagattccactcattcactttaacactccaatcccacgacgccatactcgtagcgcggaagatgattccgagcgcgacccgctgaacgtcctgaaaccacgggcccgaatgactccagcgccagcgtcctgctcgcaagagttgccctccgcagaggataattcacctatggcatccgatcctctgggtgtcgttcggggaggaagagtcaatacccatgcaggaggaactggtccagagggatgtcggccttttgccaagttcatc

SEQ ID NO: 204885 - DNA, 753 bp, Artificial Sequence
  derived and/or modified sequence
atgctgggagcgagactgcggctctgggtctgtgcgctgtgctcggtctgctctatgtcagtcctgagagcctacccaaatgccagcccactcttgggttcgagctggggaggactgatccatctctatactgctaccgctagaaattcctaccacctccagattcacaagaacggacacgtggacggggccccgcaccagactatctattcagccctgatgatccgaagcgaagatgctggattcgtggtgatcaccggagtcatgtcaaggcgctacctctgcatggactttcgggggaacatcttcgggtcgcattacttcgaccccgaaaactgccgcttccagcaccagactctggagaacgggtacgatgtctaccattccccgcagtaccactttctggtttcactgggtcgcgccaagcgggcattcctcccgggtatgaacccgccgccgtacagccaattcttgtcgcgccgcaacgaaattccgttgatccacttcaacactcccatcccgcgccgccacacgagatctgccgaggatgactccgagcgcgatccacttaacgtgcttaaacctcgggcaagaatgaccccggcccctgcctcgtgctcacaggagctgccgtcagctgaagataatagcccgatggcctcggaccctctcggagtggtgcgcggaggaagagtgaatacccacgcaggaggcactgggccggagggatgcagaccgtttgctaagtttatt

SEQ ID NO: 204886 - DNA, 753 bp, Artificial Sequence
  derived and/or modified sequence
atgctaggggcgaggcttaggctctgggtgtgcgccctctgcagtgtgtgctctatgtcggtcctgcgcgcttacccaaacgcctcgccactgctgggcagttcatggggcggactgatacacctgtataccgctaccgctcggaactcctatcacctgcagatccacaaaaacgggcacgtcgatggggcaccccaccaaaccatttacagcgctttgatgattcgcagcgaagacgccggcttcgtggtgattacaggggtgatgtcaagacgctatctgtgcatggatttcaggggcaatatctttgggtcacattactttgaccccgagaattgcagatttcaacaccagacgctcgagaacgggtacgatgtgtaccactccccgcagtaccactttctggtcagcttgggcagagccaagcgggctttcctccctggcatgaatcctcccccttatagccaatttctcagccgccggaacgagattccgctcatccatttcaatacacccatcccacgtcgacacacccggagtgcagaagatgactccgagcgcgatccgctaaacgttctgaagccaagggccaggatgacccccgctccagcgagttgttctcaggagctcccgtcagcggaggacaattcccctatggcatctgaccctctgggtgtagtccgtggaggccgcgtcaacactcacgccggcggaactggtcctgagggctgtcgaccctttgccaagttcatt

SEQ ID NO: 204887 - DNA, 753 bp, Artificial Sequence
  derived and/or modified sequence
atgttaggtgccaggctgagattgtgggtgtgcgccttgtgttcagtctgcagtatgtctgtactgcgcgcctaccccaacgcatctccactgttaggcagctcgtggggaggccttatccacctgtacacggctacggctagaaacagctaccatcttcagattcataaaaacgggcacgttgacggagccccgcatcagacgatttacagcgccctgatgatcaggagtgaagatgcggggtttgtagtgatcacaggcgtgatgtcccggcgatatctctgtatggactttaggggcaatatctttgggagtcactatttcgaccctgagaattgtcgattccagcaccaaaccctagaaaacggatacgacgtgtaccatagtccacagtatcattttctggtaagcttagggagggcaaagagagccttcctacccggcatgaacccgcctccatactctcagtttctatctcgaagaaatgagattccactgatccactttaacacccctatacccagacggcacaccagatccgcagaggacgactcagaaagagaccctctgaacgtcctcaaacctagggccagaatgacgcccgcaccggcctcgtgctcgcaggaattaccaagtgccgaggataattctccgatggcttccgacccgcttggcgtggtacgcggtggacgagtgaatacacatgccggaggcacgggcccggagggctgtaggccatttgccaaattcata

SEQ ID NO: 204888 - DNA, 753 bp, Artificial Sequence
  derived and/or modified sequence
atgctcggggcgcgactcagactgtgggtctgtgccttgtgtagcgtgtgcagtatgagcgtattaagagcttaccccaacgcatctcctctgctaggctcgtcctggggcggtcttatccacctctataccgcaacagcccgaaacagctatcatctacaaatccacaagaatggccatgtggacggggcaccgcaccaaacaatctacagcgccctcatgatccgaagcgaggatgctggtttcgtcgtaatcacgggggtgatgagtcgaagatacctgtgcatggattttcgaggcaacatcttcgggtcacactatttcgacccagagaactgtcgattccagcatcagacgctggaaaacggatatgatgtgtaccacagcccccagtaccatttcttggtgtctctggggagagccaaacgagcttttctacctggaatgaacccgccaccgtattcccagttcctgtctaggagaaacgaaattcctttaatccactttaatacccccataccaagaagacatacacgatcagcagaggacgattccgaaagggatcccttaaacgtgttgaaacccagggccaggatgacacctgctcctgccagctgttcccaggagctccccagcgctgaagataactctccaatggccagtgaccccctgggcgttgtgcggggggggagagtgaacactcacgcggggggaacgggtcctgaaggatgtaggccttttgccaagtttatc

SEQ ID NO: 204889 - DNA, 753 bp, Artificial Sequence
  derived and/or modified sequence
atgttgggcgctcgccttagactgtgggtgtgtgcactttgctccgtatgttcaatgagtgtgttacgggcttaccctaatgcgtctcctctcctcgggtccagctggggcgggctaatacacctttataccgctactgccagaaattcctaccacctacaaatacataaaaacgggcacgtggatggggcgccccatcaaacgatctacagcgccctgatgataaggtctgaagatgccgggtttgtggtgatcacaggggtgatgtctcgaaggtacctgtgcatggactttcgagggaatatcttcggaagccattacttcgatccggagaactgtaggttccaacatcagactttagagaacgggtatgatgtctatcactccccacagtatcatttccttgtgtccttgggcagggccaagagagccttcctgcccggtatgaacccccctccatattctcagttcctgtcacgccgtaacgaaattcccctgatccactttaacacacccataccccgtcgtcatacgcgatccgctgaggacgactctgaacgcgacccactcaatgtactcaagcctagagcccgcatgaccccggcacctgcctcctgcagtcaggagctgccctccgccgaagataactcccccatggccagcgatccactgggggtggttcgaggagggagagtgaacacacacgctgggggtacaggaccagagggctgtcgcccgtttgccaagttcatc

SEQ ID NO: 204890 - DNA, 753 bp, Artificial Sequence
  derived and/or modified sequence
atgctgggagctcgcctccggctgtgggtgtgtgctttgtgctcggtgtgcagcatgtcggtgctccgggcataccccaacgcctcaccgttgctcggcagcagttggggaggactgatccatctttacactgccaccgctcggaactcgtaccatctccagatccataagaatggacatgtggacggagcaccgcaccaaaccatctattcggccctgatgatcagaagcgaagatgcaggcttcgtggtgatcactggggtgatgtcccgccgctatctgtgcatggatttccggggcaacatttttggttcgcactatttcgaccctgagaactgtcgctttcagcatcagactctggaaaacggctacgatgtgtaccactcgccacaataccacttccttgtctcccttggaagagccaaacgcgccttcctgccgggtatgaacccaccgccatactcgcagttcttgtctcggcgcaatgagatcccactgattcatttcaacactccaatcccaaggaggcacactcgatctgcagaggacgactcagagcgcgatcctttgaacgtgctgaagcctagagccaggatgactcctgcgcccgcgtcctgctcccaagagttgccttccgcagaagataactcacccatggcctccgacccactcggagtggtgcgcggtggcagggtgaacacgcacgccggaggaaccgggccggagggatgccggcctttcgccaaattcatc

SEQ ID NO: 204891 - DNA, 753 bp, Artificial Sequence
  derived and/or modified sequence
atgttaggagcaagacttagactgtgggtgtgcgctctttgttctgtctgctccatgtctgtgctacgcgcctaccctaacgcctcacccctgttgggctcatcctggggggggctcattcatctgtacaccgctacagctcgaaactcctatcatctgcagattcataagaacggacatgtcgacggcgccccacaccagactatatactctgctttgatgattcgcagcgaggatgctggcttcgtcgtgattaccggagtaatgagccggcgttatttgtgcatggacttccgcggaaacatatttggatcccattactttgacccggaaaactgtcgatttcaacatcagacacttgaaaatggctacgatgtctaccatagcccacagtaccattttttggttagcctgggcagagctaaacgcgcttttcttccaggtatgaacccccccccctatagtcagttcctgtccaggcgcaacgaaattccactcatccacttcaacactccgattcctcgtagacataccaggagtgcggaggacgattccgaacgcgaccccttgaatgtccttaaacctcgggcaagaatgacacccgccccagctagctgctcccaggagctgccgtccgccgaagacaattctcccatggcgtctgaccccctgggggtcgtgcgcggcggtcgggtcaacacccacgccggaggaacagggccagaggggtgccgacccttcgctaaatttata

SEQ ID NO: 204892 - DNA, 753 bp, Artificial Sequence
  derived and/or modified sequence
atgctgggggcacgcttgaggctttgggtgtgcgcgctgtgtagtgtgtgctccatgtctgttctcagagcctatcccaacgcaagccccctgttaggttcctcttggggggggttgattcacctgtacaccgcaaccgcccgcaactcttaccatctacagattcacaaaaacggccacgtcgatggtgcaccacaccaaactatttactccgccttgatgattcgcagtgaagacgctggttttgtagtcatcacaggggtgatgagtaggcggtatctctgcatggactttagaggcaatatctttggaagtcactattttgaccctgagaattgcaggtttcaacatcagaccttggagaatggctatgacgtctatcactcaccccagtaccattttctggtcagcctgggacgggccaaacgggcttttctgcctggtatgaatcctccaccgtatagccagttcctctctaggcgcaatgaaatacctctgattcatttcaatactcctattccacgaaggcacacaaggtccgctgaagacgattccgaacgggatccactcaacgtgctgaagccaagggcaaggatgacgcctgccccggcatcttgttctcaggaactgccttcagctgaagacaactcccctatggcaagtgaccctctcggtgtcgtacgaggcggcagggtgaacacacacgctggaggcacgggaccggagggctgtagaccattcgctaaatttatt

SEQ ID NO: 204893 - DNA, 3018 bp, Artificial Sequence
  derived and/or modified sequence
cggcaaaaaggagggaatccagtctaggatcctcacaccagctacttgcaagggagaaggaaaaggccagtaaggcctgggccaggagagtcccgacaggagtgtcaggtttcaatctcagcaccagccactcagagcagggcacgatgttgggggcccgcctcaggctctgggtctgtgccttgtgcagcgtctgcagcatgagcgtcctcagagcctatcccaatgcctccccactgctcggctccagctggggtggcctgatccacctgtacacagccacagccaggaacagctaccacctgcagatccacaagaatggccatgtggatggcgcaccccatcagaccatctacagtgccctgatgatcagatcagaggatgctggctttgtggtgattacaggtgtgatgagcagaagatacctctgcatggatttcagaggcaacatttttggatcacactatttcgacccggagaactgcaggttccaacaccagacgctggaaaacgggtacgacgtctaccactctcctcagtatcacttcctggtcagtctgggccgggcgaagagagccttcctgccaggcatgaacccacccccgtactcccagttcctgtcccggaggaacgagatccccctaattcacttcaacacccccataccacggcggcacacccggagcgccgaggacgactcggagcgggaccccctgaacgtgctgaagccccgggcccggatgaccccggccccggcctcctgttcacaggagctcccgagcgccgaggacaacagcccgatggccagtgacccattaggggtggtcaggggcggtcgagtgaacacgcacgctgggggaacgggcccggaaggctgccgccccttcgccaagttcatctagggtcgctggaagggcaccctctttaacccatccctcagcaaacgcagctcttcccaaggaccaggtcccttgacgttccgaggatgggaaaggtgacaggggcatgtatggaatttgctgcttctctggggtcccttccacaggaggtcctgtgagaaccaacctttgaggcccaagtcatggggtttcaccgccttcctcactccatatagaacacctttcccaataggaaaccccaacaggtaaactagaaatttccccttcatgaaggtagagagaaggggtctctcccaacatatttctcttccttgtgcctctcctctttatcacttttaagcataaaaaaaaaaaaaaaaaaaaaaaaaaaaaaaagcagtgggttcctgagctcaagactttgaaggtgtagggaagaggaaatcggagatcccagaagcttctccactgccctatgcatttatgttagatgccccgatcccactggcatttgagtgtgcaaaccttgacattaacagctgaatggggcaagttgatgaaaacactactttcaagccttcgttcttccttgagcatctctggggaagagctgtcaaaagactggtggtaggctggtgaaaacttgacagctagacttgatgcttgctgaaatgaggcaggaatcataatagaaaactcagcctccctacagggtgagcaccttctgtctcgctgtctccctctgtgcagccacagccagagggcccagaatggccccactctgttcccaagcagttcatgatacagcctcaccttttggccccatctctggtttttgaaaatttggtctaaggaataaatagcttttacactggctcacgaaaatctgccctgctagaatttgcttttcaaaatggaaataaattccaactctcctaagaggcatttaattaaggctctacttccaggttgagtaggaatccattctgaacaaactacaaaaatgtgactgggaagggggctttgagagactgggactgctctgggttaggttttctgtggactgaaaaatcgtgtccttttctctaaatgaagtggcatcaaggactcagggggaaagaaatcaggggacatgttatagaagttatgaaaagacaaccacatggtcaggctcttgtctgtggtctctagggctctgcagcagcagtggctcttcgattagttaaaactctcctaggctgacacatctgggtctcaatccccttggaaattcttggtgcattaaatgaagccttaccccattactgcggttcttcctgtaagggggctccattttcctccctctctttaaatgaccacctaaaggacagtatattaacaagcaaagtcgattcaacaacagcttcttcccagtcacttttttttttctcactgccatcacatactaaccttatactttgatctattctttttggttatgagagaaatgttgggcaactgtttttacctgatggttttaagctgaacttgaaggactggttcctattctgaaacagtaaaactatgtataatagtatatagccatgcatggcaaatattttaatatttctgttttcatttcctgttggaaatattatcctgcataatagctattggaggctcctcagtgaaagatcccaaaaggattttggtggaaaactagttgtaatctcacaaactcaacactaccatcaggggttttctttatggcaaagccaaaatagctcctacaatttcttatatccctcgtcatgtggcagtatttatttatttatttggaagtttgcctatccttctatatttatagatatttataaaaatgtaacccctttttcctttcttctgtttaaaataaaaataaaatttatctcagcttctgttagcttatcctctttgtagtactacttaaaagcatgtcggaatataagaataaaaaggattatgggaggggaacattagggaaatccagagaaggcaaaattgaaaaaaagattttagaattttaaaattttcaaagatttcttccattcataaggagactcaatgattttaattgatctagacagaattatttaagttttatcaatattggatttctggt

SEQ ID NO: 204894 - DNA, 753 bp, Artificial Sequence
  derived and/or modified sequence
atgttaggagcgcgcttgcgcctttgggtatgtgctttgtgctcggtttgtagcatgtctgtgcttagagcttaccctaatgcttcgcctctgttgggaagttcttggggtggactgattcatctgtacactgcgaccgctcggaattcgtatcatcttcagatccacaaaaatgggcatgtggatggcgcgcctcatcaaacaatttattcggcactgatgattcgctcagaagatgcagggtttgtggtgatcactggcgtcatgtcacgtcgctatctgtgcatggattttagggggaatatctttggctctcattatttcgatccagaaaattgccggtttcaacatcaaacgttagaaaacggctatgatgtctatcacagcccgcaataccatttcctcgtttcattaggccgtgcgaagcgcgcgttcttaccagggatgaatccaccgccgtattctcaatttctgtctcgtcggaacgagatcccgttgattcattttaacacaccgattccgcgtcggcatacacgatcagcggaagacgattctgaaagggatcctcttaatgtcctgaagcctcgggcaagaatgacgccggcacccgcttcttgctctcaagaattgcctagcgcggaagataattcaccgatggctagcgacccactgggagttgttcgaggcggccgcgttaacacacacgcaggaggtacaggcccagagggctgcagaccatttgccaagtttatc

SEQ ID NO: 204895 - DNA, 753 bp, Artificial Sequence
  derived and/or modified sequence
atgctcggagcccgcctcagactgtgggtctgtgccctgtgttcagtgtgcagcatgtcggtgctgcgggcctacccaaacgcgtcgccactgcttggatcgtcgtggggtggcctgatccatttgtacacggcgactgcaagaaactcctaccacctgcagatccacaaaaacggccacgtcgacggcgctcctcaccagactatctactcggcactgatgattcgctctgaggacgccggattcgtggtgattaccggcgtgatgagccgccgctacttgtgtatggacttcaggggcaacatctttggatctcactactttgacccagagaattgccggtttcagcatcagaccctcgaaaacggctatgacgtgtaccattccccgcaataccacttccttgtcagcctggggcgcgccaaacgcgcgttccttccggggatgaaccctccgccgtactcacaattcctgtcgcgccggaacgaaattccgctcatccatttcaataccccgatccctcgtaggcacacccggtccgccgaagatgactccgaacgcgatccgctgaatgtcctgaagccccgcgcgcgcatgacccccgcgcctgcctcctgctcccaggaactgccgtcggcggaggacaactcaccgatggctagcgatccgctgggagtggtgcgcgggggccgcgtaaatactcacgcaggcgggactggtccagaaggatgccgcccgtttgccaaattcatc

SEQ ID NO: 204896 - DNA, 753 bp, Artificial Sequence
  derived and/or modified sequence
atgttgggtgcgagactccgcctgtgggtgtgcgctttgtgttcggtgtgctcaatgtccgtgctgcgcgcatacccgaacgcctcaccgctgctcgggagctcctggggaggcctcattcacctgtacaccgccaccgctaggaatagctaccacctgcaaatccacaaaaacggccacgtcgatggcgccccacatcaaactatctactccgcccttatgatccgctcggaagatgcaggatttgtggtgatcacgggagttatgtcgagacggtacctgtgtatggacttcagaggcaacatcttcggatcccattacttcgatcctgagaattgccggtttcagcatcagaccctggaaaatggatacgacgtgtaccatagcccgcaataccacttcctcgtgtccctggggagagccaaaagggcgtttcttccggggatgaatccgccgccatactcacagtttctctcccgccgcaacgagatccctctgatccacttcaacaccccgatcccgcgcaggcacacccgcagcgccgaagatgactcagagcgggaccctctgaatgtgctgaaacctcgcgcgcgtatgacccctgcgccagcatcgtgttcgcaggagctcccatcggctgaggacaacagcccaatggccagcgacccgctcggagtggtcagaggaggacgcgtcaatacccacgcaggtgggactggccccgaagggtgcagaccattcgccaaattcatc

SEQ ID NO: 204897 - DNA, 753 bp, Artificial Sequence
  derived and/or modified sequence
atgctcggagcacgactacggctatgggtgtgtgcattgtgctctgtctgtagcatgtcggtgctgagagcatatccaaacgcttctccactgctgggtagcagctggggaggactgattcacttgtatacagctaccgcaagaaacagttaccacctgcagattcacaagaatgggcacgttgatggcgccccacaccagacgatctacagtgcactgatgattcgaagtgaggacgccgggttcgtcgtgataaccggcgtgatgagtagacgctacctgtgcatggacttccgcgggaacattttcggaagccactactttgaccccgagaactgtaggttccagcaccagaccctggagaacggatacgacgtataccattctcctcagtatcactttcttgtatctctgggacgtgccaagagggcattcttacccgggatgaaccccccaccgtacagtcaattcctaagccgtagaaatgaaattcccctaattcatttcaacacccccattccacggcgccacacacgaagtgctgaggacgattcagagcgcgatcccctgaacgtcctgaagcctagagcccggatgacaccagcacccgcaagttgtagccaggagttacctagcgcagaagataattctcccatggcatccgatccattgggcgtggtgcgggggggcagggtgaacacacacgcgggtggcacaggacctgagggctgccgcccattcgctaagtttatt

SEQ ID NO: 204898 - DNA, 753 bp, Artificial Sequence
  derived and/or modified sequence
atgctcggcgcaaggctgaggttatgggtgtgtgctctgtgcagcgtctgcagcatgtcagttcttagggcttaccccaacgcgagccctctcctgggaagctcctggggaggactcatccacctgtacactgcgactgcacggaattcataccacttgcaaatccataagaacggccatgtggacggagcacctcatcaaaccatttacagcgccctcatgatcaggagcgaagacgctggctttgtcgtcattaccggagttatgtcccggaggtatctgtgcatggattttcgtggaaacatctttggatctcattactttgatcctgagaactgcagatttcagcaccagactctggaaaacggttatgacgtctaccattccccccagtatcatttcctggtttcgctaggtagggctaaaagagcttttctgcccggtatgaatccacccccgtactcacaattcttgagccgcagaaatgagatcccactgatccatttcaacaccccaatccctaggaggcacactaggtctgctgaagacgactctgagagggacccgctgaacgtgcttaaacctagggctcgtatgacccccgcccctgcttcatgttcacaagaattgccctcagctgaagacaactctccaatggcttcggatcctctgggcgtagtgagaggcgggagagtgaacacccacgccgggggaacgggcccagagggctgcaggccgtttgcaaagttcata

SEQ ID NO: 204899 - DNA, 753 bp, Artificial Sequence
  derived and/or modified sequence
atgctgggcgctagactccgcctctgggtgtgtgctctgtgctctgtgtgtagcatgtccgtgctgcgagcatatcctaacgcctcaccgcttctcggttcgtcgtggggcgggcttatccatctctacactgcgaccgctcgcaactcataccatctgcagatccacaaaaacggacatgtggatggagccccacaccaaaccatctactccgcactgatgatccgctccgaggacgccggatttgtggttataaccggagtcatgtcacggcggtacctgtgcatggatttccgaggaaacattttcggatcacactacttcgacccggagaattgcagattccaacaccaaactctggaaaacgggtacgatgtgtaccactcgccacagtaccatttcctcgtctccctcggcagagcgaagagggcgtttctgcccgggatgaatccaccaccttactcccagttcttgtcgcggaggaacgaaatcccgcttatccacttcaatactcccatcccgcgcaggcacactagaagcgccgaggacgactccgagcgggaccctctgaacgtgcttaagccacgagcccgtatgacccctgcgccggcgtcgtgctcccaagaactgccgtcggcagaagataattcccctatggcaagcgacccgctgggggtggtgcggggtggacgcgttaacactcatgccggaggaacgggtccagaaggatgccgtccgtttgctaagttcatc

SEQ ID NO: 204900 - DNA, 753 bp, Artificial Sequence
  derived and/or modified sequence
atgctgggggcccgcctgcgactttgggtatgtgcactctgcagcgtgtgttctatgtctgtcctgcgggcctatcctaacgcctctcctctgctcgggtcctcatggggcgggctcatccacctgtacacggcgaccgccagaaatagctaccatctccagatccacaagaacggtcatgtcgacggtgcccctcatcaaactatctactccgctttgatgataaggtccgaagacgcgggatttgtggtcatcactggtgtcatgagcaggcgatatctgtgtatggactttaggggtaacatctttggatcccactacttcgatccggagaactgccgcttccagcaccagactctcgaaaatggctatgatgtgtatcactccccccagtatcatttcctggtgtcactgggtagagcgaaacgggcttttctcccgggcatgaatccccctccctatagccaattcctgagcagacgcaacgagatcccacttattcacttcaatacaccaatacccaggagacatacccggagcgcggaagatgatagcgagcgggatcctttgaacgttcttaagccccgcgcccgaatgacgcctgcccctgcatcctgtagccaggagctgccatcagctgaggacaatagtcctatggcgagcgacccgctgggagtcgtgcggggtggccgggtcaacacacatgctggaggaactggaccggaggggtgtagacccttcgccaagtttata

SEQ ID NO: 204901 - DNA, 753 bp, Artificial Sequence
  derived and/or modified sequence
atgttgggcgcgcgactaagactttgggtctgtgccctatgctccgtctgctcaatgtctgtgctaagagcttacccgaacgcaagtcctctgctcggcagcagctggggaggcctcatacacctttacacagcaaccgcgagaaatagctaccacttgcagatacacaaaaatgggcacgtcgatggggccccgcatcaaactatctactccgcgctgatgattaggagcgaagatgctggctttgtggtgataactggggtgatgagcaggcgatatctctgtatggattttcgagggaatatcttcgggagtcactatttcgatcctgaaaactgcagattccagcatcagaccttggaaaacggctacgacgtgtaccactccccacagtatcatttccttgtctcactagggcgtgctaagcgggccttcctgccagggatgaaccctcctccatattctcagtttctgtctagacggaacgaaatccccctgatccattttaacaccccaatccctcgacggcacactcggtccgcagaggacgactcagagcgcgacccactcaatgttctcaaacccagggctcgaatgacccccgcacccgcttcctgtagccaggagttgccatctgcagaagataactcaccgatggcgtccgatccccttggagtggtacgcggaggccgggtgaacacacatgctggcggcactggtcccgaagggtgtcggccatttgctaaatttata

SEQ ID NO: 204902 - DNA, 753 bp, Artificial Sequence
  derived and/or modified sequence
atgcttggtgccagactgcggctttgggtctgtgcactgtgctccgtgtgttcaatgtcggtgctgcgcgcctaccctaatgcctcacccctcttgggttcgagctggggtggactcattcacctgtacactgccacggcgcgtaactcgtaccacctgcagatacataagaacgggcacgtggacggggcaccacatcagaccatctactcagcccttatgattcgttccgaagatgcaggatttgttgtgattaccggcgtcatgtcccgtcgctacttgtgcatggactttcgcggcaatatcttcgggtcccattactttgatccggaaaactgccgttttcaacatcaaactttggagaatggctacgacgtctaccactcgcctcaataccattttcttgtgtccctgggcagagctaagcgagcattcctcccgggaatgaatccccctccgtacagccagttcctttcccggcggaacgagatcccccttattcactttaacacgccaatccctcggaggcataccaggtccgcagaagatgattctgaacgtgacccccttaatgtcctcaagccaagagcaaggatgaccccagcacctgcctcatgttcgcaagagctgccctcggctgaagataattctccaatggctagcgatcccctcggagtggtgagaggaggtcgggtcaacactcacgcaggaggtaccggaccagagggctgccgcccgttcgccaagtttatc

SEQ ID NO: 204903 - DNA, 753 bp, Artificial Sequence
  derived and/or modified sequence
atgctcggggcgcgattacggctgtgggtgtgcgccttgtgcagcgtttgttcgatgtcagtgctaagggcataccccaacgcatctcctctgctcggctcttcatggggtggcctgatacatctctatactgctacggcaagaaacagctatcacctccagattcataagaacgggcatgtcgatggtgctccacaccagactatctattccgccctcatgatcaggtctgaggatgcaggtttcgttgtgataactggcgttatgtcacgtcgctacctgtgcatggatttcaggggcaacatcttcggcagccattacttcgatccagaaaattgcaggttccaacaccaaaccctggagaatggatatgacgtctaccatagcccccagtaccactttttggtgtccctgggccgtgcgaaacgcgccttcttgccagggatgaaccccccaccctactcacagttcctgtcacggcggaatgagatacccctaattcatttcaacaccccaattcccagaaggcatactcgctcggccgaggatgattctgaacgcgacccactcaatgttttaaaaccaagagcccgcatgacccccgcaccggcatcttgtagccaggagctaccctccgccgaagacaacagcccaatggcaagtgaccctctcggcgtggttcggggggggcgagttaatacgcatgcagggggcactggaccggagggttgccggccattcgccaagttcatc

SEQ ID NO: 204904 - DNA, 753 bp, Artificial Sequence
  derived and/or modified sequence
atgcttggtgcacgcctgaggctgtgggtttgcgctctgtgctccgtgtgctctatgtccgtgctgcgcgcgtacccaaacgccagccctctcctgggaagcagctggggggggcttatccacctctacaccgccacagctcggaactcctaccaccttcagatccacaagaatggtcacgtggacggagcaccccatcagaccatatactctgcactgatgatcagatccgaagacgcaggctttgtcgtgattacaggagtaatgagtagacgctacttgtgcatggattttcgcggcaacattttcggttcacactatttcgaccccgagaattgccgctttcagcatcagacgctcgagaatggatacgacgtttaccattcacctcaataccactttctggtgagcctgggacgggcaaagcgagcgttcttgcctggaatgaatcccccaccctattctcagtttttgagtagacggaatgagatccccctgatccatttcaataccccaattcctcggcgccacacccggtctgccgaggatgacagcgagcgagatcccctgaacgtgcttaagccgcgggctaggatgaccccggcccccgcttcctgctcccaggaacttccctccgcagaggacaattctcctatggccagcgatccactgggagtggtgaggggcggacgggtgaacactcacgcggggggcactggtcccgaaggctgtaggccctttgcaaagttcatt

SEQ ID NO: 204905 - DNA, 753 bp, Artificial Sequence
  derived and/or modified sequence
atgcttggagcgcgacttcgcctttgggtgtgcgcactctgctcagtctgtagcatgtctgtgcttagagcataccccaacgcctcaccactgcttgggtcatcgtggggtgggctgattcatttgtataccgcaactgcacgcaattcgtaccaccttcagatccacaaaaatggtcacgttgacggagcccctcatcaaactatttactcggcacttatgattcggtcggaagatgcaggttttgtggtgataactggtgtcatgtcaaggcgctacctgtgtatggatttcagaggtaacattttcgggagccactattttgatccagagaactgcagatttcaacatcagaccctggagaacggatacgatgtgtaccattccccacagtaccacttccttgtgtcccttggtagggcaaaaagagcattccttcccggaatgaatccccctccgtattcgcaatttctttctcgtagaaacgagattccactgatccatttcaatacccccattcctcgccgccataccagatccgcagaggatgattccgaacgcgacccactcaacgtccttaagcccagagcacggatgaccccagctccggcaagctgctcccaggaacttccttcggcggaggacaactcccctatggcctcggatcccttgggcgtggtccgaggaggtcgcgtgaacacccatgcaggaggcacgggtcctgagggctgtaggcctttcgccaagttcatc

SEQ ID NO: 204906 - DNA, 753 bp, Artificial Sequence
  derived and/or modified sequence
atgctcggtgctcgcctcagactctgggtctgtgccctgtgttcagtgtgctcgatgagcgtcctgcgcgcctacccgaacgcttcccctctgctcggatcgtcctggggcggactgatccatctgtacaccgcaaccgcgaggaattcgtaccacctccagatccacaaaaacggccacgtggatggagcgccacaccagacgatttactcggcccttatgatccgatccgaggacgccgggttcgtggtgatcactggggtgatgtctcggcggtacctgtgcatggattttagaggaaacatctttggctctcactacttcgacccggagaactgtcggtttcaacaccagactctggagaatgggtacgacgtgtaccattcccctcagtaccacttcctggtgtctctgggaagagctaagagggcctttctgcctggcatgaacccgccgccttattcgcagttcctgtcacgccggaacgaaatcccactgatccactttaacaccccgatcccacggcgccatactagaagcgccgaagatgatagcgaacgcgacccgctgaatgtccttaagccacgggcacgaatgacgccggcaccggcttcatgctcgcaagagcttccttccgctgaggacaacagcccgatggcgtccgatcccctgggtgttgtgcggggaggaagggtcaatactcatgcgggaggaactggtccggagggatgcaggcccttcgccaagtttatc

SEQ ID NO: 204907 - DNA, 753 bp, Artificial Sequence
  derived and/or modified sequence
atgttgggcgctagactcagattgtgggtctgcgctctgtgctcggtgtgctctatgagcgtgcttcgggcctacccgaacgccagcccgctcctggggtcctcgtggggagggctgatccacctctacaccgcgactgctcgcaattcctaccacctccagattcataaaaatggacacgtggacggagccccgcatcagaccatctacagtgcgcttatgatccggtccgaggacgcgggcttcgtggtgatcactggtgtgatgtcacgccgatatctgtgcatggacttcaggggcaacatttttggcagccactactttgaccccgaaaactgtcggttccaacaccaaaccctggaaaacggatacgatgtctaccactcaccgcaataccatttcctggttagcctcggaagggcaaagcgcgccttcctccctgggatgaacccacctccttactcacagttcctgagccgtcgcaatgaaatcccactgatccacttcaatactcccatcccgcggcgccatacgcggtcggccgaggacgattccgaaagggacccactgaacgtcctgaagccgcgcgccagaatgaccccagccccagcatcctgctcgcaggagcttccgtccgcagaggataactcgcctatggcgtcggatcccctgggagtggtgcgcggcggaagagtcaacacccatgccggaggaactggtccggaaggatgtcggccgtttgcaaagttcatc

SEQ ID NO: 204908 - DNA, 753 bp, Artificial Sequence
  derived and/or modified sequence
atgcttggcgctcggctgagattgtgggtctgtgctctctgctcggtctgcagcatgagtgtgctgcgcgcttatccgaacgccagccctttactggggagcagctggggcggtctcattcatctctatacagcgacggcgcgcaacagctatcacttacagatccataagaatggacacgtcgacggcgcgccccatcaaacgatctattccgcactgatgattcgtagcgaggatgccggcttcgtcgtgatcacaggcgtcatgtcgcggcggtatctttgcatggatttccgaggtaatatctttgggtcacattactttgacccggaaaattgtcgatttcagcatcaaacgctggaaaatggctatgatgtgtatcattcgccgcagtatcatttcttagtgtcccttgggcgagccaagcgggcttttttgccagggatgaatccaccaccctattcccagtttctatccagacgaaacgagataccacttattcattttaatacaccgattccgcggcgccacacaagaagcgcagaggatgattcggagcgtgatccgcttaacgttctcaagccgcgtgcacgtatgacccctgcccccgcgagctgttctcaagagctaccttccgcggaggataacagcccaatggcgtccgatccactcggcgtcgtccggggtggtcgggtcaacacgcacgctggaggtactggtccggaaggatgcagacccttcgctaagtttatc

SEQ ID NO: 204909 - DNA, 753 bp, Artificial Sequence
  derived and/or modified sequence
atgctgggagcccgtctccggctgtgggtgtgcgctctttgttccgtgtgctccatgtcggtgctcagagcctatccaaacgccagccctctcctcggctcctcgtggggggggctgatccatctctatacagccacggcccgcaacagttaccacctgcagatacataagaacggacacgttgatggggccccacaccagactatttactctgcccttatgatccgtagtgaggacgcggggttcgtggtgatcactggagttatgagtcgaagatatttgtgcatggactttagaggtaatatatttggatctcactattttgatcctgaaaactgtcgctttcagcaccagactctcgagaacggatatgatgtctatcattcacctcagtaccactttctggtttcattggggagagcaaagagggcatttctgccgggcatgaacccaccaccatatagccagttcttaagtcgccgcaatgagatccctctgatccatttcaacaccccaatcccacgcagacatacacgttccgctgaagatgatagtgaacgtgaccccctgaacgtgctaaagccccgggccaggatgacacccgcacccgctagctgcagccaggagctgccaagcgccgaggataattccccgatggcatccgatcctctgggcgtggtgagagggggccgggtcaatacccacgcaggagggacgggacccgagggctgccgcccattcgccaaattcatt

SEQ ID NO: 204910 - DNA, 753 bp, Artificial Sequence
  derived and/or modified sequence
atgctgggggccaggctaaggttatgggtgtgcgctctctgtagtgtgtgttcaatgtccgtcctccgggcctatcccaatgcatctccgctattgggatcctcttggggagggcttatacatttatatacagcaacagctaggaattcctatcatctgcagattcacaaaaatggacatgtcgatggagctcctcatcagacaatttattccgctctcatgattcggtccgaagatgcagggttcgtggtcatcacaggagtaatgtccaggcggtacctatgcatggattttaggggaaatatatttggatctcactatttcgatccagaaaattgtcggtttcagcaccagacactggaaaacggatatgatgtgtaccacagtcctcagtatcactttctggtctctctcggaagagccaagagggcttttctgccaggaatgaatcccccaccgtattcccagtttctgtcacggagaaatgagattcctttgatacatttcaatacacctattcccaggcgacacactagatccgccgaagatgatagtgaacgggatcctcttaacgtcctcaaaccacgggctcgaatgacgccagctcctgcctcctgctctcaggaactaccctccgctgaagacaactcacctatggcctcagatcctttaggggtagtgaggggagggcgagttaatactcatgccgggggaactgggcctgaggggtgccgcccctttgctaaatttatt

SEQ ID NO: 204911 - DNA, 753 bp, Artificial Sequence
  derived and/or modified sequence
atgttgggcgccaggctgcggctgtgggtgtgcgcgctatgcagtgtgtgtagtatgtccgttctgcgcgcttacccaaacgcgtctccattactgggtagctcctggggtgggctgatccacctctacaccgcgacggcgcgcaactcttaccacctccagatccacaagaatggccacgtggatggagctccgcatcaaactatatatagtgccctgatgatccgcagtgaagatgccggttttgtggtgatcaccggcgtgatgtcaagaaggtacctgtgcatggattttaggggaaatattttcggaagccattacttcgaccctgaaaattgccgattccagcaccaaactctagagaacgggtatgacgtgtaccactcgccacagtatcatttcctggttagtttaggcagggccaaaagggcatttctgcccggcatgaatcccccaccttacagccaatttctgtcacgtagaaatgaaatccctcttatacacttcaatacacccattcctcgcagacatactcgctccgcggaagatgacagtgaacgcgaccccttgaatgtgctcaagccaagggctagaatgaccccagcacctgcttcctgttcccaagagctgccttctgctgaagacaactccccaatggcctccgacccacttggcgtcgtaaggggaggacgtgtgaatacccatgccggcggtacggggccagagggttgtcggccttttgctaagttcatc

SEQ ID NO: 204912 - DNA, 753 bp, Artificial Sequence
  derived and/or modified sequence
atgttgggcgcgcgcctccgcctctgggtgtgcgctctgtgctccgtgtgctcgatgtcggtgctcagagcctacccgaacgctagcccactccttgggtcctcatggggaggtctgatccatctctatactgcgaccgctcgcaactcataccaccttcagatccataagaacggacacgtggacggagcgccacaccagacgatctattcagccctcatgatcagaagcgaggacgccggattcgtggtgattaccggtgtgatgtcccgccgctacctgtgcatggatttcagaggaaatatcttcggctcacattacttcgacccggagaactgtcgctttcaacaccagactctcgagaatgggtacgatgtctaccactcaccacaataccatttcctggtgtcgcttggacgcgccaagagagcgtttctgcccggcatgaatcctccgccatattcgcagtttctgtcgcgcagaaacgaaattccgctgatccacttcaacactcctatccctaggagacacactcggtccgctgaggacgacagtgagcgggaccctctcaacgtgctgaaaccacgcgcccgcatgacccccgcgcccgcatcgtgttcacaggaactgcccagcgctgaggacaatagcccgatggcgtcggacccgcttggcgtggtgcgcggaggcagagtcaatacccatgcgggaggaaccggtcctgaaggatgcaggccattcgccaagttcatt

SEQ ID NO: 204913 - DNA, 753 bp, Artificial Sequence
  derived and/or modified sequence
atgctcggagcacggctgcgcctgtgggtgtgcgccctgtgctccgtgtgctccatgtcagtgctgcgggcttacccaaacgcctcgcctctgcttggctcgtcttggggaggattgatccacctctacactgcgacggcgcgcaatagctaccatttgcagatccacaaaaacggacacgtggacggagccccacaccagaccatatactccgccctcatgatcaggtcggaggacgctggtttcgtggtaattaccggagtgatgagccgccgctacctgtgcatggactttcggggcaacattttcggatcgcactacttcgacccggaaaactgtcgcttccagcaccaaactcttgaaaatggctacgacgtgtatcactcccctcaataccatttcctcgtgtccctgggacgcgccaagcgcgccttcttgccgggcatgaatccaccaccttactcccagttcctgtctcgccggaacgaaatccctcttatccatttcaatactccgattcctcggcgccatactcggtcagccgaggatgacagcgaacgggatccgctgaacgtcttgaagccgagagcacgcatgactccagcgccggcctcgtgctcgcaggagctgccgtccgccgaagataacagccccatggcgtcagatcctttgggagtggtccgcggaggaagagtgaacacgcatgccggaggcactggaccggaaggctgcagacccttcgcgaagtttatc

SEQ ID NO: 204914 - DNA, 753 bp, Artificial Sequence
  derived and/or modified sequence
atgctcggagcaaggcttcgattgtgggtctgtgcgctgtgctcagtgtgttcgatgtcagtcctccgggcctacccaaacgcatcacccctgctggggtccagctggggaggactgatccacctctacaccgcaaccgcaaggaattcctaccatctccaaattcataagaacggtcatgtcgatggggccccacaccagacgatttactcagcattgatgattcgcagcgaagatgcgggtttcgtggtgattacgggtgtcatgtccagaaggtacctgtgtatggattttagagggaacatttttggatcacattacttcgatccggaaaattgcagattccagcatcagactctcgaaaatggttacgatgtgtaccattccccacaatatcattttcttgtgtccctcggcagagcgaagagagccttccttccagggatgaacccacctccctactctcagtttctgtcgcgcaggaacgaaatccctcttattcatttcaacacccctattcccaggagacatacccgttccgcagaagatgattcggaaagagatccactcaatgtcctgaagcctagggcaagaatgacccctgcccctgcaagctgtagccaggagctgccaagcgctgaggacaattcaccgatggcctccgaccccctgggggtggtgagaggaggacgggtgaacacccacgctggaggaaccggccctgagggatgccgtccttttgcgaagttcatc

SEQ ID NO: 204915 - DNA, 753 bp, Artificial Sequence
  derived and/or modified sequence
atgttaggtgcgcgattacgtttatgggtatgtgcgctatgttcggtatgttcgatgtcggtattacgagcgtatccgaatgcgtcgccgttattaggttcgtcgtggggtggtctaatacatttatatacggcgacggcgcgaaattcgtatcatctacaaatacataaaaatggtcatgtagatggtgcgccgcatcaaacgatatattcggcgttaatgatacgttcggaagatgcgggttttgtagtaataacgggtgtaatgtcgcgtcgatatttatgtatggattttcgtggtaatatatttggttcgcattattttgatccggaaaattgtcgatttcaacatcaaacgctagaaaatggttatgatgtttatcattcgccgcaatatcattttctagtatcgttaggtcgtgcgaaacgtgcgtttctaccgggtatgaatccgccgccgtattcgcaatttttatcgcgacgtaatgaaataccgttaatacattttaatacgccgataccgcgacgtcatacgcgttcggcggaagatgattcggaacgtgatccgctaaatgtattaaaaccgcgagcgcgaatgacgccggcgccggcgtcgtgttcgcaagaattaccgtcggcggaagataattcgccgatggcgtcggatccgttaggtgttgtacgtggtggtcgagttaatacgcatgcgggtggtacgggtccggaaggttgtcgtccgtttgcgaaatttata

SEQ ID NO: 204916 - DNA, 753 bp, Artificial Sequence
  derived and/or modified sequence
atgctgggagcgcgcctgcgtctgtgggtgtgcgcactttgttcagtgtgctcgatgtcggtcttgcgcgcttaccctaacgcgagcccattgctgggctcgtcatggggcggtttaattcatctgtacacggcaacggcgcgcaatagttaccatctgcagatccacaagaacggtcatgtggatggtgctccccatcagacaatctattccgcgcttatgatacggtcagaggacgctggcttcgttgttatcacaggcgtcatgagccgccgctacctgtgtatggactttcgcggtaacatcttcggttctcattacttcgatccggagaattgccgattccagcaccagaccctggagaacggatacgatgtttaccattcaccccagtaccattttctggtgtcactgggccgcgccaaacgggccttcctgccaggaatgaatccaccaccatacagccagttcctttcacgcaggaatgaaatccccttaatacatttcaacactcctataccccgtagacatacccgttccgccgaggatgatagcgagcgtgacccgctaaatgtgctgaagccgagagcgcgaatgacgcccgcgccagcttcctgcagtcaggaactgccgagcgccgaggataattcgcctatggcctcggatccactgggcgtggtgcgcggaggcagagtcaacactcacgccggtggcacaggccccgagggctgccgtccgttcgcgaagttcata

SEQ ID NO: 204917 - DNA, 753 bp, Artificial Sequence
  derived and/or modified sequence
atgttgggtgcacgtctccgcctgtgggtctgcgcactctgctctgtctgctccatgagcgtcctgagggcttacccaaacgcttcccctttgctgggcagtagttggggcggactgatccacttgtatactgcaacagccagaaactcctaccacctccaaatccataagaacggccacgttgacggcgccccccaccagaccatttacagcgcacttatgatccgctccgaagacgcaggattcgtggtgattaccggcgtaatgtccaggaggtatctttgtatggatttccgtggaaatatctttggatcccactacttcgatcctgaaaactgcagatttcagcaccaaactttggaaaatggatatgacgtgtatcattcaccccagtaccacttcctggttagtcttggtagagccaaacgcgcattcctgccaggaatgaacccaccaccctactctcagttcttgtcacgccgcaacgaaattccacttatacactttaacacccctatcccaagacgtcacacaaggtcagccgaagatgacagtgagcgcgaccccctgaatgttttgaaaccacgtgcacgtatgacaccagccccagcctcatgtagtcaagagctgccttcagcagaagataatagccccatggcctccgaccctctcggagtcgtcaggggaggtagggtgaacacccatgccggtggaaccggtcccgagggctgtcgccctttcgccaagtttata

SEQ ID NO: 204918 - DNA, 753 bp, Artificial Sequence
  derived and/or modified sequence
atgctgggtgcaagacttaggttgtgggtttgtgccctctgctccgtgtgctcgatgtccgttctgagagcataccctaacgcctcgccactcctgggttcgagctggggaggtctgattcacctttacacggctaccgcgcgaaattcataccacctccagattcacaaaaatggacatgtggatggtgctcctcaccagaccatttactccgccttgatgataaggtctgaagatgcaggcttcgttgtgataactggagtgatgtcccgccgttacctgtgtatggactttagagggaacatttttgggtcacattacttcgatccagaaaactgccgcttccaacatcagacgctggaaaacggatacgatgtgtaccatagccctcagtatcattttcttgtgtcgcttggacgtgcgaaacgggcttttctgcctgggatgaatccacccccatactcccaatttctgtcgcggagaaacgagattcctcttattcactttaacactcccatcccgcggcgtcatacccggagcgcggaggacgattcagaaagggatcccctgaacgtgcttaagcctcgcgcccgtatgacccccgctcctgcctcatgcagccaagagctcccatccgcagaagataactccccgatggcgtcggacccactcggtgtcgtgcgaggaggtagagtgaatacccatgcaggtggaaccgggccggagggctgtcggccattcgcaaagttcatc

SEQ ID NO: 204919 - DNA, 753 bp, Artificial Sequence
  derived and/or modified sequence
atgttgggcgcaagactcaggctctgggtgtgtgcgctgtgttctgtttgttctatgagcgtgcttagggcctacccgaacgcttcaccactgctgggttccagttggggtggactgatccacctctacaccgcgacagcccgcaattcttaccatctccagatacataagaacggccacgttgatggcgcgccgcaccaaaccatatacagtgcgcttatgatccgctcagaggacgccggcttcgtggtcatcaccggagttatgagccgcaggtacctttgcatggattttcgcggcaacattttcggaagtcactacttcgatcctgaaaattgccgctttcagcatcaaacactggaaaacggatatgacgtgtaccattccccccaataccacttcttggtctctcttggcagggccaaaagagccttcctcccaggtatgaatccgccaccctactctcagttccttagccgcagaaacgaaatcccgctcattcatttcaacacgccaataccacgccgccacacccgctccgccgaggacgatagcgagagagatcccctcaacgtgctgaaacccagggcacgcatgaccccagctcctgccagctgttcacaggaactcccttctgccgaggataattcacccatggcctctgacccacttggagttgttaggggtggccgcgtgaacacccacgctggaggaacaggtcccgagggatgcagacctttcgctaagttcatt

SEQ ID NO: 204920 - DNA, 753 bp, Artificial Sequence
  derived and/or modified sequence
atgctgggtgctaggcttcggctctgggtgtgtgctctgtgctcggtctgttccatgtcggtcctgcgcgcctaccccaatgccagcccgttgcttggctcatcctggggaggactcatccacctctacactgcgactgccagaaactcctaccatctgcagatccacaaaaacggtcacgtggacggagcccctcaccagacgatctactcagcactgatgatcaggagcgaggacgccggcttcgtcgtgatcaccggagtgatgtcacgccgctacttgtgcatggacttccgcggaaacattttcggatctcattacttcgaccccgagaattgccgcttccagcaccagaccctggaaaatggatacgatgtgtaccattcgccacagtatcatttcctggtgtccttgggccgggcgaaacgggctttcctgccgggaatgaacccacctccgtacagccagttcctgtcgagacgaaatgaaatccccctgatccactttaataccccaatcccaagacggcatacccggtccgcagaggatgactccgaacgcgatccactgaatgtgctgaagccgcgggcacgcatgaccccggctccggcatcgtgctcacaggaactgccctcagccgaggacaacagtccgatggcatcagacccacttggtgtggtgagaggaggccgagtgaacactcacgctgggggcactggaccggaagggtgccgcccgttcgctaagttcatc

SEQ ID NO: 204921 - DNA, 753 bp, Artificial Sequence
  derived and/or modified sequence
atgcttggagctcgtctgagactttgggtctgcgccttgtgcagcgtctgcagcatgtcggtattgagggcttatccgaatgcttccccacttcttgggtctagctggggtggattaatacacctgtacaccgctaccgcgagaaacagctaccatttacaaatccacaagaatggtcatgtggacggtgcgcctcatcaaaccatttatagcgctctgatgattcggtcagaggatgcagggtttgttgtcattacaggggtaatgtccaggcggtacctttgtatggacttcagaggaaacatctttggatctcactatttcgacccagaaaattgtagattccaacaccagacactggaaaatgggtacgatgtctatcattcacctcagtaccacttcttagtgagcttaggacgagctaaaagagcctttctccctggaatgaacccacctccgtattctcaattcttaagtaggagaaacgagattcccttgatacattttaacacacctattcctcgcagacatactcgtagcgctgaagatgatagcgaacgagatcctctcaatgttctcaaaccaagggcacggatgactccggctccggcatcgtgttcacaggaactaccatccgcagaggataactccccaatggcctcagatcccttaggtgttgttcgggggggtagggttaacactcatgccggaggtacaggtccggaaggttgtcgtcctttcgctaaattcatt

SEQ ID NO: 204922 - DNA, 753 bp, Artificial Sequence
  derived and/or modified sequence
atgcttggggcacgcctgaggctctgggtctgtgcactgtgcagcgtgtgctcaatgtccgtgcttcgcgcttatcctaatgccagtcccttgcttggaagttcctggggcggccttattcatctgtataccgcaactgctcggaattcctaccacctgcagattcacaagaacggtcatgtcgatggagccccacatcagactatatattcagctctgatgataaggtctgaggacgctggcttcgtggtgattacgggcgttatgtctagaaggtacttgtgtatggactttagggggaatattttcgggagccactattttgaccccgagaattgcagatttcagcaccagacccttgagaacgggtacgacgtctaccactccccacagtaccattttctggtgtcactggggcgggcgaaacgggccttcctgccaggcatgaaccctcctccctatagtcagttcttatctaggcgtaacgagatccctttaatccactttaataccccaatacctagacgtcacacccggtccgcagaagacgatagcgagagagacccgctgaatgtgctgaaaccaagggctcgtatgactcccgcgccagcatcttgctcacaagaactacctagtgctgaagataattcacctatggcgagcgatcccctaggcgttgttcggggaggacgggtcaatacccatgccggcggtactggaccagagggatgccgcccattcgcaaagtttatt

SEQ ID NO: 204923 - DNA, 753 bp, Artificial Sequence
  derived and/or modified sequence
atgctgggagcccgcctcaggttgtgggtctgcgccctctgctctgtgtgcagtatgtccgtgcttcgggcatacccgaatgcgtcgccactgctcggtagcagctggggcggcctcattcatctgtacaccgcgactgcacgcaattcgtatcaccttcagatccacaagaacggacacgtcgacggcgcgccgcatcagactatatacagcgccctgatgatcaggtccgaggatgcagggttcgtggtcatcactggtgtaatgtcccgccgttacctgtgcatggatttcagaggcaacatctttgggagccattacttcgatcctgaaaactgccggttccaacatcagaccttggagaacggatacgacgtataccattccccgcaataccactttttggtgtctctcggaagggccaagcgtgctttcctgccggggatgaacccccctccgtactcacagttcctgtcacgacgaaacgaaatcccgctgatccacttcaatacgccaatcccgcgccgccacactagatcggccgaagatgactccgaacgggacccactgaacgtgctgaagccgcgcgcccgcatgacccctgccccagctagctgttcacaagaacttccttcggcggaggacaactccccgatggcatcagacccgctgggagtggtgcggggaggaagggttaatacccacgctggcggaactggacctgaggggtgtcggccctttgcgaaattcatt

SEQ ID NO: 204924 - DNA, 753 bp, Artificial Sequence
  derived and/or modified sequence
atgctaggcgccaggctcaggctgtgggtttgtgctctgtgcagcgtctgctccatgtctgtgctccgggcttatcccaatgccagtcctctgctggggtctagctggggtgggttaattcacttgtatacagccaccgcccgcaattcttatcacttgcagatccacaagaacggccatgtcgatggggcccctcaccaaaccatatactccgccctaatgatcagaagcgaagacgcaggcttcgttgttataactggagtcatgtccagacggtatctttgtatggacttcaggggcaatatctttggcagccactacttcgacccagaaaactgcaggtttcagcatcagactctggaaaacgggtacgatgtatatcattctcctcagtatcacttcctggttagtctaggcagagctaagagggcatttctcccaggcatgaatcctcctccatactctcagttcctaagtagaaggaacgaaatcccactaattcactttaatactccaatccctaggaggcatactcgtagcgccgaagatgattctgaacgggatcccctgaacgtcctgaagccccgcgccaggatgacaccagcccctgccagttgtagtcaggaactcccctccgcagaagataactccccaatggcctctgaccctttaggcgttgtgcggggaggaagagttaacactcacgccggcggcaccggccccgaaggatgccggccctttgctaaatttatc

SEQ ID NO: 204925 - DNA, 753 bp, Artificial Sequence
  derived and/or modified sequence
atgttgggcgccagactccgcttgtgggtgtgcgccctttgtagcgtgtgctccatgtcagtgcttcgggcctaccctaacgcctcaccgctactgggctctagttggggcggcctgatccatctctacacagcaacggcccggaatagttaccacttgcaaatacacaagaacggccacgttgatggcgcaccacatcaaaccatctattctgccctgatgatccggtcagaggacgctgggttcgtggtgatcaccggcgtcatgagcaggagatatctgtgcatggattttcgaggtaacatctttggcagccactatttcgatcccgaaaactgcagatttcagcaccagacactcgaaaacggatacgatgtttatcactccccccagtatcacttcctggtttccctggggagagcgaaaagggccttccttccagggatgaacccccctccttacagccagttcctgtccaggaggaacgaaatcccgctgatccactttaatacaccaatacctcggagacacactcgctctgctgaagatgactcggagcgggaccctctgaacgtactcaagccgagagcgcgcatgacaccagcccccgcgagctgctcccaggagttaccctccgctgaggacaattcacctatggcatcggaccctcttggtgtggtgcgcggtgggagagtgaatacccatgccggagggacgggacccgagggttgccgcccgttcgccaagttcatc

SEQ ID NO: 204926 - DNA, 753 bp, Artificial Sequence
  derived and/or modified sequence
atgctgggagcacgcctccgcctttgggtgtgtgctctctgttcagtctgctcgatgtcggtgctgcgagcataccctaatgcgagccctctccttgggtcgagctggggcggactcatccatctttacaccgccaccgcacgcaactcctaccaccttcagattcacaagaacggtcatgtggacggagcaccccatcagaccatttactcggctttgatgattagaagcgaagatgcgggcttcgtggtgattaccggagttatgtctaggagatacctgtgtatggattttcgcggtaacatctttggctcccattactttgatcccgagaactgtaggtttcaacaccagaccctggaaaacgggtatgatgtgtaccactcaccacaatatcatttcctggtttctcttggaagagccaagcgtgcgttcctgcccgggatgaatcctccgccgtactcccaatttctgtccagacggaacgaaatcccactgatacatttcaacacccctatcccacggagacacactcggtccgcagaggacgattcggaacgcgatccactcaatgtgctgaagccaagggcaagaatgaccccagcacctgcaagctgtagccaagagctgccctcagcagaagataactcccccatggccagcgaccctcttggagtggtgaggggtggaagagtcaatacccacgcaggtggaactggacccgagggatgtcgcccattcgcaaagtttatc

SEQ ID NO: 204927 - DNA, 753 bp, Artificial Sequence
  derived and/or modified sequence
atgctgggagccagactgcgcctttgggtgtgcgcactctgcagcgtgtgttccatgagcgttcttagagcatacccaaacgcctcacccttgcttggtagctcgtggggtggacttatccacctgtacactgcgaccgcaagaaacagctatcatcttcagatccataagaatggacatgttgacggagcaccacatcaaactatttacagcgcactcatgattcgctccgaagatgctggctttgtggtgattaccggagtgatgtcgcgcagatacctgtgtatggattttagaggaaacatcttcgggtcccattactttgatcccgaaaactgccggttccaacatcaaactcttgaaaacgggtacgatgtgtaccactccccacagtatcatttcctcgtcagcttgggacgggcaaagcgggcattcctgccagggatgaatccgcctccatactcccagtttctgtcgcgtcgtaacgaaatacctcttattcacttcaatacccccattcctagacgtcacaccagatcggctgaggatgactccgaacgcgatcccctgaatgtgctcaagccccgagccagaatgacgccggcccctgcatcgtgttcccaagaactgccgtcagccgaggacaattcacctatggccagcgacccgttgggcgtcgttaggggtggacgggtgaacactcatgcaggcggaaccggaccggagggatgtcggccatttgcaaagtttatc

SEQ ID NO: 204928 - DNA, 753 bp, Artificial Sequence
  derived and/or modified sequence
atgctgggagcacgcctgcggctttgggtgtgtgcactttgctcggtctgcagcatgtcggtcttgcgtgcttacccaaacgcaagccctctcctgggttctagctggggtgggcttatccacctgtataccgcaaccgcacgaaactcctaccatctccaaatccacaaaaatgggcatgtcgacggcgcccctcaccaaaccatttactcagcgcttatgattaggtcagaggatgccggcttcgtggtgatcactggtgttatgagcaggcgctacctttgtatggacttcagaggcaatatcttcggttcgcactactttgaccccgagaactgtaggttccaacaccagacccttgaaaatggatacgatgtgtaccactccccgcagtaccattttcttgttagtctggggagggccaagagagcctttctgcctggtatgaatcctcctccgtactcgcagtttctcagccgacgaaatgagattcctcttattcacttcaatacgccaattccacgccggcatacccgctcggcagaggatgactctgaaagagatcctcttaatgtcctgaagcctagggcacgtatgacgccagccccagcatcatgttcacaggaactcccctccgccgaggacaatagccctatggcatctgatccactgggtgtcgtgagagggggaagagtgaacacccatgcgggtggtaccgggcctgaaggatgtcggccttttgcaaagtttata

SEQ ID NO: 204929 - DNA, 753 bp, Artificial Sequence
  derived and/or modified sequence
atgctaggggcccgactgcgactctgggtctgcgcgttatgtagcgtttgtagcatgagtgtgttgagagcttatcccaacgcctctcccctattgggcagcagttggggaggcctaattcacctgtacaccgccaccgccagaaattcctatcacttacaaatccacaagaacgggcacgttgatggtgctcctcaccagactatttactcggccctaatgatcaggtccgaggacgccggctttgtggttatcacgggtgtcatgagcagacgctatctgtgcatggatttcagggggaatatcttcggcagtcactatttcgacccggaaaactgcagattccagcaccagaccctagagaacgggtatgatgtgtatcatagtccccagtatcatttccttgtatccctggggagggccaaacgggcattcctgcccggaatgaatcctcctccctactcccagtttttatcccggaggaacgaaataccattgattcacttcaacacacccatcccccgtcgtcatactaggagcgctgaggacgatagtgaacgcgatcctctgaacgtgcttaagccgcgcgcacggatgacgcctgctcctgcctcctgcagtcaggagctcccatcggccgaggataattctcctatggccagcgacccacttggggtagttcgcggcggtagggtaaatactcatgccggtggaacaggccccgaaggttgtagacccttcgctaaatttatt

SEQ ID NO: 204930 - DNA, 753 bp, Artificial Sequence
  derived and/or modified sequence
atgcttggtgcaaggcttcgcttgtgggtgtgtgcactttgttccgtgtgttccatgtccgttctgagagcatatcccaacgcgtcaccactgcttggatcatcgtggggcggtctgattcatctgtacacggccaccgcacgcaattcgtaccatctccagatacacaagaacgggcacgtggatggtgcccctcatcaaactatctactcggccttgatgatacggtccgaagatgcaggatttgtggtgataactggtgtcatgtcgcgtaggtacctgtgcatggacttccgcggcaacatcttcggttcgcactatttcgacccagaaaactgtagatttcagcaccagacccttgagaacggttacgacgtctaccattcgcctcaataccattttcttgtctcactcggaagggcaaagagagcctttctgccggggatgaaccccccaccttactcccagtttctttccaggcgcaacgaaatcccattgatccactttaacacccctattcctagacggcacactagatcggcagaagatgacagcgaaagggacccgctgaacgtactcaaacctagagcccggatgactcctgctcccgcttcatgctcccaagaactgccatccgcagaagataattccccgatggcgtctgatcctcttggggtggttaggggagggcgagtgaacacccacgctggtggtaccggaccagagggttgcagaccgtttgccaagtttatt

SEQ ID NO: 204931 - DNA, 753 bp, Artificial Sequence
  derived and/or modified sequence
atgctgggcgctagactcaggctttgggtgtgcgccctctgttcggtctgttcgatgtccgtgttgcgggcctacccgaacgcgagtccgctgctgggaagctcgtggggcgggttgatccacctgtacaccgcaaccgccaggaacagctaccatctccaaatccacaaaaacggacacgtggacggggccccacaccagaccatctactcagctctcatgatccgctcggaggacgcgggcttcgtcgtaatcaccggcgtgatgtcccgccggtacctgtgcatggattttcgcgggaacatctttggctcacactactttgatccagaaaattgccgctttcaacaccagactctggaaaacggatacgacgtctaccactctccccagtaccatttcttggtgtcattgggacgagctaagcgtgcattcctccccggtatgaacccgccgccatactcgcagttcctctcccggcgcaacgagatccctctgatccacttcaacactccaatcccgcggcgccacacccgcagcgcggaggacgattccgagcgggaccccctgaatgtcctgaagccccgggcaagaatgaccccagccccggcctcctgttcacaggaactgccatcggcggaggacaactccccgatggcatcagacccactgggggtggtgcgcggcggcagagtgaacacgcacgctgggggaactgggcctgagggatgcagaccttttgcaaaattcatc

SEQ ID NO: 204932 - DNA, 753 bp, Artificial Sequence
  derived and/or modified sequence
atgcttggtgcacgcctgcggctttgggtgtgcgcactttgcagcgtctgctcaatgtcagtcctgcgcgcatacccgaacgcatcacctctccttggctcatcctggggaggactcattcatttgtacactgcgacggcaaggaactcataccatctgcaaattcacaaaaacgggcacgtggatggcgctccacaccagaccatttactcggcacttatgataagaagcgaggatgcaggatttgtggtgattaccggagtcatgtcccggaggtacctttgcatggatttccggggaaacattttcggctcgcactactttgatcccgaaaactgtaggttccagcaccagaccctggaaaatggatacgatgtctatcatagccctcaataccattttctcgtgtcactgggtcgggcaaagcgagcattcctgccggggatgaacccacccccttactcacagtttctttcgagacggaatgagataccactgatccatttcaacacccctatccctaggcgccatactagatcggccgaggatgactcggagcgggaccctcttaatgtgctgaagcctagagctaggatgactcctgctccagcatcatgttcacaggaacttcccagcgcggaagataactccccgatggcgtccgatcctctcggagttgtgcgcggtggtagagtgaatacccacgccggaggaaccggtcctgagggatgcagaccttttgcgaaattcatc

SEQ ID NO: 204933 - DNA, 753 bp, Artificial Sequence
  derived and/or modified sequence
atgcttggggcacggctgaggttatgggtctgcgctctgtgtagcgtgtgttctatgtcggtgctccgagcgtaccccaatgccagcccgctgttgggttcctcctggggtggcttgatacatctctataccgctaccgcccggaacagctaccacttgcagattcataagaacggccacgttgatggcgctccacatcagactatatactcggcattgatgataagatcagaggatgccggttttgtcgttattactggcgtgatgtcaaggaggtatctctgtatggactttagggggaacatttttgggtcccattattttgatccagagaactgtaggtttcagcaccagaccctggagaacgggtacgatgtctaccactcaccccagtatcacttcctggtcagcctcggtcgagcaaagcgggcctttctcccaggcatgaatccacctccttactcgcaattcttgtcccggaggaacgagattcccttgatacacttcaatacccctattccgaggcgtcatacccgaagtgcagaggacgatagcgagcgagaccctctgaatgtgcttaagccgcgcgcccggatgacgcctgcacctgcatcgtgtagtcaagaacttcccagtgctgaggacaacagtcccatggcttcggaccctctcggcgtggtgagggggggaagggttaacacacacgccggcgggacaggaccggagggctgtcgtccattcgcaaagttcatt

SEQ ID NO: 204934 - DNA, 753 bp, Artificial Sequence
  derived and/or modified sequence
atgctgggcgcccggctgagactgtgggtatgtgcactctgtagcgtttgttctatgtcggtcctccgcgcataccccaatgcttcaccattgttagggagcagctggggcgggctcatccacttatacacggcgaccgcacggaactcttatcacctgcaaattcataaaaatgggcatgtggacggtgcccctcaccagactatctacagcgccctcatgatccgatctgaagatgctggcttcgtagtgatcacgggcgtgatgtcccgaagatacctttgtatggatttccggggtaacatatttggaagccattatttcgaccctgagaattgccgatttcagcatcagaccttagagaacggatatgatgtttaccattccccacagtatcactttttggtctccctgggacgagctaaaagagcatttctcccaggtatgaacccccctccatactcccaattcctgtccaggagaaatgaaattccactgattcatttcaatacccccatccccaggaggcatacaaggtccgccgaggatgacagtgagcgtgatcctttgaatgtcttgaaaccccgggcgcgaatgaccccagcacccgccagctgtagtcaggaactaccctctgccgaggataatagccccatggcaagcgaccctcttggggtagtgcgcggtgggagagttaacacacatgcaggtggaaccggacctgaaggatgtaggcccttcgccaagttcatt

SEQ ID NO: 204935 - DNA, 914 bp, Artificial Sequence
  derived and/or modified sequence
gggaaataagagagaaaagaagagtaagaagaaatataagagccaccatgctgggtgcaagacttcgcctttgggtgtgcgcactttgcagcgtgtgttcaatgagcgtgctgagagcataccctaacgcctccccccttctgggctcgtcgtggggaggcctgattcacctttacactgcaaccgcaaggaattcatatcatttgcaaatccataagaatgggcatgtcgatggagcccctcatcagaccatctactcagcactcatgattcggtcggaagatgctgggtttgtcgtcattactggagtgatgtctcggcggtacctctgtatggattttcgcggaaacatattcggcagccattactttgacccagagaactgtagatttcaacatcaaacccttgaaaatggatacgatgtctaccacagcccacagtaccacttccttgtgtcgctgggacgagcaaaacgcgcctttctcccgggtatgaacccaccaccctactcccagtttctcagcagacgcaacgaaatcccactgattcacttcaatacccctattccaaggagacatactcggtccgccgaggacgactccgaacgtgaccccttgaacgtgctgaagcctagggctagaatgacgccagcccctgcgtcatgctcgcaagaactcccgtcggcggaggataactcccctatggcatccgatcctctgggagtggtgcgaggtggtcgtgttaacacccacgcgggtggcactggacccgaagggtgtagacctttcgcaaagtttatctgataataggctggagcctcggtggccatgcttcttgccccttgggcctccccccagcccctcctccccttcctgcacccgtacccccgtggtctttgaataaagtctgagtgg

SEQ ID NO: 204936 - DNA, 666 bp, Artificial Sequence
  derived and/or modified sequence
gcccggcggcggggcgccgccgccgccctgagccgggcccgggtgtggggtaggctatacccccagccaaaactccaagaggccgctcctttgcctagaagaggatgggacggaggtggtcacgtgggtggcgggggggacgctagggggccaagactggagggtgaatcgcttccacaccctcgcctggctcctgctgcaccatcagcctctccggctttggcccatccgttggttgctcacccagcacgattagatagctcccgcaaccccggcaccggaatctacttcgggggctctgctgcctggcgccctgggctgagtcgggtcagtcaggacagaagcccaaattccagtcggccattatccttgtctggaattcccgcagatgtgtcgccccccgctaaaaccagggaggaaaaacgggagcccgccctgtggtctagagagaaggaggaaggtgctacagctctgcaggaccatggctgggaaaaggaatggcgtgggtttcgcaccttttccgttagacttcatgtcccggttttcatctccggatctcaggctctggggtcttgggcgcggatcacctgctgtccccctctttggagcaggggatgcttctgcaaagagagcagtggcagagaaagtatggcatgcctgacctag

SEQ ID NO: 204937 - DNA, 529 bp, Artificial Sequence
  derived and/or modified sequence
gggaaataagagagaaaagaagagtaagaagaaatataagagccaccatgctgggtgcaagacttcgcctttgggtgtgcgcactttgcagcgtgtgttcaatgagcgtgctgagagcatccgccgaggacgactccgaacgtgaccccttgaacgtgctgaagcctagggctagaatgacgccagcccctgcgtcatgctcgcaagaactcccgtcggcggaggataactcccctatggcatccgatcctctgggagtggtgcgaggtggtcgtgttaacacccacgcgggtggcactggacccgaagggtgtagacctttcgcaaagtttatctcatcctcgagcaaggcccctccgccctcactgccatcgccaagccgcctgccgggaccttccgacaccccgatcctcccgcaggctggagcctcggtggccatgcttcttgccccttgggcctccccccagcccctcctccccttcctgcacccgtacccccgtggtctttgaataaagtctgagtgggcggc

SEQ ID NO: 204938 - RNA, 914 nt, Artificial Sequence
  derived and/or modified sequence
gggaaauaagagagaaaagaagaguaagaagaaauauaagagccaccaugcugggugcaagacuucgccuuugggugugcgcacuuugcagcguguguucaaugagcgugcugagagcauacccuaacgccuccccccuucugggcucgucguggggaggccugauucaccuuuacacugcaaccgcaaggaauucauaucauuugcaaauccauaagaaugggcaugucgauggagccccucaucagaccaucuacucagcacucaugauucggucggaagaugcuggguuugucgucauuacuggagugaugucucggcgguaccucuguauggauuuucgcggaaacauauucggcagccauuacuuugacccagagaacuguagauuucaacaucaaacccuugaaaauggauacgaugucuaccacagcccacaguaccacuuccuugugucgcugggacgagcaaaacgcgccuuucucccggguaugaacccaccacccuacucccaguuucucagcagacgcaacgaaaucccacugauucacuucaauaccccuauuccaaggagacauacucgguccgccgaggacgacuccgaacgugaccccuugaacgugcugaagccuagggcuagaaugacgccagccccugcgucaugcucgcaagaacucccgucggcggaggauaacuccccuauggcauccgauccucugggaguggugcgagguggucguguuaacacccacgcggguggcacuggacccgaaggguguagaccuuucgcaaaguuuaucugauaauaggcuggagccucgguggccaugcuucuugccccuugggccuccccccagccccuccuccccuuccugcacccguacccccguggucuuugaauaaagucugagugg

SEQ ID NO: 204939 - protein, 401 aa, Artificial Sequence
  derived and/or modified sequence
MQRCWQGDPRVRPTFQEITSETEDLCEKPDDEVKETAHDLDVKSPPEPRSEVVPARLKRASAPTFDNDYSLSELLSQLDSGVSQAVEGPEELSRSSSESKLPSSGSGKRLSGVSSVDSAFSSRGSLSLSFEREPSTSDLGTTDVQKKKLVDAIVSGDTSKLMKILQPQDVDLALDSGASLLHLAVEAGQEECAKWLLLNNANPNLSNRRGSTPLHMAVERRVRGVVELLLARKISVNAKDEDQWTALHFAAQNGDESSTRLLLEKNASVNEVDFEGRTPMHVACQHGQENIVRILLRRGVDVSLQGKDAWHCTTLAGPPAHRQAAGQAAGGECERPDAGWEDAIAPGRTARALPRGPHPHRPVLRRQRLQPAGTDTPARPRRRGTRALPGCSCIGALARRP

SEQ ID NO: 204940 - protein, 784 aa, Artificial Sequence
  derived and/or modified sequence
MEGDGGTPWALALLRTFDAGEFTGWEKVGSGGFGQVYKVRHVHWKTWLAIKCSPSLHVDDRERMELLEEAKKMEMAKFRYILPVYGICREPVGLVMEYMETGSLEKLLASEPLPWDLRFRIIHETAVGMNFLHCMAPPLLHLDLKPANILLDAHYHVKISDFGLAKCNGLSHSHDLSMDGLFGTIAYLPPERIREKSRLFDTKHDVYSFAIVIWGVLTQKKPFADEKNILHIMVKVVKGHRPELPPVCRARPRACSHLIRLMQRCWQGDPRVRPTFQEITSETEDLCEKPDDEVKETAHDLDVKSPPEPRSEVVPARLKRASAPTFDNDYSLSELLSQLDSGVSQAVEGPEELSRSSSESKLPSSGSGKRLSGVSSVDSAFSSRGSLSLSFEREPSTSDLGTTDVQKKKLVDAIVSGDTSKLMKILQPQDVDLALDSGASLLHLAVEAGQEECAKWLLLNNANPNLSNRRGSTPLHMAVERRVRGVVELLLARKISVNAKDEDQWTALHFAAQNGDESSTRLLLEKNASVNEVDFEGRTPMHVACQHGQENIVRILLRRGVDVSLQGKDAWLPLHYAAWQGHLPIVKLLAKQPGVSVNAQTLDGRTPLHLAAQRGHYRVARILIDLCSDVNVCSLLAQTPLHVAAETGHTSTARLLLHRGAGKEAMTSDGYTALHLAARNGHLATVKLLVEEKADVLARGPLNQTALHLAAAHGHSEVVEELVSADVIDLFDEQGLSALHLAAQGRHAQTVETLLRHGAHINLQSLKFQGGHGPAATLLRRSKT

SEQ ID NO: 204941 - protein, 832 aa, Artificial Sequence
  derived and/or modified sequence
MEGDGGTPWALALLRTFDAGEFTGWEKVGSGGFGQVYKVRHVHWKTWLAIKCSPSLHVDDRERMELLEEAKKMEMAKFRYILPVYGICREPVGLVMEYMETGSLEKLLASEPLPWDLRFRIIHETAVGMNFLHCMAPPLLHLDLKPANILLDAHYHVKISDFGLAKCNGLSHSHDLSMDGLFGTIAYLPPERIREKSRLFDTKHDVYSFAIVIWGVLTQKKPFADEKNILHIMVKVVKGHRPELPPVCRARPRACSHLIRLMQRCWQGDPRVRPTFQGNGLNGELIRQVLAALLPVTGRWRSPGEGFRLESEVIIRVTCPLSSPQEITSETEDLCEKPDDEVKETAHDLDVKSPPEPRSEVVPARLKRASAPTFDNDYSLSELLSQLDSGVSQAVEGPEELSRSSSESKLPSSGSGKRLSGVSSVDSAFSSRGSLSLSFEREPSTSDLGTTDVQKKKLVDAIVSGDTSKLMKILQPQDVDLALDSGASLLHLAVEAGQEECAKWLLLNNANPNLSNRRGSTPLHMAVERRVRGVVELLLARKISVNAKDEDQWTALHFAAQNGDESSTRLLLEKNASVNEVDFEGRTPMHVACQHGQENIVRILLRRGVDVSLQGKDAWLPLHYAAWQGHLPIVKLLAKQPGVSVNAQTLDGRTPLHLAAQRGHYRVARILIDLCSDVNVCSLLAQTPLHVAAETGHTSTARLLLHRGAGKEAMTSDGYTALHLAARNGHLATVKLLVEEKADVLARGPLNQTALHLAAAHGHSEVVEELVSADVIDLFDEQGLSALHLAAQGRHAQTVETLLRHGAHINLQSLKFQGGHGPAATLLRRSKT

SEQ ID NO: 204942 - protein, 721 aa, Artificial Sequence
  derived and/or modified sequence
MELLEEAKKMEMAKFRYILPVYGICREPVGLVMEYMETGSLEKLLASEPLPWDLRFRIIHETAVGMNFLHCMAPPLLHLDLKPANILLDAHYHVKISDFGLAKCNGLSHSHDLSMDGLFGTIAYLPPERIREKSRLFDTKHDVYSFAIVIWGVLTQKKPFADEKNILHIMVKVVKGHRPELPPVCRARPRACSHLIRLMQRCWQGDPRVRPTFQEITSETEDLCEKPDDEVKETAHDLDVKSPPEPRSEVVPARLKRASAPTFDNDYSLSELLSQLDSGVSQAVEGPEELSRSSSESKLPSSGSGKRLSGVSSVDSAFSSRGSLSLSFEREPSTSDLGTTDVQKKKLVDAIVSGDTSKLMKILQPQDVDLALDSGASLLHLAVEAGQEECAKWLLLNNANPNLSNRRGSTPLHMAVERRVRGVVELLLARKISVNAKDEDQWTALHFAAQNGDESSTRLLLEKNASVNEVDFEGRTPMHVACQHGQENIVRILLRRGVDVSLQGKDAWLPLHYAAWQGHLPIVKLLAKQPGVSVNAQTLDGRTPLHLAAQRGHYRVARILIDLCSDVNVCSLLAQTPLHVAAETGHTSTARLLLHRGAGKEAMTSDGYTALHLAARNGHLATVKLLVEEKADVLARGPLNQTALHLAAAHGHSEVVEELVSADVIDLFDEQGLSALHLAAQGRHAQTVETLLRHGAHINLQSLKFQGGHGPAATLLRRSKT

SEQ ID NO: 204943 - DNA, 1206 bp, Artificial Sequence
  derived and/or modified sequence
atgcaacgttgctggcagggggacccccgagtgaggccgacctttcaagaaattacttccgagacagaagatttgtgcgagaagccggacgacgaggttaaggagacagcacacgatctggatgtaaaatctcccccggaaccacgatccgaagtggtacctgctagactgaagcgagcttcggccccgaccttcgataacgactacagtttatctgaactgctttcacagctcgactccggggtatcccaggccgtcgaggggcccgaggaactgagccgatcttcctccgagtctaaattgcccagctcaggatcaggcaagcgcctttccggtgttagttctgtggacagcgccttttcctcccgtggatctctgagtctgtccttcgaacgagaacctagcacaagcgacctggggacgaccgatgtgcagaaaaaaaaactcgtggatgccatcgtgtccggggacacatccaaactgatgaagatcctgcagcctcaggacgtcgatctggcacttgactcgggcgcctctttgctgcacctggctgtggaggcaggacaagaagaatgtgcgaagtggcttttgttaaataatgccaaccctaacctgtccaatcggagaggaagtacccctctacacatggcagtggaaaggcgagttaggggcgttgttgaactgctgctggcccgaaagatcagcgttaacgctaaggacgaggaccagtggactgcattgcacttcgcagctcaaaatggcgacgagtcaagtacaaggctactgctagagaagaatgcatccgtgaacgaagtggatttcgaggggagaacccctatgcacgttgcttgtcagcacgggcaggaaaatatcgttaggattcttctccgaaggggcgtcgatgtgtcactgcagggcaaggatgcttggcactgcacgacattagcaggccccccggcgcaccggcaagccgcaggccaggctgccggcggtgagtgcgagcgacctgacgccggctgggaagacgccattgcacccggaagaaccgcccgggctcttccaaggggtcctcaccctcaccggcctgtgcttcggcgccaaaggttacagccggctgggaccgatacaccagctcgtcccagacgccgcggcactcgagccctgccgggatgctcttgtattggcgctctcgcccgcaggccttag

SEQ ID NO: 204944 - DNA, 2355 bp, Artificial Sequence
  derived and/or modified sequence
atggagggggatggaggaacaccttgggcgctggctcttcttcgcacatttgatgcaggggaatttacaggatgggagaaagtgggtagcggtgggttcggacaagtgtacaaagtgaggcatgttcattggaaaacctggctggcaattaaatgctctccatcgctgcatgtcgacgatcgcgagcgtatggagctcctcgaagaggctaagaagatggagatggcgaagtttcgctatatccttccagtgtatggaatttgccgcgagccagtgggcctggtcatggaatatatggaaaccggctctctggaaaagcttctggcaagcgagccactgccatgggatctgaggttccgaattattcacgaaaccgcagtcgggatgaactttttacactgcatggctccccctctgctccacctggatcttaaacccgccaacattttgctagatgctcactaccacgtaaagatctccgacttcggcctagccaaatgtaatggactgagccactctcatgatcttagtatggacggcctgttcggaaccattgcctatttgcccccagaaaggattcgcgagaaatcaaggttgtttgatactaaacacgatgtatattcctttgcaatcgtgatatggggggtattaacacagaaaaagccatttgccgacgaaaaaaatattctgcacatcatggtgaaagtggtcaagggccataggcccgaattaccacccgtgtgtagggccagacctcgagcgtgcagccatctcattagacttatgcaacggtgctggcagggagacccacgggtgcggccgacctttcaggaaatcacgagcgagacggaggacctgtgtgaaaaacctgacgatgaggttaaggagactgcccacgatttagatgtgaaaagccctcccgagcctaggtctgaggtagtaccggcaagacttaagagggcctccgccccaacatttgataacgactactccttaagtgagctcctgagtcagctcgactccggtgtgtcgcaggcagtagaaggcccggaggagctctcccgtagctcgagtgagtctaaattaccgtcgagcggcagtggaaagcgtctgtctggagtgagctcggtggattccgccttttcatcaaggggcagcttaagcttgtcttttgaacgggagcctagtacttccgatctgggcaccaccgacgttcagaaaaagaagttagtcgacgctattgtgagcggcgatactagcaaactgatgaagatcctccagccacaggatgtagacttggcattggactcaggcgcttctctgctgcacctagccgttgaggccgggcaagaggaatgtgctaagtggcttctacttaacaatgctaatcccaatttgtcgaataggcggggctccactcccctgcatatggccgtagagaggagggtgaggggggtggtcgaactgctcctcgctagaaagatatcagtcaatgcaaaggacgaggaccagtggacagcactgcacttcgccgcccagaacggcgacgagtcatccacacgcctgctgctggagaagaacgcctcagtgaacgaagtggacttcgagggaagaacccccatgcatgtggcctgtcaacacggtcaggaaaacatcgttcgcatcctgcttcgcaggggcgtcgacgtgtctctgcaggggaaggatgcatggcttcccctgcactacgcggcatggcagggacatctgcccatcgtcaaattgttggctaaacagcccggggtgtccgtgaatgcccaaacattggatggacgcactccgctgcatctggctgcccagagaggccattatagagtcgccaggattctcatcgatctctgttcagatgtgaacgtctgttccctgctagcacaaacacccctgcatgtggccgcagagactggacacacctcaacagcgcgcttgctcctgcacaggggggctgggaaagaagccatgactagtgacggctatactgctctccaccttgccgccagaaacgggcacctggcaactgtcaagttgcttgttgaggaaaaagcagacgttttggccagggggcccctgaatcagactgctttacacttggccgccgcgcatggtcactccgaagtcgtggaggagctggtgagcgcagacgttattgacttgtttgatgaacaaggactgtccgcattacatctggctgcacagggacgccatgcacagaccgtggagaccttgctgcgccacggagcacacataaacctacaatctctcaagtttcagggagggcacggacccgctgcgacgctgctgagacgttcaaagacctag

SEQ ID NO: 204945 - DNA, 2499 bp, Artificial Sequence
  derived and/or modified sequence
atggaaggagatggagggacaccctgggccttagcactcttgaggacttttgatgccggggagtttaccgggtgggaaaaggtaggcagcggtggatttggccaggtgtacaaagttcgccacgttcactggaagacttggctggctataaagtgcagcccaagcctgcacgtcgatgatcgggagcgaatggagctgctggaagaggccaaaaaaatggagatggcgaaattcaggtatattttgccagtgtatggcatatgtcgggaaccagtcggtcttgttatggagtacatggagaccggctcactcgaaaagcttcttgcatctgagccacttccttgggacctgagattccggataattcacgagaccgccgttggtatgaactttctgcactgtatggcacccccgctgctgcaccttgatctgaagcctgcgaatatcctcctggacgcgcattatcacgtgaagatttccgactttggattggccaaatgtaatgggctctcccactcacacgacctttctatggacgggctgtttggcacaatcgcctacctccccccagagcggattagagagaagagtcggctgtttgacacaaagcatgatgtttacagctttgccatcgtgatctggggagtccttacccaaaagaaaccctttgcagatgagaagaatatcctgcatatcatggtaaaggtggtgaagggccatagaccggagctaccccccgtgtgcagggccagacccagggcctgttcacatctcatcagactgatgcagagatgctggcagggggatccacgcgtgaggccaacgttccagggtaacggactcaatggggaactgatccggcaagttttagccgcgcttctgcctgtgacaggacggtggcgatctccgggcgaagggttccggttggagtccgaggttatcattagggtgacttgccctctctcttctccccaggaaattaccagtgaaaccgaagacctttgcgaaaagccagatgacgaagtgaaggagactgcacatgacctggacgtaaaaagtcccccagagcctcgttctgaagtggtcccagctcgtctcaagagagcttccgctcctaccttcgacaatgactactccctgagcgagctcctctctcaacttgatagtggggtttctcaagcggttgaaggccccgaggaactgtctagatccagctctgaaagtaagttgccaagtagcggttccggaaagagactgagcggcgtgtcttcagtagactcggcttttagcagccgggggtcgctaagtctttcgttcgaaagggagcctagcaccagtgatctgggaaccacagatgtccaaaagaagaagctcgttgacgccattgtcagcggagacacaagtaaactcatgaaaatcttgcagcctcaggatgtcgatctagcactagattcaggagcctcactactgcacctggcggtcgaagccgggcaggaggagtgcgcgaaatggctcttactaaataacgccaacccaaatctgagcaaccggagggggagtaccccattgcatatggccgtggaaagaagagtccgaggcgtggtcgagcttctgctggccagaaaaatctctgtcaacgcgaaggacgaagaccaatggacagctctgcacttcgccgcgcagaatggagatgaaagcagcacccgattgctgctggagaaaaacgcttctgttaatgaggtggattttgagggccgaacccctatgcacgtggcctgccagcatggtcaggaaaatattgtcaggatccttctacgaaggggcgtcgatgtgagtttgcaagggaaggacgcctggctcccccttcattacgctgcgtggcagggacacttacccatcgtgaagctcctggcaaagcagcccggagtgtccgtgaacgcccagaccctggacggccgtacgcctttacacctggcggctcaaagaggccactacagagtggcccgaatcctcattgacctatgcagcgatgtcaatgtctgttcattactcgcgcaaactcctttgcacgttgccgcggagactggtcacacctctacagctcggctgttgctacaccgcggggccggcaaagaggccatgacctccgacggatatacggcactccacttggccgcccggaatggacacctggccactgttaagttattagtagaggagaaggctgatgtgctcgccagaggccccctgaatcagaccgctctgcatctggccgcggcccacggccatagtgaagttgtggaggaactggtgagcgctgacgtgatagacctcttcgacgagcaaggtctgtctgcgctgcatctcgctgcccaggggagacacgctcagacagtggagacactacttcggcacggagctcatataaaccttcagtctctgaaattccagggaggtcatggtcccgctgctactctgctgaggcgcagtaaaacgtag

SEQ ID NO: 204946 - DNA, 2166 bp, Artificial Sequence
  derived and/or modified sequence
atggaactcctggaggaagccaagaagatggagatggctaagtttagatatatactgccggtctacggcatttgcagggaaccagtgggcctcgtcatggaatacatggagacaggctcgctggagaagttactcgcttcagagccactgccatgggacctgaggtttcgtatcatccatgaaacagcagtgggaatgaactttctgcactgtatggcaccacctctgctgcacctggatctgaaacctgccaatattttactggatgctcattaccatgtcaaaatctcggacttcgggttggccaaatgcaacggactctcacatagccacgacctctctatggatggcctatttggtacgattgcctacctccctcccgagcggattagggagaagtcccgcctgtttgacactaaacacgatgtttattctttcgcgattgtgatctggggcgtgctgacccagaagaaacctttcgccgatgaaaagaacattctgcacatcatggttaaagtggttaagggccatcgccctgagctgcccccagtttgtagagctcggccccgtgcatgctcccacctgatcagacttatgcaacgctgctggcaaggcgatcccagggtgagacccacattccaggagatcactagcgaaacagaggacctatgtgagaagcccgacgatgaggtgaaagaaaccgcccatgaccttgacgtgaagtcccctcctgaacctcgctccgaggttgtgcccgctcgattgaagagagcctccgctcctacttttgacaatgactatagcctttcggagttgctctcgcaattggatagcggggtctcccaggctgttgaagggcctgaagagttatcccgatccagctccgaatctaaactgccaagctcagggtccggtaagagactgtctggcgtgtctagtgtggactctgcgtttagcagccgtgggtctttgagcctgtccttcgagagagagccaagtacatctgatctcggcaccacagacgtgcagaagaagaaacttgtggacgctattgtttccggagacacatcgaagctgatgaaaatcctgcagccgcaggacgtggatttggcgttagattctggggcttcactgctgcacctcgcagtggaagcaggtcaggaggagtgtgctaagtggttgctcctgaacaacgccaaccccaacctgagcaataggcggggctcaacccccctacacatggccgtggaacgcagagtgagaggagtcgtggagcttctgctcgcccggaagattagcgtcaacgcaaaagatgaagatcagtggactgctcttcattttgccgctcagaacggcgatgaatcatcaacgcgattgttactggaaaagaatgctagcgttaatgaagtagacttcgagggacgaactcctatgcacgttgcatgtcagcacggccaggagaacatagttagaatactcttacgacgcggagtggacgtgtctcttcagggtaaagatgcctggctgcccctgcattatgcagcctggcagggacacctccccatcgttaagctcctcgccaaacagcctggagtctctgtgaacgcccagaccctggacgggaggacacccctccatctcgcggcacagagaggacactaccgcgtcgcgaggatcctgatcgatctttgcagcgacgttaacgtctgttctctgttggcccagactcctctacatgtggcagcagagactggccatacttctacggccaggttactcctccatagaggtgcagggaaggaagcaatgacgagtgacgggtatacagcactgcacctggctgctagaaacggccatctcgccactgtgaagttactagtcgaggaaaaggccgacgtgctcgcccgggggcccctgaatcaaactgcattgcatctggctgctgcccacggtcacagtgaggtggtggaagagctggtgtctgcagacgtgatcgatctgtttgatgagcaggggctttccgcgctccacttagccgcacagggaagacacgctcagactgtagagaccttgctaaggcatggagctcacattaatctgcagtctttgaagttccaaggcggtcacggtccagccgccactctactcaggaggagcaaaacctag

SEQ ID NO: 204947 - DNA, 2166 bp, Artificial Sequence
  derived and/or modified sequence
atggaattgctggaggaggccaaaaaaatggaaatggccaagttccggtatatcctgccggtgtacggcatatgccgcgagccggtggggctcgtgatggaatacatggagaccggaagtctggagaagcttttggccagtgagccactcccctgggacctgaggttccgtataatccacgaaaccgcggtggggatgaattttcttcactgtatggcacctcccctgctgcatctcgacctcaaaccagctaacattctactcgacgctcattaccacgtcaagatctccgactttggcctggccaagtgcaatggcttgtctcactcccatgacttgtcaatggatggcctgtttggcacaatcgcgtatctccctcctgagcggattcgggaaaaatctcggctgtttgacactaaacatgatgtctactccttcgccattgttatctggggcgtattgactcaaaaaaagccttttgctgacgaaaagaatattctacatattatggtgaaggtcgtcaagggtcaccgtccagaattgcctcctgtgtgtagggccagaccaagggcctgcagccacctgatcagacttatgcaacgatgctggcagggcgaccctcgcgtcagaccaacattccaggaaattacttccgagacggaggatttatgtgagaaaccagatgatgaagtaaaggaaactgcacacgacctggacgtaaaatcacctccggagcctcggtctgaggtcgtgcccgcccggcttaagcgggccagcgcccctactttcgataacgactactctctctctgaactgctgtcacaactggacagcggcgtgagccaggccgtagagggccccgaagaattgagtcggagttcctcagagtcaaaattgccaagtagcggaagcggaaaaagactgtccggggtctctagcgtggatagcgctttctctagcagaggatcactctcactctccttcgagagagagccatctacatctgatctggggacaacagacgtgcagaaaaagaagttggtggacgcaattgtatcaggggatacttcaaagctcatgaagatcctacagccacaggatgtggacctggctttggacagcggcgcttctctgttgcatcttgcagttgaggcaggccaggaggagtgtgcaaagtggctgctgttgaacaatgctaatccaaacctgagcaacagaagagggtccacccccctccatatggcagttgaaaggcgagtcagaggggttgtggagctcctcctcgcgcggaagatttccgtgaatgctaaggacgaagaccaatggacagcactccattttgccgctcagaatggcgacgagtcttctaccagactactacttgagaaaaatgcatctgtcaacgaggtggattttgagggtcgaacacctatgcatgtggcttgccaacatggccaggagaatatagtccgtattcttctgaggcgcggcgtggacgttagtcttcagggaaaggatgcctggctgccactgcattatgccgcctggcagggccaccttccaatagttaaactgctggccaaacaacccggggtctccgtcaatgctcagacattggatggtcggacccccctgcacctggcagcgcagagaggccactatcgggtagcaagaatactgattgacctttgtagtgatgttaatgtctgttcactgctggcgcagacccctcttcacgtcgctgctgagacggggcataccagcaccgccagactcttgctgcatcggggggcgggaaaggaggccatgacatccgacggttacaccgcccttcacttagcagccaggaacggccacctggccactgtgaaacttctggtggaagagaaggcagacgtattggctagaggcccattgaaccaaacagctcttcatcttgctgctgctcacggtcacagcgaggtggtcgaagagttggtgagcgctgacgtgattgacctgtttgatgagcaggggttgagcgccctgcatctggcggcccaagggcggcacgcacagactgttgagactctactgcgacacggagcacacattaacctccaaagtctgaaattccaaggtggccatgggccagccgcaaccctactccgcaggtcgaagacatag

SEQ ID NO: 204948 - DNA, 1206 bp, Artificial Sequence
  derived and/or modified sequence
atgcagcgctgctggcagggcgacccccgggtgcggcccaccttccaggagatcaccagcgagacagaggacctgtgtgagaagccagatgatgaggtgaaggagacagcccatgacctggatgtgaagagccccccagagcccaggtctgaggtggtgcctgcccggctgaagagggccagcgcccccacctttgacaatgactacagcctgtctgagctgctgagccagctggacagcggcgtgtcccaggccgtggagggccctgaggagctgagccgcagcagcagcgagagcaagctgcccagcagcggcagcggcaagaggctgtctggagtgtcctctgtggacagcgccttcagcagccggggcagcctgagcctgagctttgagcgggagcccagcaccagtgacctgggcaccacagatgtgcagaagaagaagctggtggatgccatcgtgtctggggacaccagcaagctgatgaagatcctgcagccccaggatgtggacctggccctggacagcggggccagcctgctgcacctggccgtggaggccggccaggaggagtgtgccaagtggctgctgctgaacaatgccaaccccaacctgagcaacagaagaggcagcacccccctgcacatggctgtggagcggcgggtgcggggcgtggtggagctgctgctggccaggaagatctctgtgaatgccaaggatgaggaccagtggacagccctgcactttgctgcccagaatggagatgagagcagcacccggctgctgctggagaagaatgcctctgtgaatgaggtggactttgagggccgcacccccatgcacgtggcctgccagcacggccaggagaacatcgtgcgcatcctgctgcggcggggcgtggatgtgtccctgcagggcaaggatgcctggcactgcaccaccctggccggccccccagcccaccggcaggccgccggccaggccgccggcggggagtgtgagaggccagatgctggctgggaggatgccatcgcccctggccgcacagcccgggccctgccccggggcccccacccccacaggcctgtgctgcggcggcagaggctgcagcctgctggaacagacaccccagcccggccccggcggcggggcacccgggccctgcccggctgcagctgcatcggggccctggcccggcggccctag

SEQ ID NO: 204949 - DNA, 2355 bp, Artificial Sequence
  derived and/or modified sequence
atggagggagatggcggcaccccctgggccctggccctgctgcggacctttgatgctggggagttcaccggctgggagaaggtgggcagcggcggcttcggccaggtgtacaaggtgagacatgtgcactggaagacctggctggccatcaagtgcagccccagcctgcacgtggatgaccgggagaggatggagctgctggaggaggccaagaagatggagatggccaagttccgctacatcctgcctgtgtatggcatctgccgggagcctgtgggcctggtgatggagtacatggagaccggcagcctggagaagctgctggccagcgagcccctgccctgggacctgcgcttccgcatcatccatgaaacagctgtgggcatgaacttcctgcactgcatggccccacccctgctgcacctggacctgaagccagccaacatcctgctggatgcccactaccacgtgaagatcagtgactttggcctggccaagtgcaatggcctgagccacagccatgacctgtccatggatggcctgtttggcaccatcgcctacctgcccccagagcgcatccgggagaagagccggctgtttgacaccaagcatgatgtgtacagctttgccatcgtcatctggggcgtgctgacccagaagaagccctttgctgatgagaagaacatcctgcacatcatggtgaaggtggtgaagggccacaggcctgagctgccccctgtgtgccgggcccggccccgggcctgcagccacctgatccggctgatgcagcgctgctggcagggcgacccccgggtgcggcccaccttccaggagatcaccagcgagacagaggacctgtgtgagaagccagatgatgaggtgaaggagacagcccatgacctggatgtgaagagccccccagagcccaggtctgaggtggtgcctgcccggctgaagagggccagcgcccccacctttgacaatgactacagcctgtctgagctgctgagccagctggacagcggcgtgtcccaggccgtggagggccctgaggagctgagccgcagcagcagcgagagcaagctgcccagcagcggcagcggcaagaggctgagcggcgtgtcctctgtggacagcgccttcagcagccggggcagcctgagcctgagctttgagcgggagcccagcaccagtgacctgggcaccacagatgtgcagaagaagaagctggtggatgccatcgtgtctggggacaccagcaagctgatgaagatcctgcagccccaggatgtggacctggccctggacagcggggccagcctgctgcacctggccgtggaggccggccaggaggagtgtgccaagtggctgctgctgaacaatgccaaccccaacctgagcaacagaagaggcagcacccccctgcacatggctgtggagaggagagtgcggggcgtggtggagctgctgctggccaggaagatctctgtgaatgccaaggatgaggaccagtggacagccctgcactttgctgcccagaatggagatgagagcagcacccggctgctgctggagaagaatgcctctgtgaatgaggtggactttgagggccgcacccccatgcacgtggcctgccagcacggccaggagaacatcgtgcgcatcctgctgcggcggggcgtggatgtgtccctgcagggcaaggatgcctggctgcccctgcactatgctgcctggcagggccacctgcccatcgtgaagctgctggccaagcagcccggggtgtctgtgaatgcccagaccctggatggccgcacccccctgcacctggccgcccagaggggccactacagagtggcccgcatcctgattgacctgtgcagtgatgtgaatgtgtgcagcctgctggcccagacccccctgcacgtggccgctgagaccggccacaccagcacagcccggctgctgctgcacagaggagctgggaaggaggccatgaccagtgatggctacacagccctgcacctggccgccagaaatggccacctggccaccgtgaagctgctggtggaggagaaggcagatgtgctggcccggggccccctgaaccagacagccctgcacctggccgccgcccacggccacagcgaggtggtggaggagctggtgtctgcagatgtgattgacctgtttgatgagcagggcctgagcgccctgcacctggccgcccagggcagacatgcccagacagtggagaccctgctgcggcatggagcccacatcaacctgcagagcctgaagttccagggcggccacggccctgctgccaccctgctgcggcgcagcaagacctag

SEQ ID NO: 204950 - DNA, 2499 bp, Artificial Sequence
  derived and/or modified sequence
atggagggagatggcggcaccccctgggccctggccctgctgcggacctttgatgctggggagttcaccggctgggagaaggtgggcagcggcggcttcggccaggtgtacaaggtgagacatgtgcactggaagacctggctggccatcaagtgcagccccagcctgcacgtggatgaccgggagaggatggagctgctggaggaggccaagaagatggagatggccaagttccgctacatcctgcctgtgtatggcatctgccgggagcctgtgggcctggtgatggagtacatggagaccggcagcctggagaagctgctggccagcgagcccctgccctgggacctgcgcttccgcatcatccatgaaacagctgtgggcatgaacttcctgcactgcatggccccacccctgctgcacctggacctgaagccagccaacatcctgctggatgcccactaccacgtgaagatcagtgactttggcctggccaagtgcaatggcctgagccacagccatgacctgtccatggatggcctgtttggcaccatcgcctacctgcccccagagcgcatccgggagaagagccggctgtttgacaccaagcatgatgtgtacagctttgccatcgtcatctggggcgtgctgacccagaagaagccctttgctgatgagaagaacatcctgcacatcatggtgaaggtggtgaagggccacaggcctgagctgccccctgtgtgccgggcccggccccgggcctgcagccacctgatccggctgatgcagcgctgctggcagggcgacccccgggtgcggcccaccttccagggcaatggcctgaatggagagctgatccggcaggtgctggccgccctgctgcctgtgacaggccgctggaggagccctggagagggcttccggctggagagcgaggtgatcatccgggtgacctgccccctgagcagcccccaggagatcaccagcgagacagaggacctgtgtgagaagccagatgatgaggtgaaggagacagcccatgacctggatgtgaagagccccccagagcccaggtctgaggtggtgcctgcccggctgaagagggccagcgcccccacctttgacaatgactacagcctgtctgagctgctgagccagctggacagcggcgtgtcccaggccgtggagggccctgaggagctgagccgcagcagcagcgagagcaagctgcccagcagcggcagcggcaagaggctgagcggcgtgtcctctgtggacagcgccttcagcagccggggcagcctgagcctgagctttgagcgggagcccagcaccagtgacctgggcaccacagatgtgcagaagaagaagctggtggatgccatcgtgtctggggacaccagcaagctgatgaagatcctgcagccccaggatgtggacctggccctggacagcggggccagcctgctgcacctggccgtggaggccggccaggaggagtgtgccaagtggctgctgctgaacaatgccaaccccaacctgagcaacagaagaggcagcacccccctgcacatggctgtggagaggagagtgcggggcgtggtggagctgctgctggccaggaagatctctgtgaatgccaaggatgaggaccagtggacagccctgcactttgctgcccagaatggagatgagagcagcacccggctgctgctggagaagaatgcctctgtgaatgaggtggactttgagggccgcacccccatgcacgtggcctgccagcacggccaggagaacatcgtgcgcatcctgctgcggcggggcgtggatgtgtccctgcagggcaaggatgcctggctgcccctgcactatgctgcctggcagggccacctgcccatcgtgaagctgctggccaagcagcccggggtgtctgtgaatgcccagaccctggatggccgcacccccctgcacctggccgcccagaggggccactacagagtggcccgcatcctgattgacctgtgcagtgatgtgaatgtgtgcagcctgctggcccagacccccctgcacgtggccgctgagaccggccacaccagcacagcccggctgctgctgcacagaggagctgggaaggaggccatgaccagtgatggctacacagccctgcacctggccgccagaaatggccacctggccaccgtgaagctgctggtggaggagaaggcagatgtgctggcccggggccccctgaaccagacagccctgcacctggccgccgcccacggccacagcgaggtggtggaggagctggtgtctgcagatgtgattgacctgtttgatgagcagggcctgagcgccctgcacctggccgcccagggcagacatgcccagacagtggagaccctgctgcggcatggagcccacatcaacctgcagagcctgaagttccagggcggccacggccctgctgccaccctgctgcggcgcagcaagacctag

SEQ ID NO: 204951 - DNA, 2166 bp, Artificial Sequence
  derived and/or modified sequence
atggagctgctggaggaggccaagaagatggagatggccaagttccgctacatcctgcctgtgtatggcatctgccgggagcctgtgggcctggtgatggagtacatggagaccggcagcctggagaagctgctggccagcgagcccctgccctgggacctgcgcttccgcatcatccacgagacagctgtgggcatgaacttcctgcactgcatggccccacccctgctgcacctggacctgaagccagccaacatcctgctggatgcccactaccacgtgaagatcagtgactttggcctggccaagtgcaatggcctgagccacagccatgacctgtccatggatggcctgtttggcaccatcgcctacctgcccccagagcgcatccgggagaagagccggctgtttgacaccaagcatgatgtgtacagctttgccatcgtcatctggggcgtgctgacccagaagaagccctttgctgatgagaagaacatcctgcacatcatggtgaaggtggtgaagggccacaggcctgagctgccccctgtgtgccgggcccggccccgggcctgcagccacctgatccggctgatgcagcgctgctggcagggcgacccccgggtgcggcccaccttccaggagatcaccagcgagacagaggacctgtgtgagaagccagatgatgaggtgaaggagacagcccatgacctggatgtgaagagccccccagagcccaggtctgaggtggtgcctgcccggctgaagagggccagcgcccccacctttgacaatgactacagcctgtctgagctgctgagccagctggacagcggcgtgtcccaggccgtggagggccctgaggagctgagccgcagcagcagcgagagcaagctgcccagcagcggcagcggcaagaggctgtctggagtgtcctctgtggacagcgccttcagcagccggggcagcctgagcctgagctttgagcgggagcccagcaccagtgacctgggcaccacagatgtgcagaagaagaagctggtggatgccatcgtgtctggggacaccagcaagctgatgaagatcctgcagccccaggatgtggacctggccctggacagcggggccagcctgctgcacctggccgtggaggccggccaggaggagtgtgccaagtggctgctgctgaacaatgccaaccccaacctgagcaacagaagaggcagcacccccctgcacatggctgtggagcggcgggtgcggggcgtggtggagctgctgctggccaggaagatctctgtgaatgccaaggatgaggaccagtggacagccctgcactttgctgcccagaatggagatgagagcagcacccggctgctgctggagaagaatgcctctgtgaatgaggtggactttgagggccgcacccccatgcacgtggcctgccagcacggccaggagaacatcgtgcgcatcctgctgcggcggggcgtggatgtgtccctgcagggcaaggatgcctggctgcccctgcactacgccgcctggcagggccacctgcccatcgtgaagctgctggccaagcagcccggggtgtctgtgaatgcccagaccctggatggccgcacccccctgcacctggccgcccagaggggccactacagagtggcccgcatcctgattgacctgtgcagtgatgtgaatgtgtgcagcctgctggcccagacccccctgcacgtggccgctgagaccggccacaccagcacagcccggctgctgctgcacagaggagctgggaaggaggccatgaccagtgatggctacacagccctgcacctggccgccagaaatggccacctggccaccgtgaagctgctggtggaggagaaggcagatgtgctggcccggggccccctgaaccagacagccctgcacctggccgccgcccacggccacagcgaggtggtggaggagctggtgtctgcagatgtgattgacctgtttgatgagcagggcctgagcgccctgcacctggccgcccagggcagacatgcccagacagtggagaccctgctgcggcacggggcccacatcaacctgcagagcctgaagttccagggcggccacggccctgctgccaccctgctgcggcgcagcaagacctag

SEQ ID NO: 204952 - DNA, 1206 bp, Artificial Sequence
  derived and/or modified sequence
atgcagcggtgctggcagggcgacccccgggtgcggcccaccttccaagagatcacatccgagaccgaagacttgtgcgagaagcccgacgatgaagtgaaagaaaccgctcatgatttagatgttaagtcacctcccgagccacgcagcgaggttgtaccggcgcgcctgaagcgagcaagcgccccaaccttcgataatgactactctttgagcgagctcctgagccaactagacagcggtgtcagccaggcggttgaaggccctgaggaactctctcgtagctccagcgagtcaaaacttccttcctccggctccggtaaacggctgtcgggcgtgagttctgtggactcggcattttccagtagaggctccttgagcctatcgtttgagagggaaccttccacaagtgacctgggaacaactgatgtgcagaagaaaaagttggtcgacgccattgtcagcggcgatacttccaaactgatgaagatcctccagccacaggatgtcgacttggccctggattccggagcttcactgcttcacctcgccgtcgaggctggccaggaggagtgcgcgaagtggttattattaaacaacgcaaaccccaacttgtccaatagacgaggatccacccctctacacatggcagtggaacggagggtcagaggtgtcgtagagctgctgctggcaaggaagatctcagtgaatgctaaggacgaagatcaatggactgccttacatttcgcggcccagaatggtgacgaatcgtctactaggctgttacttgagaagaacgccagtgttaacgaggtcgacttcgagggccgcactccgatgcatgtggcatgccagcacggccaggaaaacatcgtgcggattctgctgcgccgaggggtggacgtgagcctgcaaggcaaggatgcatggcactgtaccaccctagcggggccccctgcccataggcaagctgctggtcaggctgctggtggagagtgcgagcgaccggacgccggttgggaagatgcaattgcccccggccgaacggcccgagcgttaccgaggggaccccacccccatagacccgtgctcagacgccaaaggctgcagccagccggcacggacacccccgcccgacctcgccgtaggggaaccagagccctgcctggatgctcttgcattggagcacttgcccgtaggccgtag

SEQ ID NO: 204953 - DNA, 2355 bp, Artificial Sequence
  derived and/or modified sequence
atggagggcgacggcggcaccccctgggccctggccctgctgcggacattcgatgctggagaattcactggttgggagaaagtgggaagtggtggattcggacaggtgtataaagtgaggcatgtccactggaaaacctggctggccattaagtgcagtccctccttacacgtggatgacagggagaggatggaattgctggaagaagctaaaaagatggagatggcgaagtttcgatacattctacccgtatacggaatttgcagggagcccgtgggcctcgtgatggaatatatggaaactggctcactggaaaaactccttgcctccgagcctttgccttgggatctgcgctttagaatcattcatgaaacggctgttggaatgaactttctgcactgcatggccccccctctgctgcatttagatctgaagcccgcaaacattctgctggacgcacactaccacgtcaagatctctgacttcggactggcaaagtgtaacggcctgtctcacagtcacgatctcagtatggatggcctgttcggtactattgcatacttgcccccggagcggatccgagagaagagcaggttgttcgacacaaaacatgacgtttatagtttcgctattgtgatctggggcgtacttacccagaagaaaccatttgcggatgaaaaaaatattctccacatcatggtgaaggtggttaaggggcacaggccagagttgcctccagtgtgcagggctagaccccgggcctgtagtcatttgatccgcctgatgcagcggtgctggcagggggatccgcgggtacggccaacattccaagagattaccagtgagacagaagatctctgtgagaagccagatgacgaagtgaaagaaaccgcccatgacctggatgtgaaatcgcctccagagccaagatccgaagtcgtgcctgctagactgaaacgcgccagcgctcccacgtttgacaatgactatagcttatctgagttgctctcacagctcgattcgggcgtgagtcaggctgtggaaggccccgaagaattgtctcgttccagtagcgaatccaaactgccatcttctggttcgggaaagcgactgagcggagtgtcatctgtggacagtgcatttagcagtagaggctccttgtccctgagtttcgaaagagagccatccacctccgacctgggcacgaccgatgtacagaagaagaagctggtggacgccatcgtgtctggggatacgagcaaactgatgaagatcttgcagccacaggatgttgacctcgcacttgattctggtgccagtcttttgcacctcgctgtcgaggccggacaggaggagtgcgctaaatggctgctgcttaacaacgctaatcctaacctcagcaatcgccgcgggtccacccccttacacatggccgtggagcgtcgggtgcggggggttgtggagctgctactggctaggaagatcagcgtcaacgctaaggacgaagaccagtggaccgccctgcacttcgctgctcagaacggtgacgagtcatcgactagactattactggaaaaaaatgcctcggttaatgaggtggatttcgagggccgaacccccatgcacgtggcctgccaacatggacaggaaaacatcgtcaggatcctgttacggcgtggcgtagacgtaagtctgcagggcaaggacgcttggcttcctctccattatgccgcctggcagggtcacttgcctatcgtgaaattgctagctaagcagccaggcgtgtccgtgaacgctcagaccctagatgggagaacccctctccacctggctgcccagcgcggccactatcgtgtggcgagaatcctgatcgatctgtgctcagacgtgaatgtctgttctctcctcgcccagaccccactgcatgttgcggcagagacggggcacaccagtaccgcccgactgttactgcatagaggagccgggaaggaagctatgacctccgacggctatacagccctgcacctggccgccagaaacggacatctcgccaccgtaaaactgttggtagaagaaaaggccgatgtgctcgccagggggcccttgaaccagaccgcccttcatctggccgcagcacacggccacagcgaagtcgttgaggaactggtttctgcagacgttatcgatctcttcgatgaacagggtctatctgccctccatctggccgcccagggacgacatgcccagaccgtggagacccttctcaggcacggagctcacattaatctgcagtccttgaagtttcagggcggccacgggcccgccgccacactgctccgaaggtctaagacatag

SEQ ID NO: 204954 - DNA, 2499 bp, Artificial Sequence
  derived and/or modified sequence
atggagggcgacggcggcaccccctgggccctggccctgctgcggaccttcgatgccggtgaattcactggatgggagaaggtgggctcaggagggttcgggcaagtgtataaggtgcgccatgtccactggaagacttggctagccatcaaatgttctccaagtttacatgtggatgaccgagaaagaatggaactcctggaagaagctaagaaaatggaaatggcaaagtttcggtacatcctcccagtctatggtatttgtcgcgagcccgtcggtctggtgatggaatatatggagacggggtcgctggaaaagctgctggcttcagaaccacttccctgggacctgaggtttcgtataattcatgagacagccgtgggcatgaatttcctacactgcatggccccacccttattacacttggacctgaagcctgctaacattctgctagacgcccactaccatgtaaaaattagcgatttcggcctggcaaaatgcaatggcctttcccactctcacgacttgtccatggatggcctgtttgggacgatcgcatacctaccacccgaacgcataagggagaagtcccgactgttcgacaccaagcacgatgtttactccttcgcaattgtcatctggggcgtactgacccagaaaaaaccatttgcagacgagaagaacatcctacacatcatggtgaaggtggttaagggacaccggcctgaactgccaccagtctgccgagcccggccaagagcctgtagccatttgatccgattgatgcaacgctgctggcagggagaccccagggtcagaccaacctttcagggtaacggactaaatggggagctcataagacaggttctggccgctctgctacctgtcaccggccgatggcggtcacctggagagggattccgtctggaaagcgaggttattattagagtgacctgccccctaagcagtccccaggaaattacgtccgagacagaagacctgtgtgagaagccggatgacgaagtaaaagagactgctcatgatctcgacgttaaatcccctcctgagcccagaagtgaagtggtgccagctcggctgaagagagccagtgccccaacatttgacaacgattatagtctttccgaactgcttagtcagctcgactctggtgtgagccaggcagtcgaaggtcctgaagaactctcccgtagttctagtgaatcgaagctgccttcctctggcagcggtaaaagactctccggggtcagttcagtcgattctgctttctcctctaggggatccctgagccttagtttcgaacgggaaccaagcacctctgatctaggaaccacagacgtacagaagaagaaacttgtcgacgccatcgtgagcggagatacaagtaagttaatgaaaattttgcagccccaggatgtggacctcgctcttgactcgggcgccagcctcctccaccttgctgtcgaagctgggcaggaagaatgcgcgaaatggctgctgcttaataacgctaacccgaatctcagcaatcgacgcgggtctaccccactgcacatggccgtggagagacgggttcgcggcgtggtcgaactacttttggcgagaaagatttctgtcaatgctaaagatgaagaccagtggacagcacttcactttgcagctcagaatggcgacgaaagctctacccgcttgctgctggagaaaaacgcatccgttaacgaggtggactttgaggggcgcaccccaatgcacgttgcttgccagcatggacaggagaacattgtccgcatcctgcttcggagaggtgtggatgtctccctgcagggcaaagacgcctggctgccactgcactatgcggcctggcaggggcacctccctatagtcaagctgcttgcgaagcagccaggcgtcagcgtgaacgctcagaccctggacggcagaacgccccttcacctggcagcacagcggggacactaccgagtggccagaatcctaattgacctgtgttccgacgtgaatgtgtgtagcctgctggcccagacccctctgcacgtcgcagcagagaccggccacaccagtacggcgcgcctgctattgcatagaggcgctggtaaagaagccatgaccagtgacgggtacactgctttacatttggcggctcgcaacggtcacctggcgactgtcaagttactggtcgaggaaaaagccgatgtcctagcccgcggaccgttgaaccaaaccgccctacatctcgcggctgcccatggccactccgaagttgtggaggagctcgttagcgcggacgtgattgatctttttgacgagcaagggttgtctgctctacacctcgcggcgcaagggcgacatgctcaaacggtggaaaccttgctgaggcacggggcccatatcaacctccaatccctgaagtttcaaggggggcacggccctgccgctactttgctgcggcgctctaagacttag

SEQ ID NO: 204955 - DNA, 2166 bp, Artificial Sequence
  derived and/or modified sequence
atggagctgctggaggaggccaagaagatggagatggccaagttccgatacatcctacctgtgtatggaatctgcagggaacctgtgggactcgtgatggaatacatggaaaccggatcgctggagaagctgttagcgtcagagcctctcccttgggatttgcgcttccgcattatccatgaaacggctgtgggtatgaattttttacactgcatggcaccacccctgctgcatctcgatctgaagcctgcaaacattttgctggacgctcactaccatgtcaaaatcagcgacttcgggcttgccaagtgtaacggtctgtcacatagccacgatctgagcatggatggtttgttcgggactatcgcctacttgccaccggagaggatccgggagaaatcccggctgttcgacacaaagcacgatgtctattccttcgcgatcgtgatatggggtgtgctgacacagaagaagccttttgccgatgagaagaatatactgcatattatggtcaaagtcgtgaagggccacaggcccgaactccccccggtgtgccgagccaggcccagggcgtgtagtcacctcattcgattgatgcaacgttgctggcagggtgaccctcgagtgcggccaaccttccaggagattacttcagagacagaggatttatgtgagaagcctgacgacgaggtgaaagaaacggcccatgacctggacgtaaagtcaccccctgagcctagatctgaggtcgtgcctgcacgtctaaaaagagcctctgcgccgacgttcgataacgattatagtctgtcagagttactaagccagctcgacagcggtgtttcacaggcggttgagggaccagaagagttgtctcggtcatctagcgagagcaagttacctagcagtggttctggtaagagattgagtggtgtctcatccgtcgactctgcattcagcagcagggggtcactatccctcagttttgaacgggaacccagcacgtctgacttgggcaccacagacgtgcagaaaaagaaactggttgacgccatagtgtctggcgatacctcaaagttaatgaaaatcttacagccacaggacgttgacctggccctagatagcggagcctcattgctgcatctggccgtcgaagctggtcaggaggaatgtgccaagtggcttctcctcaataacgccaatccaaacctaagcaatcgacgcggatccacaccactccacatggcagtggaaaggagggttaggggcgttgttgaactcctgcttgccagaaagataagtgtgaatgcgaaggatgaggaccagtggactgcactacattttgccgcccagaacggggatgaatcctcaacaaggctgctcctggaaaaaaacgcgagtgtgaacgaggtagactttgaagggcgtacccccatgcacgtcgcatgccagcatgggcaagaaaatatcgtgcgcatcctgctgagaaggggagtggatgtgagtctccagggtaaagatgcatggctccctctgcactacgctgcctggcaaggacacttgcctatcgtgaagctgttggcaaagcagccaggcgtgagtgtcaatgctcagactctagatggccgaaccccactgcacctggcagcccagaggggacattaccgagtggcccggatcctcatcgatctgtgtagtgatgtaaatgtgtgctccctactggcacagactccactgcatgtagcggctgaaacggggcacacatccaccgctaggctgctgctccatcgcggggcagggaaagaggccatgacgtccgacggctacacggcgcttcatctggccgctagaaacgggcatttagcaacggtgaaattgctggtggaggagaaggccgatgtcctcgcacgtggccccttgaaccagactgccctgcacctcgccgcagcacatggacattccgaagttgttgaggaactggtgtcagccgatgtcattgatctgtttgacgagcaggggctgtccgctctgcatctggcagcccaaggaaggcacgctcagacagtcgagaccctccttcggcacggggcccacattaacctacagtccctgaagtttcagggcgggcatgggccagccgccaccctgctcagacggtcaaaaacctag

SEQ ID NO: 204956 - DNA, 2166 bp, Artificial Sequence
  derived and/or modified sequence
atggagctgctggaggaggccaagaagatggagatggccaagttccgctacattctcccagtctatggcatttgcagagagcctgtgggactagtgatggaatacatggaaactggttccctcgagaagctgctggcctctgagccgctgccgtgggatctccggttcagaatcatacacgaaaccgctgtggggatgaactttcttcactgcatggcaccacccctgctacacctggaccttaagcctgcaaatattctcttggacgcccactaccacgttaagatatctgattttgggctcgcgaagtgcaacggactttcacacagtcacgatttaagtatggacggcttatttggaactattgcctacctgcctcccgagcggattcgcgagaagagtcgactcttcgacaccaaacatgacgtctactcctttgcgatcgttatttggggggttctcactcagaagaaacctttcgctgatgaaaagaacattctgcatatcatggtgaaggtggtgaaggggcacagacctgaactgccccctgtgtgtcgggccagaccaagagcatgctcccacctgatcagacttatgcaacgatgttggcagggcgatccccgagtcaggccaacatttcaggaaattacgtctgagacagaggatctctgtgagaagccagatgacgaagtaaaggagacagcccatgatcttgacgtgaaatctccacccgagcctaggagtgaggtggtcccagcccggctgaagcgggcatcagcacccacattcgataatgactactcactgtcagaacttctctcgcaactggactcaggtgtttcgcaagccgtcgagggaccagaggaactctcccgaagttccagcgagagcaagctgccatcgtctggcagtggtaaaaggttatccggtgtatcttccgtagactcggcgttctcatctaggggatccctgtccctgtccttcgagagagaaccatccacttcagatctaggtactaccgatgtccagaagaaaaaattggtggatgcaatcgtgtctggagacacatccaaattgatgaagatcctccagccccaagatgtggacttagcacttgacagtggagcaagtcttctgcatcttgcagtggaagccggtcaggaggagtgtgcaaaatggcttctgctgaacaacgcaaatccaaacctttcaaacagacgtggatccacccctctccatatggccgtagaaagacgcgtgcgcggggtggtggagttgcttctggcccgcaaaatcagcgtgaatgcaaaagacgaagaccaatggaccgccctgcacttcgcggcccagaatggcgacgagtcctctacccggctgctgctggaaaaaaacgcgagcgttaatgaagtagatttcgagggacgcacaccaatgcacgtggcttgccagcacggccaagaaaatatcgtgaggattcttctgaggaggggggttgacgtttccctgcaggggaaagacgcctggctacctctgcattacgcagcttggcaaggccacctgcccatagtgaagcttctggcaaagcaacccggtgtatcggtgaacgctcagactctggacggccgcactcccttacatttggccgcccagagggggcattaccgagtcgccagaattttaatcgacctgtgctctgatgtaaatgtctgctccctgcttgcccagacaccgctgcacgtcgccgctgagaccggccatacgtccacggctcgattgttactccaccgcggagctggcaaggaggccatgacatctgatgggtatacagctttgcatcttgcggctcgcaatggccacctagcaacagtgaaattgctggtggaggagaaagccgatgttctggcccgcggccccctgaaccagactgccctccatctggccgccgcacacgggcactccgaagttgttgaagaactagtctctgctgacgttatcgatctttttgacgaacaggggctttccgccttgcacctagccgcacagggtcggcatgcccagaccgtggaaaccctgctccgccacggggctcatattaacctccaaagcttaaaatttcagggcgggcatggccctgccgccactttgttacgacgaagcaagacttag

SEQ ID NO: 204957 - DNA, 1206 bp, Artificial Sequence
  derived and/or modified sequence
atgcagcgttgttggcagggagaccccagagtcagacccaccttccaggagattacctccgagaccgaagacctgtgcgaaaaacccgacgacgaggtgaaagaaacggcccatgacctagacgtgaaatcacctccggaaccccgatccgaggtagttcctgcgagattgaagcgagcctcagctcctacattcgataatgactacagtttgtctgagctgctgtcccagcttgactctggtgtttcccaagccgttgaaggaccagaagaactatctagatcaagtagcgagtctaagctcccttcctctgggtcaggaaagaggctttctggcgtgtcaagcgtggacagtgctttctctagccgcggaagccttagcctgagttttgagcgtgagccttctacttccgatttaggaacgaccgacgtgcaaaagaaaaagctggtcgatgccatcgtctctggggacacgagcaagctgatgaaaattctacagccacaggatgtggacttagccctcgactccggcgctagcctcctgcatctcgccgtcgaggctggccaggaggaatgcgccaaatggctgttgctgaataatgctaatcctaatctgagcaaccgcagggggagtacaccactgcacatggctgtggagagaagggtgcgcggagtggtcgaactgctgctggccaggaaaatcagcgtgaacgctaaggatgaagaccagtggacagccctgcactttgccgctcagaacggagatgaaagcagtactaggctcctgctggagaaaaacgctagcgtgaacgaggttgattttgagggtcgcacccccatgcatgtggcttgccagcacggccaggaaaacatcgtcagaatactgctgagacgcggagtggatgtgagccttcagggcaaggatgcttggcactgcaccacactggccggtccaccagcgcaccgacaagcagccggtcaggctgcgggaggggaatgtgaaaggcccgatgcagggtgggaagatgccatcgcacctggccgaactgctcgcgctttgccaagaggccctcatccacatcgcccagttctaagaaggcagagactccagcctgccggaactgacacaccagccaggccacgacggagaggcacccgtgctcttcccggatgttcctgtatcggagccctcgccaggcgaccttag

SEQ ID NO: 204958 - DNA, 2355 bp, Artificial Sequence
  derived and/or modified sequence
atggagggcgacggaggcactccttgggccctggcactgctcaggacattcgatgcgggagaatttacaggttgggagaaggtcggctccggcggtttcggacaagtgtataaagtgcgccacgttcactggaaaacctggctggccataaagtgcagcccttcactgcacgttgacgaccgtgagaggatggagctgctggaggaggctaaaaagatggaaatggcaaagttcagatatatcctcccggtctacggcatctgtcgggagccggtggggcttgtgatggaatatatggagaccggtagcctggagaaactactggcaagtgaacctctcccctgggaccttcgattccggatcattcatgagacggccgtcggcatgaacttcctgcattgtatggcaccaccattgctccacctggacctcaaaccggcaaatatcctcctcgacgcccactaccacgtgaaaatcagcgattttgggctcgccaaatgtaacgggctctcacacagtcacgatctgtccatggatgggttgtttggaactatagcttatttaccccctgaaaggatccgagagaaaagccgcctattcgatacaaagcatgacgtctatagttttgccattgtgatttggggggtcttgacccagaaaaagcctttcgccgacgaaaagaatatcctccacattatggtcaaggtcgtgaagggacatagacccgagctgcctccagtgtgtcgggcacggccaagagcgtgttctcacttgatcaggttaatgcaaaggtgctggcagggcgatccgagggtccgccctaccttccaggaaatcacatcggagaccgaagatctttgtgaaaagccggacgacgaagttaaagaaacagcgcacgacttggacgtcaaaagtccacctgaaccacgctccgaagtagtgcccgctcgtcttaagcgtgcatccgctccaacatttgacaacgattactctctgtccgagctgctgtcccagctagactctggggtgtcccaggctgtggaagggcctgaagagctctcaaggtcttcatctgaatcaaaacttcctagcagtggatccggaaagagattgtccggcgtctcctctgtggatagcgccttttcatccagggggtctctaagcttgtctttcgagcgcgagccaagtacttccgatctggggaccaccgacgtgcaaaaaaaaaaactggtggacgcgattgtcagcggagatacctccaagctgatgaaaatccttcagccccaggatgtcgaccttgctctggattccggggcatctttgctccacctggccgttgaggcgggtcaggaggagtgcgccaaatggctgctcctgaataatgcaaaccctaaccttagcaatagaagaggctctaccccccttcacatggccgtggaacgcagagtccgcggtgtagtggagcttctgcttgccagaaagatttccgtgaatgccaaggacgaagatcaatggaccgcgcttcatttcgccgctcagaatggcgacgagagttcaacacggctgttgctggagaagaacgcatctgtgaacgaggtggatttcgagggcagaaccccaatgcatgttgcctgccagcacggacaggagaacatagtccgcattttgctgcgccgaggggtcgacgttagcctgcagggaaaggatgcttggttacccctgcattatgcagcctggcagggtcaccttccaatcgtgaaactgctcgctaaacaacccggagtaagcgtgaacgctcagaccttggacggcaggacccctcttcacttggcagctcagaggggccactacagagtggccaggatcctgattgatttgtgtagtgatgtgaatgtctgctctctgctggcacagacccccctgcacgttgccgctgaaaccggacacaccagtacagccaggctgctccttcacagaggcgcaggaaaagaagccatgacgtctgatggctataccgcgttacacctggccgctcggaatggccatctagcaacagttaaactactggtggaggagaaggctgatgtcttagcgaggggtcccctgaatcaaactgcgctgcatctcgctgccgctcatggacattctgaggtagtcgaggaactggtgtcggccgacgtgatcgacttgtttgatgagcaaggtctaagtgctctccatctggcagcgcagggaagacacgctcagactgtggagactctgctcaggcatggagcccacattaacctgcagagcctgaaattccaaggaggccacgggccagcggcaaccctgctccggagatctaagacatag

SEQ ID NO: 204959 - DNA, 2499 bp, Artificial Sequence
  derived and/or modified sequence
atggagggcgatggcggaaccccctgggcactagcactcctcagaacattcgacgcgggtgaattcactgggtgggagaaggttggaagcggcggattcggccaggtctacaaggttaggcatgtccactggaaaacttggctggctatcaagtgctctccctctctccatgttgacgacagggaacgcatggagctgctagaagaagcaaaaaaaatggaaatggcgaagtttcgctacattctgccagtttacggcatttgccgggaaccagttggattagtcatggaatacatggaaactgggagtctggaaaagttgttggcttccgaacctcttccgtgggatctgcgtttcaggatcatacacgagaccgcagttggcatgaatttcctccactgcatggccccacctctgcttcacctggatcttaagcctgccaatattctgctggatgcccactaccacgttaaaatcagcgacttcggcctagctaagtgcaacggactgtctcacagtcacgatttgtccatggatgggttattcggaaccattgcgtatctgccaccagaacggatccgagagaaaagccgcctgtttgatactaagcatgatgtctatagctttgctatcgtgatttggggggtactgacacagaaaaagccctttgccgatgaaaaaaatattctccatattatggtaaaagttgtgaaaggtcaccgtccagaactgccccctgtttgtagggccaggccacgcgcatgcagtcacttgattcggctgatgcaacgctgctggcagggtgacccccgtgttcggcctacgtttcagggcaacggccttaacggcgagctgatccggcaggttctagccgctcttctgcccgttaccggacgttggcgctctcccggagaaggttttcgtttggagagcgaagtcatcatcagagtaacatgcccccttagctctcctcaagaaattacaagcgagaccgaagacttatgcgagaagcccgacgatgaagtgaaggagaccgctcacgatctcgacgtgaagtcgccacccgaaccgaggagcgaggtggttcccgcaaggctaaagcgggcttcagcccctaccttcgataacgactactctctatccgaactcttgtctcagcttgatagcggtgtgagccaggctgtcgagggccctgaagagctttcacgtagcagcagcgagtcaaagttaccctcctcaggctccgggaagcgtctgtctggtgtatcttccgttgattcagccttttcaagccgaggtagcctctctctcagttttgagagagagccttccaccagtgatctgggcactactgatgtgcagaaaaagaagctggtcgatgctatagtgtcaggagacacgagtaaactgatgaaaatcctgcagccccaagatgtggatctggccctcgacagcggcgctagcttactgcatttggctgtggaagctgggcaggaggagtgcgccaagtggcttctgctcaacaacgctaaccccaatctgtctaaccggaggggttccacacctctgcatatggctgtcgagcgccgagtgagaggggtagtggagctgctgctcgccaggaagatctctgtgaatgccaaagacgaggaccagtggaccgccctgcacttcgcggcacagaatggcgatgaatcctccacccggttattgctggagaaaaatgcatccgtgaatgaggtggacttcgaaggaagaacgcctatgcacgtggcgtgccagcatggccaggagaacattgtccggattctgttgaggcgaggtgttgacgtgtccctgcaaggcaaggacgcctggctacccttgcactatgcagcctggcaggggcatttgcccattgtaaaactgctggctaagcagcccggagtatctgtgaacgcacagaccttagacgggaggactccactgcatctggcagcccagcggggtcactaccgcgtggccaggatccttatcgacctgtgctccgatgttaacgtgtgtagcctgctggcccaaacacctctgcacgtggccgcagagacgggccatactagcactgctaggttgctcttgcaccgaggagccggaaaggaggcaatgacgtcagatggctatacggctctccacctggctgctcgtaatggccacctggccaccgtgaagcttctggttgaggagaaagccgatgtcctggcaagaggacccctgaaccagacagcactgcacctggccgcagcacacggccactcagaagtggtggaggagctggtctccgcggacgttatcgacctgttcgacgagcagggactcagcgcactccacctggctgcgcaaggcagacatgctcagacagtagaaactctcctacgacatggtgctcacatcaatctacagagccttaagtttcaagggggtcatggtcccgctgcaactctcctgcggcgtagtaaaacatag

SEQ ID NO: 204960 - DNA, 2166 bp, Artificial Sequence
  derived and/or modified sequence
atggagctgctagaagaggccaaaaaaatggagatggcaaagttccggtatattcttcccgtttacggcatctgcagagagcctgtaggactggtgatggaatacatggagaccgggagcctggagaaattgttagcctcagaacctttgccatgggatctccggttcaggatcatccacgaaacagctgtgggaatgaactttctgcactgcatggctcccccactattgcatttggaccttaagccagccaatattctgctcgatgcccattatcatgttaagatatccgattttggcttggccaaatgtaacggcttgtcccactcccacgatctaagcatggacggcctctttgggactatcgcctacctcccacccgagcggatccgggaaaagtctcgactgttcgacaccaagcacgacgtctactctttcgccattgttatctggggagtcctgactcagaagaaacccttcgctgacgaaaaaaacatcctccatattatggtgaaagttgtcaaagggcatcgacccgagctgcctcctgtgtgcagggcacgtccacgcgcatgttcccacttgatccgcctcatgcagcgatgctggcagggtgatccaagggtgcggcctactttccaggaaatcacttccgaaacagaagatctatgtgaaaagcctgacgacgaggttaaggaaactgctcacgatctggatgtgaaatcccctccagagcctcgaagcgaggtcgtaccagccagactgaagagagccagtgcacctactttcgacaatgactatagcctgtccgagttactaagtcagctggactcgggcgtctcccaggccgttgagggccctgaagagctctcgagatccagctcggagtcaaaactcccgtcctctgggtccggtaaacgcctttccggggtatctagcgtcgattctgctttcagcagtcgcggaagcctgagcctgagttttgaacgggagccaagtactagtgacctgggaactaccgacgtacagaagaagaaactggtcgacgcgatcgtttcaggtgatactagtaaattaatgaaaatcctgcagccgcaggatgttgacttggccctggattctggtgccagtctgttgcacctggccgtagaagcaggccaggaagagtgcgccaaatggctcttactaaataatgccaacccgaacctgtcgaatcggaggggcagtacgccattgcacatggccgttgaaaggcgagttcgcggagtcgtggaactccttctcgcccgaaagatttcagtgaatgcgaaagacgaagaccaatggactgccctgcattttgcagcgcagaatggggatgagagctcgacaaggctgttgctcgagaagaacgctagcgtaaacgaggtcgacttcgaaggcaggactcctatgcatgtggcctgtcaacacgggcaagaaaacattgtgagaatcttattgcggaggggtgtggatgtgtccctgcagggcaaagacgcctggctgcccttacactacgctgcttggcagggccacctgcctatcgtgaaactcctagccaagcagcctggagtgagtgtgaacgcgcagaccctcgatgggagaacaccgttacacctggctgctcagcgcggtcactatcgcgtggctaggattctgatcgacttatgttcagatgtcaacgtttgttcattgcttgcacaaacccctctgcacgtcgccgctgaaactggtcacacttctacggctcgtcttctgttacatagaggagccggaaaggaggcaatgacatctgacggttatactgcactgcacctggctgcacgtaatggacatttggctacagtgaagttgctcgtggaagaaaaagcggatgtgctggccaggggcccactgaaccagaccgcgctgcatttggcagccgctcacggacactcagaggtggtagaggaactggtctcggccgacgtgatagacctattcgatgaacaaggcctgagcgcactgcacctcgctgctcaaggcaggcacgcacagaccgttgaaacgctgctccggcacggtgcccatatcaatctgcaaagtttaaaattccagggagggcacggccctgcggcaaccctgcttaggcgatcaaagacgtag

SEQ ID NO: 204961 - DNA, 2166 bp, Artificial Sequence
  derived and/or modified sequence
atggagctgctcgaggaagctaaaaaaatggaaatggccaagtttaggtacatcctacctgtgtatggaatttgccgcgaacctgtgggtctggtaatggaatatatggagacagggtccctagaaaagcttctggcttctgaaccactgccctgggacctgcgcttccgcattatccatgaaaccgcagtggggatgaattttctgcattgcatggccccacccctgctgcacttagacctaaaacctgccaacatactcctggacgcccactatcatgtgaagatcagtgacttcggtctcgccaaatgtaatggcctgagccactctcacgatttgtcaatggacggattgtttggcaccatagcctacctgccccctgagcgcatacgtgagaaatccagactatttgatacaaagcacgacgtgtactcgtttgcaatcgtgatctggggggtgttgacacagaagaagccctttgcggatgagaagaatatcttgcacatcatggttaaggtcgtgaagggccaccgcccagaacttccccctgtatgccgcgctcgtcctagggcatgctctcaccttattagacttatgcagcgctgttggcagggcgaccctagggtcaggccaacgttccaggaaatcacctctgaaactgaggatctgtgtgagaagcccgatgatgaggtgaaagagactgcccacgatcttgacgtgaagagcccacccgagcctaggagtgaggtcgtgccggcacggctgaaaagagccagcgcccctacttttgacaacgattacagcctgtcagaactcctgagccagctcgatagcggtgtcagtcaggcagtggagggacccgaggagctgtcccgttcctcctccgaaagtaaactcccttcatccggcagcgggaagcggcttagcggcgtgagcagtgttgactcagccttcagctctcgcggttcgctgagcctgtccttcgaacgtgagccttctacttcagacctcgggaccacggatgtccagaaaaagaaactcgttgatgccattgtgtcgggagacaccagtaagcttatgaaaatacttcagccccaggacgtcgatctggcactggactctggcgcttccctgctgcacctggctgttgaagccggtcaagaagagtgcgccaagtggttactactgaataatgccaaccccaacttgtccaacaggcgcggaagcaccccactgcacatggctgtcgagcgtagagtgaggggagtggttgagctcctgttggcccgtaagatttctgtgaatgcaaaggacgaggaccagtggaccgcattgcacttcgccgcacagaatggcgacgaaagcagtactcggctgcttttagagaaaaacgctagcgttaatgaagtcgactttgagggacgaaccccaatgcacgtcgcctgtcaacatggacaggagaacatcgtcaggatccttcttaggagaggagtagatgttagcttgcagggcaaagacgcctggctcccgttgcactacgctgcgtggcaaggtcaccttccaatcgtgaagctcctggcaaaacaacccggagtgtccgtcaacgcccagacactggatggaagaacccctctccacctggcagcacagcgcggtcactatcgggtggcaaggatcctgattgatctttgctcagatgtgaacgtctgttccctgttagcccagactcctctccatgtggcagccgagactggccacacctctacagctaggttattactgcaccgcggtgctggaaaggaagcaatgacatcagatggttacactgcccttcacttggccgctcgcaacggccacttggctacagtgaagctgctcgtcgaagagaaggccgacgtcctggccaggggtcccctgaatcagaccgccctgcacctggccgctgcacatggccactcggaggtggtggaggaattggtgagtgctgacgtgattgatctttttgacgaacagggcctgtcagcgctccatctggcggcacagggtcggcatgcgcagaccgtggagacactcctgagacacggagcccacatcaacctgcagagcttaaagttccaggggggacatggcccagccgctacactcttgaggagaagcaaaacctag

SEQ ID NO: 204962 - DNA, 2054 bp, Artificial Sequence
  derived and/or modified sequence
gtaacagggcggagcgcgcacctgggcacctgggcagccgccgcggcgctggctagacgtgcgcgatggagggcgacggcgggaccccatgggccctggcgctgctgcgcaccttcgacgcgggcgagttcacgggctgggagaaggtgggctcgggcggcttcgggcaggtgtacaaggtgcgccatgtccactggaagacctggctggccatcaagtgctcgcccagcctgcacgtcgacgacagggagcgcatggagcttttggaagaagccaagaagatggagatggccaagtttcgctacatcctgcctgtgtatggcatctgccgcgaacctgtcggcctggtcatggagtacatggagacgggctccctggaaaagctgctggcttcggagccattgccatgggatctccggttccgaatcatccacgagacggcggtgggcatgaacttcctgcactgcatggccccgccactcctgcacctggacctcaagcccgcgaacatcctgctggatgcccactaccacgtcaagatttctgattttggtctggccaagtgcaacgggctgtcccactcgcatgacctcagcatggatggcctgtttggcacaatcgcctacctccctccagagcgcatcagggagaagagccggctcttcgacaccaagcacgatgtatacagctttgcgatcgtcatctggggcgtgctcacacagaagaagccgtttgcagatgagaagaacatcctgcacatcatggtgaaggtggtgaagggccaccgccccgagctgccgcccgtgtgcagagcccggccgcgcgcctgcagccacctgatacgcctcatgcagcggtgctggcagggggatccgcgagttaggcccaccttccaagaaattacttctgaaaccgaggacctgtgtgaaaagcctgatgacgaagtgaaagaaactgctcatgatctggacgtgaaaagccccccggagcccaggagcgaggtggtgcctgcgaggctcaagcgggcctctgcccccaccttcgataacgactacagcctctccgagctgctctcacagctggactctggagtttcccaggctgtcgagggccccgaggagctcagccgcagctcctctgagtccaagctgccatcgtccggcagtgggaagaggctctcgggggtgtcctcggtggactccgccttctcttccagaggatcactgtcgctgtcctttgagcgggaaccttcaaccagcgatctgggcaccacagacgtccagaagaagaagcttgtggatgccatcgtgtccggggacaccagcaaactgatgaagatcctgcagccgcaggacgtggacctggcactggacagcggtgccagcctgctgcacctggcggtggaggccgggcaagaggagtgcgccaagtggctgctgctcaacaatgccaaccccaacctgagcaaccgtaggggctccaccccgttgcacatggccgtggagaggagggtgcggggtgtcgtggagctcctgctggcgcggaagatcagtgtcaacgccaaggatgaggaccagtggacagccctccactttgcagcccagaacggggacgagtctagcacacggctgctgttggagaagaacgcctcggtcaacgaggtggactttgagggccggacgcccatgcacgtggcctgccagcacgggcaggagaatatcgtgcgcatcctgctgcgccgaggcgtggacgtgagcctgcagggcaaggatgcctggcactgcactacgctggcagggccacctgcccatcgtcaagctgctggccaagcagccgggggtgagtgtgaacgcccagacgctggatgggaggacgccattgcacctggccgcacagcgcgggcactaccgcgtggcccgcatcctcatcgacctgtgctccgacgtcaacgtctgcagcctgctggcacagacacccctgcacgtccgcggagacggggcacacgagcactgccaggctgctcctgcatcggggcgctggcaaggaggccatga

SEQ ID NO: 204963 - DNA, 3889 bp, Artificial Sequence
  derived and/or modified sequence
gtaacagggcggagcgcgcacctgggcacctgggcagccgccgcggcgctggctagacgtgcgcgatggagggcgacggcgggaccccatgggccctggcgctgctgcgcaccttcgacgcgggcgagttcacgggctgggagaaggtgggctcgggcggcttcgggcaggtgtacaaggtgcgccatgtccactggaagacctggctggccatcaagtgctcgcccagcctgcacgtcgacgacagggagcgcatggagcttttggaagaagccaagaagatggagatggccaagtttcgctacatcctgcctgtgtatggcatctgccgcgaacctgtcggcctggtcatggagtacatggagacgggctccctggaaaagctgctggcttcggagccattgccatgggatctccggttccgaatcatccacgagacggcggtgggcatgaacttcctgcactgcatggccccgccactcctgcacctggacctcaagcccgcgaacatcctgctggatgcccactaccacgtcaagatttctgattttggtctggccaagtgcaacgggctgtcccactcgcatgacctcagcatggatggcctgtttggcacaatcgcctacctccctccagagcgcatcagggagaagagccggctcttcgacaccaagcacgatgtatacagctttgcgatcgtcatctggggcgtgctcacacagaagaagccgtttgcagatgagaagaacatcctgcacatcatggtgaaggtggtgaagggccaccgccccgagctgccgcccgtgtgcagagcccggccgcgcgcctgcagccacctgatacgcctcatgcagcggtgctggcagggggatccgcgagttaggcccaccttccaagaaattacttctgaaaccgaggacctgtgtgaaaagcctgatgacgaagtgaaagaaactgctcatgatctggacgtgaaaagccccccggagcccaggagcgaggtggtgcctgcgaggctcaagcgggcctctgcccccaccttcgataacgactacagcctctccgagctgctctcacagctggactctggagtttcccaggctgtcgagggccccgaggagctcagccgcagctcctctgagtccaagctgccatcgtccggcagtgggaagaggctctcgggggtgtcctcggtggactccgccttctcttccagaggatcactgtcgctgtcctttgagcgggaaccttcaaccagcgatctgggcaccacagacgtccagaagaagaagcttgtggatgccatcgtgtccggggacaccagcaaactgatgaagatcctgcagccgcaggacgtggacctggcactggacagcggtgccagcctgctgcacctggcggtggaggccgggcaagaggagtgcgccaagtggctgctgctcaacaatgccaaccccaacctgagcaaccgtaggggctccaccccgttgcacatggccgtggagaggagggtgcggggtgtcgtggagctcctgctggcgcggaagatcagtgtcaacgccaaggatgaggaccagtggacagccctccactttgcagcccagaacggggacgagtctagcacacggctgctgttggagaagaacgcctcggtcaacgaggtggactttgagggccggacgcccatgcacgtggcctgccagcacgggcaggagaatatcgtgcgcatcctgctgcgccgaggcgtggacgtgagcctgcagggcaaggatgcctggctgccactgcactacgctgcctggcagggccacctgcccatcgtcaagctgctggccaagcagccgggggtgagtgtgaacgcccagacgctggatgggaggacgccattgcacctggccgcacagcgcgggcactaccgcgtggcccgcatcctcatcgacctgtgctccgacgtcaacgtctgcagcctgctggcacagacacccctgcacgtggccgcggagacggggcacacgagcactgccaggctgctcctgcatcggggcgctggcaaggaggccatgacctcagacggctacaccgctctgcacctggctgcccgcaacggacacctggccactgtcaagctgcttgtcgaggagaaggccgatgtgctggcccggggacccctgaaccagacggcgctgcacctggctgccgcccacgggcactcggaggtggtggaggagttggtcagcgccgatgtcattgacctgttcgacgagcaggggctcagcgcgctgcacctggccgcccagggccggcacgcacagacggtggagactctgctcaggcatggggcccacatcaacctgcagagcctcaagttccagggcggccatggccccgccgccacgctcctgcggcgaagcaagacctagctggctgcctgcggagaccgggggtccacgtggggctcttgtcctgtcctgtgttcctcgtggggatggaacgatcctgcgtggggccctgttgtggcttacctaaatgttaaccaagcagaggtgacatggtgccatcaggaggcggctgctgctgaccggagtgtcccctccaggtgaagctggctcaggtgcacatgcccgctccatcatcgatctaggcacctgctgtctgaagggaccgtgggtcagaatcatttcgttgtgctcctaatgggtcgctgaggctggtctctcagtgatgaagccccaggcgtggaagcatccactctctcctgaggcgagccaccttgggttgctggagctcaccagtcttgagggaggtgcaggggaaactgtgttttttatcttcatacatgacggtgggcagagaggcctgtcttaaagtttccatggaattgttttataaaatatcttaagagatgaataccttatcagctgttgcttgaaacctgttaaaaatgttcataacattggatagtctagtctctaaatgatgactaagtagtggggttggctttgaaaacaatgttttatgcaacaaggaacgaatggtagcagccagctttgcggggcgtatgtgtggccagctcttaaccattccagtctattacttgggtgagtccttgtggacaaccacacacacgtgcccacatggtactagctgccgttcgtttctcgttgcctaagatgttttggcaactctagagccacaggcctaagtcattaaaaaattctccctttgtaacctcagtgctggggactgaggcgagccccctcaggtcgctggagtgcaccagtcttggggaagaggtgcaggagaagctgtgttttttatctccacacgcagtatgaagataaaattacatagtattacctagacatagacagtattacctaggtagatgcactgctcacctgcgcccttcccagctctcatttttgttaggtgatttgggatagggatagtgttttggggtatggggggagtgtttctgacctgctttgcagacgtgcctccgcacctcagcagtttggggtgtggccccagggcggttcttggatgtaaaagatgtggccatctagcctcgtaacttcactgtcacctgtgtcccatagggtgccttctgaatactgttattagaataagtttgttgcagaacgtgaccctgcgtgcaaacatgtaccgtggcctggtatatgatagagattgatattaatgtaccatgtatgttaatgtgaatctgtgggcaggatacttttccatggcaggaaatatccaagctgttgaaactggctatgttttaatatgcctcattgtgcctttactgttgtgtggactgcgtgagggacaagaagttccatttgatgtcaataaagcaaagtacttgcctacttttttgaagctg

SEQ ID NO: 204964 - DNA, 4017 bp, Artificial Sequence
  derived and/or modified sequence
gtaacagggcggagcgcgcacctgggcacctgggcagccgccgcggcgctggctagacgtgcgcgatggagggcgacggcgggaccccatgggccctggcgctgctgcgcaccttcgacgcgggcgagttcacgggctgggagaaggtgggctcgggcggcttcgggcaggtgtacaaggtgcgccatgtccactggaagacctggctggccatcaagtgctcgcccagcctgcacgtcgacgacagggagcgcatggagcttttggaagaagccaagaagatggagatggccaagtttcgctacatcctgcctgtgtatggcatctgccgcgaacctgtcggcctggtcatggagtacatggagacgggctccctggaaaagctgctggcttcggagccattgccatgggatctccggttccgaatcatccacgagacggcggtgggcatgaacttcctgcactgcatggccccgccactcctgcacctggacctcaagcccgcgaacatcctgctggatgcccactaccacgtcaagatttctgattttggtctggccaagtgcaacgggctgtcccactcgcatgacctcagcatggatggcctgtttggcacaatcgcctacctccctccagagcgcatcagggagaagagccggctcttcgacaccaagcacgatgtatacagctttgcgatcgtcatctggggcgtgctcacacagaagaagccgtttgcagatgagaagaacatcctgcacatcatggtgaaggtggtgaagggccaccgccccgagctgccgcccgtgtgcagagcccggccgcgcgcctgcagccacctgatacgcctcatgcagcggtgctggcagggggatccgcgagttaggcccaccttccaaggaaacgggctgaatggggagctcatccgccaggtgctggcagctctgctccctgtgactggcaggtggcgctcccccggggaaggcttccgccttgagtctgaagtcatcatccgagtgacatgtcccctttcttccccacaagaaattacttctgaaaccgaggacctgtgtgaaaagcctgatgacgaagtgaaagaaactgctcatgatctggacgtgaaaagccccccggagcccaggagcgaggtggtgcctgcgaggctcaagcgggcctctgcccccaccttcgataacgactacagcctctccgagctgctctcacagctggactctggagtttcccaggctgtcgagggccccgaggagctcagccgcagctcctctgagtccaagctgccatcgtccggcagtgggaagaggctctcgggggtgtcctcggtggactccgccttctcttccagaggatcactgtcgctgtcctttgagcgggaaccttcaaccagcgatctgggcaccacagacgtccagaagaagaagcttgtggatgccatcgtgtccggggacaccagcaaactgatgaagatcctgcagccgcaggacgtggacctggcactggacagcggtgccagcctgctgcacctggcggtggaggccgggcaagaggagtgcgccaagtggctgctgctcaacaatgccaaccccaacctgagcaaccgtaggggctccaccccgttgcacatggccgtggagaggagggtgcggggtgtcgtggagctcctgctggcgcggaagatcagtgtcaacgccaaggatgaggaccagtggacagccctccactttgcagcccagaacggggacgagtctagcacacggctgctgttggagaagaacgcctcggtcaacgaggtggactttgagggccggacgcccatgcacgtggcctgccagcacgggcaggagaatatcgtgcgcatcctgctgcgccgaggcgtggacgtgagcctgcagggcaaggatgcctggctgccactgcactacgctgcctggcagggccacctgcccatcgtcaagctgctggccaagcagccgggggtgagtgtgaacgcccagacgctggatgggaggacgccattgcacctggccgcacagcgcgggcactaccgcgtggcccgcatcctcatcgacctgtgctccgacgtcaacgtctgcagcctgctggcacagacacccctgcacgtggccgcggagacggggcacacgagcactgccaggctgctcctgcatcggggcgctggcaaggaggccatgacctcagacggctacaccgctctgcacctggctgcccgcaacggacacctggccactgtcaagctgcttgtcgaggagaaggccgatgtgctggcccggggacccctgaaccagacggcgctgcacctggctgccgcccacgggcactcggaggtggtggaggagttggtcagcgccgatgtcattgacctgttcgacgagcaggggctcagcgcgctgcacctggccgcccagggccggcacgcacagacggtggagactctgctcaggcatggggcccacatcaacctgcagagcctcaagttccagggcggccatggccccgccgccacgctcctgcggcgaagcaagacctagctggctgcctgcggagaccgggggtccacgtggggctcttgtcctgtcctgtgttcctcgtggggatggaacgatcctgcgtggggccctgttgtggcttacctaaatgttaaccaagcagaggtgacatggtgccatcaggaggcggctgctgctgaccggagtgtcccctccaggtgaagctggctcaggtgcacatgcccgctccatcatcgatctaggcacctgctgtctgaagggaccgtgggtcagaatcatttcgttgtgctcctaatgggtcgctgaggctggtctctcagtgatgaagccccaggcgtggaagcatccactctctcctgaggcgagccaccttgggttgctggagctcaccagtcttgagggaggtgcaggggaaactgtgttttttatcttcatacatgacggtgggcagagaggcctgtcttaaagtttccatggaattgttttataaaatatcttaagagatgaataccttatcagctgttgcttgaaacctgttaaaaatgttcataacattggatagtctagtctctaaatgatgactaagtagtggggttggctttgaaaacaatgttttatgcaacaaggaacgaatggtagcagccagctttgcggggcgtatgtgtggccagctcttaaccattccagtctattacttgggtgagtccttgtggacaaccacacacacgtgcccacatggtactagctgccgttcgtttctcgttgcctaagatgttttggcaactctagagccacaggcctaagtcattaaaaaattctccctttgtaacctcagtgctggggactgaggcgagccccctcaggtcgctggagtgcaccagtcttggggaagaggtgcaggagaagctgtgttttttatctccacacgcagtatgaagataaaattacatagtattacctagacatagacagtattacctaggtagatgcactgctcacctgcgcccttcccagctctcatttttgttaggtgatttgggatagggatagtgttttggggtatggggggagtgtttctgacctgctttgcagacgtgcctccgcacctcagcagtttggggtgtggccccagggcggttcttggatgtaaaagatgtggccatctagcctcgtaacttcactgtcacctgtgtcccatagggtgccttctgaatactgttattagaataagtttgttgcagaacgtgaccctgcgtgcaaacatgtaccgtggcctggtatatgatagagattgatattaatgtaccatgtatgttaatgtgaatctgtgggcaggatacttttccatggcaggaaatatccaagctgttgaaactggctatgttttaatatgcctcattgtgcctttactgttgtgtggactgcgtgagggacaagaagttccatttgatgtcaataaagcaaagtacttgcc

SEQ ID NO: 204965 - DNA, 2449 bp, Artificial Sequence
  derived and/or modified sequence
aaattcggtgggtcggttgtcgtctgtgcataatttgagagggagcgcatggagcttttggaagaagccaagaagatggagatggccaagtttcgctacatcctgcctgtgtatggcatctgccgcgaacctgtcggcctggtcatggagtacatggagacgggctccctggaaaagctgctggcttcggagccattgccatgggatctccggttccgaatcatccacgagacggcggtgggcatgaacttcctgcactgcatggccccgccactcctgcacctggacctcaagcccgcgaacatcctgctggatgcccactaccacgtcaagatttctgattttggtctggccaagtgcaacgggctgtcccactcgcatgacctcagcatggatggcctgtttggcacaatcgcctacctccctccagagcgcatcagggagaagagccggctcttcgacaccaagcacgatgtatacagctttgcgatcgtcatctggggcgtgctcacacagaagaagccgtttgcagatgagaagaacatcctgcacatcatggtgaaggtggtgaagggccaccgccccgagctgccgcccgtgtgcagagcccggccgcgcgcctgcagccacctgatacgcctcatgcagcggtgctggcagggggatccgcgagttaggcccaccttccaagaaattacttctgaaaccgaggacctgtgtgaaaagcctgatgacgaagtgaaagaaactgctcatgatctggacgtgaaaagccccccggagcccaggagcgaggtggtgcctgcgaggctcaagcgggcctctgcccccaccttcgataacgactacagcctctccgagctgctctcacagctggactctggagtttcccaggctgtcgagggccccgaggagctcagccgcagctcctctgagtccaagctgccatcgtccggcagtgggaagaggctctcgggggtgtcctcggtggactccgccttctcttccagaggatcactgtcgctgtcctttgagcgggaaccttcaaccagcgatctgggcaccacagacgtccagaagaagaagcttgtggatgccatcgtgtccggggacaccagcaaactgatgaagatcctgcagccgcaggacgtggacctggcactggacagcggtgccagcctgctgcacctggcggtggaggccgggcaagaggagtgcgccaagtggctgctgctcaacaatgccaaccccaacctgagcaaccgtaggggctccaccccgttgcacatggccgtggagaggagggtgcggggtgtcgtggagctcctgctggcgcggaagatcagtgtcaacgccaaggatgaggaccagtggacagccctccactttgcagcccagaacggggacgagtctagcacacggctgctgttggagaagaacgcctcggtcaacgaggtggactttgagggccggacgcccatgcacgtggcctgccagcacgggcaggagaatatcgtgcgcatcctgctgcgccgaggcgtggacgtgagcctgcagggcaaggatgcctggctgccactgcactacgctgcctggcagggccacctgcccatcgtcaagctgctggccaagcagccgggggtgagtgtgaacgcccagacgctggatgggaggacgccattgcacctggccgcacagcgcgggcactaccgcgtggcccgcatcctcatcgacctgtgctccgacgtcaacgtctgcagcctgctggcacagacacccctgcacgtggccgcggagacggggcacacgagcactgccaggctgctcctgcatcggggcgctggcaaggaggccatgacctcagacggctacaccgctctgcacctggctgcccgcaacggacacctggccactgtcaagctgcttgtcgaggagaaggccgatgtgctggcccggggacccctgaaccagacggcgctgcacctggctgccgcccacgggcactcggaggtggtggaggagttggtcagcgccgatgtcattgacctgttcgacgagcaggggctcagcgcgctgcacctggccgcccagggccggcacgcacagacggtggagactctgctcaggcatggggcccacatcaacctgcagagcctcaagttccagggcggccatggccccgccgccacgctcctgcggcgaagcaagacctagctggctgcctgcggagaccgggggtccacgtggggctcttgtcctgtcctgtgttcctcgtggggatggaacgatcctgcgtggggccctgttgtggcttacctaaatgttaaccaagcagaggtgacatggtgccatcaggaggcggctgctgctgaccggagtgtcccctccaggtgaagctggctcaggtgcacatgcccgctccatcatcgatctaggcacctgctgtctg

SEQ ID NO: 204966 - DNA, 2601 bp, Artificial Sequence
  derived and/or modified sequence
gttgatccgtccgcccagcgcttcctcgccgcacactctcgttttagctgacttaatttcgagaccgacccgctagggaagggccttgcattcaagttctgtggccgtgccatggggccctcctgcaccccagtttcccagtccaaaagtcagaatggaacctgcctgtacctacctagcaggagtgttcaagggagcgcatggagcttttggaagaagccaagaagatggagatggccaagtttcgctacatcctgcctgtgtatggcatctgccgcgaacctgtcggcctggtcatggagtacatggagacgggctccctggaaaagctgctggcttcggagccattgccatgggatctccggttccgaatcatccacgagacggcggtgggcatgaacttcctgcactgcatggccccgccactcctgcacctggacctcaagcccgcgaacatcctgctggatgcccactaccacgtcaagatttctgattttggtctggccaagtgcaacgggctgtcccactcgcatgacctcagcatggatggcctgtttggcacaatcgcctacctccctccagagcgcatcagggagaagagccggctcttcgacaccaagcacgatgtatacagctttgcgatcgtcatctggggcgtgctcacacagaagaagccgtttgcagatgagaagaacatcctgcacatcatggtgaaggtggtgaagggccaccgccccgagctgccgcccgtgtgcagagcccggccgcgcgcctgcagccacctgatacgcctcatgcagcggtgctggcagggggatccgcgagttaggcccaccttccaagaaattacttctgaaaccgaggacctgtgtgaaaagcctgatgacgaagtgaaagaaactgctcatgatctggacgtgaaaagccccccggagcccaggagcgaggtggtgcctgcgaggctcaagcgggcctctgcccccaccttcgataacgactacagcctctccgagctgctctcacagctggactctggagtttcccaggctgtcgagggccccgaggagctcagccgcagctcctctgagtccaagctgccatcgtccggcagtgggaagaggctctcgggggtgtcctcggtggactccgccttctcttccagaggatcactgtcgctgtcctttgagcgggaaccttcaaccagcgatctgggcaccacagacgtccagaagaagaagcttgtggatgccatcgtgtccggggacaccagcaaactgatgaagatcctgcagccgcaggacgtggacctggcactggacagcggtgccagcctgctgcacctggcggtggaggccgggcaagaggagtgcgccaagtggctgctgctcaacaatgccaaccccaacctgagcaaccgtaggggctccaccccgttgcacatggccgtggagaggagggtgcggggtgtcgtggagctcctgctggcgcggaagatcagtgtcaacgccaaggatgaggaccagtggacagccctccactttgcagcccagaacggggacgagtctagcacacggctgctgttggagaagaacgcctcggtcaacgaggtggactttgagggccggacgcccatgcacgtggcctgccagcacgggcaggagaatatcgtgcgcatcctgctgcgccgaggcgtggacgtgagcctgcagggcaaggatgcctggctgccactgcactacgctgcctggcagggccacctgcccatcgtcaagctgctggccaagcagccgggggtgagtgtgaacgcccagacgctggatgggaggacgccattgcacctggccgcacagcgcgggcactaccgcgtggcccgcatcctcatcgacctgtgctccgacgtcaacgtctgcagcctgctggcacagacacccctgcacgtggccgcggagacggggcacacgagcactgccaggctgctcctgcatcggggcgctggcaaggaggccatgacctcagacggctacaccgctctgcacctggctgcccgcaacggacacctggccactgtcaagctgcttgtcgaggagaaggccgatgtgctggcccggggacccctgaaccagacggcgctgcacctggctgccgcccacgggcactcggaggtggtggaggagttggtcagcgccgatgtcattgacctgttcgacgagcaggggctcagcgcgctgcacctggccgcccagggccggcacgcacagacggtggagactctgctcaggcatggggcccacatcaacctgcagagcctcaagttccagggcggccatggccccgccgccacgctcctgcggcgaagcaagacctagctggctgcctgcggagaccgggggtccacgtggggctcttgtcctgtcctgtgttcctcgtggggatggaacgatcctgcgtggggccctgttgtggcttacctaaatgttaaccaagcagaggtgacatggtgccatcaggaggcggctgctgctgaccggagtgtcccctccaggtgaagctggctcaggtgcacatgcccgctccatcatcgatctaggcacctgctgtctg

SEQ ID NO: 204967 - DNA, 1206 bp, Artificial Sequence
  derived and/or modified sequence
atgcagagatgctggcagggcgaccccagagtgagacccaccttccaggagatcaccagcgagaccgaggacctgtgcgagaagcccgacgacgaggtgaaggagaccgcccacgacctggacgtgaagagcccccccgagcccagaagcgaggtggtgcccgccagactgaagagagccagcgcccccaccttcgacaacgactacagcctgagcgagctgctgagccagctggacagcggcgtgagccaggccgtggagggccccgaggagctgagcagaagcagcagcgagagcaagctgcccagcagcggcagcggcaagagactgagcggcgtgagcagcgtggacagcgccttcagcagcagaggcagcctgagcctgagcttcgagagagagcccagcaccagcgacctgggcaccaccgacgtgcagaagaagaagctggtggacgccatcgtgagcggcgacaccagcaagctgatgaagatcctgcagccccaggacgtggacctggccctggacagcggcgccagcctgctgcacctggccgtggaggccggccaggaggagtgcgccaagtggctgctgctgaacaacgccaaccccaacctgagcaacagaagaggcagcacccccctgcacatggccgtggagagaagagtgagaggcgtggtggagctgctgctggccagaaagatcagcgtgaacgccaaggacgaggaccagtggaccgccctgcacttcgccgcccagaacggcgacgagagcagcaccagactgctgctggagaagaacgccagcgtgaacgaggtggacttcgagggcagaacccccatgcacgtggcctgccagcacggccaggagaacatcgtgagaatcctgctgagaagaggcgtggacgtgagcctgcagggcaaggacgcctggcactgcaccaccctggccggcccccccgcccacagacaggccgccggccaggccgccggcggcgagtgcgagagacccgacgccggctgggaggacgccatcgcccccggcagaaccgccagagccctgcccagaggcccccacccccacagacccgtgctgagaagacagagactgcagcccgccggcaccgacacccccgccagacccagaagaagaggcaccagagccctgcccggctgcagctgcatcggcgccctggccagaagaccctag

SEQ ID NO: 204968 - DNA, 2355 bp, Artificial Sequence
  derived and/or modified sequence
atggagggcgacggcggcaccccctgggccctggccctgctgagaaccttcgacgccggcgagttcaccggctgggagaaggtgggcagcggcggcttcggccaggtgtacaaggtgagacacgtgcactggaagacctggctggccatcaagtgcagccccagcctgcacgtggacgacagagagagaatggagctgctggaggaggccaagaagatggagatggccaagttcagatacatcctgcccgtgtacggcatctgcagagagcccgtgggcctggtgatggagtacatggagaccggcagcctggagaagctgctggccagcgagcccctgccctgggacctgagattcagaatcatccacgagaccgccgtgggcatgaacttcctgcactgcatggccccccccctgctgcacctggacctgaagcccgccaacatcctgctggacgcccactaccacgtgaagatcagcgacttcggcctggccaagtgcaacggcctgagccacagccacgacctgagcatggacggcctgttcggcaccatcgcctacctgccccccgagagaatcagagagaagagcagactgttcgacaccaagcacgacgtgtacagcttcgccatcgtgatctggggcgtgctgacccagaagaagcccttcgccgacgagaagaacatcctgcacatcatggtgaaggtggtgaagggccacagacccgagctgccccccgtgtgcagagccagacccagagcctgcagccacctgatcagactgatgcagagatgctggcagggcgaccccagagtgagacccaccttccaggagatcaccagcgagaccgaggacctgtgcgagaagcccgacgacgaggtgaaggagaccgcccacgacctggacgtgaagagcccccccgagcccagaagcgaggtggtgcccgccagactgaagagagccagcgcccccaccttcgacaacgactacagcctgagcgagctgctgagccagctggacagcggcgtgagccaggccgtggagggccccgaggagctgagcagaagcagcagcgagagcaagctgcccagcagcggcagcggcaagagactgagcggcgtgagcagcgtggacagcgccttcagcagcagaggcagcctgagcctgagcttcgagagagagcccagcaccagcgacctgggcaccaccgacgtgcagaagaagaagctggtggacgccatcgtgagcggcgacaccagcaagctgatgaagatcctgcagccccaggacgtggacctggccctggacagcggcgccagcctgctgcacctggccgtggaggccggccaggaggagtgcgccaagtggctgctgctgaacaacgccaaccccaacctgagcaacagaagaggcagcacccccctgcacatggccgtggagagaagagtgagaggcgtggtggagctgctgctggccagaaagatcagcgtgaacgccaaggacgaggaccagtggaccgccctgcacttcgccgcccagaacggcgacgagagcagcaccagactgctgctggagaagaacgccagcgtgaacgaggtggacttcgagggcagaacccccatgcacgtggcctgccagcacggccaggagaacatcgtgagaatcctgctgagaagaggcgtggacgtgagcctgcagggcaaggacgcctggctgcccctgcactacgccgcctggcagggccacctgcccatcgtgaagctgctggccaagcagcccggcgtgagcgtgaacgcccagaccctggacggcagaacccccctgcacctggccgcccagagaggccactacagagtggccagaatcctgatcgacctgtgcagcgacgtgaacgtgtgcagcctgctggcccagacccccctgcacgtggccgccgagaccggccacaccagcaccgccagactgctgctgcacagaggcgccggcaaggaggccatgaccagcgacggctacaccgccctgcacctggccgccagaaacggccacctggccaccgtgaagctgctggtggaggagaaggccgacgtgctggccagaggccccctgaaccagaccgccctgcacctggccgccgcccacggccacagcgaggtggtggaggagctggtgagcgccgacgtgatcgacctgttcgacgagcagggcctgagcgccctgcacctggccgcccagggcagacacgcccagaccgtggagaccctgctgagacacggcgcccacatcaacctgcagagcctgaagttccagggcggccacggccccgccgccaccctgctgagaagaagcaagacctag

SEQ ID NO: 204969 - DNA, 2499 bp, Artificial Sequence
  derived and/or modified sequence
atggagggcgacggcggcaccccctgggccctggccctgctgagaaccttcgacgccggcgagttcaccggctgggagaaggtgggcagcggcggcttcggccaggtgtacaaggtgagacacgtgcactggaagacctggctggccatcaagtgcagccccagcctgcacgtggacgacagagagagaatggagctgctggaggaggccaagaagatggagatggccaagttcagatacatcctgcccgtgtacggcatctgcagagagcccgtgggcctggtgatggagtacatggagaccggcagcctggagaagctgctggccagcgagcccctgccctgggacctgagattcagaatcatccacgagaccgccgtgggcatgaacttcctgcactgcatggccccccccctgctgcacctggacctgaagcccgccaacatcctgctggacgcccactaccacgtgaagatcagcgacttcggcctggccaagtgcaacggcctgagccacagccacgacctgagcatggacggcctgttcggcaccatcgcctacctgccccccgagagaatcagagagaagagcagactgttcgacaccaagcacgacgtgtacagcttcgccatcgtgatctggggcgtgctgacccagaagaagcccttcgccgacgagaagaacatcctgcacatcatggtgaaggtggtgaagggccacagacccgagctgccccccgtgtgcagagccagacccagagcctgcagccacctgatcagactgatgcagagatgctggcagggcgaccccagagtgagacccaccttccagggcaacggcctgaacggcgagctgatcagacaggtgctggccgccctgctgcccgtgaccggcagatggagaagccccggcgagggcttcagactggagagcgaggtgatcatcagagtgacctgccccctgagcagcccccaggagatcaccagcgagaccgaggacctgtgcgagaagcccgacgacgaggtgaaggagaccgcccacgacctggacgtgaagagcccccccgagcccagaagcgaggtggtgcccgccagactgaagagagccagcgcccccaccttcgacaacgactacagcctgagcgagctgctgagccagctggacagcggcgtgagccaggccgtggagggccccgaggagctgagcagaagcagcagcgagagcaagctgcccagcagcggcagcggcaagagactgagcggcgtgagcagcgtggacagcgccttcagcagcagaggcagcctgagcctgagcttcgagagagagcccagcaccagcgacctgggcaccaccgacgtgcagaagaagaagctggtggacgccatcgtgagcggcgacaccagcaagctgatgaagatcctgcagccccaggacgtggacctggccctggacagcggcgccagcctgctgcacctggccgtggaggccggccaggaggagtgcgccaagtggctgctgctgaacaacgccaaccccaacctgagcaacagaagaggcagcacccccctgcacatggccgtggagagaagagtgagaggcgtggtggagctgctgctggccagaaagatcagcgtgaacgccaaggacgaggaccagtggaccgccctgcacttcgccgcccagaacggcgacgagagcagcaccagactgctgctggagaagaacgccagcgtgaacgaggtggacttcgagggcagaacccccatgcacgtggcctgccagcacggccaggagaacatcgtgagaatcctgctgagaagaggcgtggacgtgagcctgcagggcaaggacgcctggctgcccctgcactacgccgcctggcagggccacctgcccatcgtgaagctgctggccaagcagcccggcgtgagcgtgaacgcccagaccctggacggcagaacccccctgcacctggccgcccagagaggccactacagagtggccagaatcctgatcgacctgtgcagcgacgtgaacgtgtgcagcctgctggcccagacccccctgcacgtggccgccgagaccggccacaccagcaccgccagactgctgctgcacagaggcgccggcaaggaggccatgaccagcgacggctacaccgccctgcacctggccgccagaaacggccacctggccaccgtgaagctgctggtggaggagaaggccgacgtgctggccagaggccccctgaaccagaccgccctgcacctggccgccgcccacggccacagcgaggtggtggaggagctggtgagcgccgacgtgatcgacctgttcgacgagcagggcctgagcgccctgcacctggccgcccagggcagacacgcccagaccgtggagaccctgctgagacacggcgcccacatcaacctgcagagcctgaagttccagggcggccacggccccgccgccaccctgctgagaagaagcaagacctag

SEQ ID NO: 204970 - DNA, 2166 bp, Artificial Sequence
  derived and/or modified sequence
atggagctgctggaggaggccaagaagatggagatggccaagttcagatacatcctgcccgtgtacggcatctgcagagagcccgtgggcctggtgatggagtacatggagaccggcagcctggagaagctgctggccagcgagcccctgccctgggacctgagattcagaatcatccacgagaccgccgtgggcatgaacttcctgcactgcatggccccccccctgctgcacctggacctgaagcccgccaacatcctgctggacgcccactaccacgtgaagatcagcgacttcggcctggccaagtgcaacggcctgagccacagccacgacctgagcatggacggcctgttcggcaccatcgcctacctgccccccgagagaatcagagagaagagcagactgttcgacaccaagcacgacgtgtacagcttcgccatcgtgatctggggcgtgctgacccagaagaagcccttcgccgacgagaagaacatcctgcacatcatggtgaaggtggtgaagggccacagacccgagctgccccccgtgtgcagagccagacccagagcctgcagccacctgatcagactgatgcagagatgctggcagggcgaccccagagtgagacccaccttccaggagatcaccagcgagaccgaggacctgtgcgagaagcccgacgacgaggtgaaggagaccgcccacgacctggacgtgaagagcccccccgagcccagaagcgaggtggtgcccgccagactgaagagagccagcgcccccaccttcgacaacgactacagcctgagcgagctgctgagccagctggacagcggcgtgagccaggccgtggagggccccgaggagctgagcagaagcagcagcgagagcaagctgcccagcagcggcagcggcaagagactgagcggcgtgagcagcgtggacagcgccttcagcagcagaggcagcctgagcctgagcttcgagagagagcccagcaccagcgacctgggcaccaccgacgtgcagaagaagaagctggtggacgccatcgtgagcggcgacaccagcaagctgatgaagatcctgcagccccaggacgtggacctggccctggacagcggcgccagcctgctgcacctggccgtggaggccggccaggaggagtgcgccaagtggctgctgctgaacaacgccaaccccaacctgagcaacagaagaggcagcacccccctgcacatggccgtggagagaagagtgagaggcgtggtggagctgctgctggccagaaagatcagcgtgaacgccaaggacgaggaccagtggaccgccctgcacttcgccgcccagaacggcgacgagagcagcaccagactgctgctggagaagaacgccagcgtgaacgaggtggacttcgagggcagaacccccatgcacgtggcctgccagcacggccaggagaacatcgtgagaatcctgctgagaagaggcgtggacgtgagcctgcagggcaaggacgcctggctgcccctgcactacgccgcctggcagggccacctgcccatcgtgaagctgctggccaagcagcccggcgtgagcgtgaacgcccagaccctggacggcagaacccccctgcacctggccgcccagagaggccactacagagtggccagaatcctgatcgacctgtgcagcgacgtgaacgtgtgcagcctgctggcccagacccccctgcacgtggccgccgagaccggccacaccagcaccgccagactgctgctgcacagaggcgccggcaaggaggccatgaccagcgacggctacaccgccctgcacctggccgccagaaacggccacctggccaccgtgaagctgctggtggaggagaaggccgacgtgctggccagaggccccctgaaccagaccgccctgcacctggccgccgcccacggccacagcgaggtggtggaggagctggtgagcgccgacgtgatcgacctgttcgacgagcagggcctgagcgccctgcacctggccgcccagggcagacacgcccagaccgtggagaccctgctgagacacggcgcccacatcaacctgcagagcctgaagttccagggcggccacggccccgccgccaccctgctgagaagaagcaagacctag

SEQ ID NO: 204971 - protein, 259 aa, Artificial Sequence
  derived and/or modified sequence
MNKLKSSQKDKVRQFMIFTQSSEKTAVSCLSQNDWKLDVATDNFFQNPELYIRESVKGSLDRKKLEQLYNRYKDPQDENKIGIDGIQQFCDDLALDPASISVLIIAWKFRAATQCEFSKQEFMDGMTELGCDSIEKLKAQIPKMEQELKEPGRFKDFYQFTFNFAKNPGQKGLDLEMAIAYWNLVLNGRFKFLDLWNKFLLEHHKRSIPKDTWNLLLDFSTMIADDMSNYDEEGAWPVLIDDFVEFARPQIAGTKSTTV

SEQ ID NO: 204972 - protein, 219 aa, Artificial Sequence
  derived and/or modified sequence
MNKLKSSQKDKVRQFMIFTQSSEKTAVSCLSQNDWKLDVATDNFFQNPELYIRESVKGSLDRKKLEQLYNRYKDPQDENKIGIDGMTELGCDSIEKLKAQIPKMEQELKEPGRFKDFYQFTFNFAKNPGQKGLDLEMAIAYWNLVLNGRFKFLDLWNKFLLEHHKRSIPKDTWNLLLDFSTMIADDMSNYDEEGAWPVLIDDFVEFARPQIAGTKSTTV

SEQ ID NO: 204973 - DNA, 780 bp, Artificial Sequence
  derived and/or modified sequence
atgaataagctgaaatcttcacagaaagacaaggtccgccaattcatgatctttactcagtcaagtgagaagaccgccgtttcgtgcttgtctcagaacgattggaaactcgatgtggcaacagacaatttctttcagaaccccgagctttatatcagggaatcagtgaagggctcactggatagaaaaaagttagagcagctgtacaaccggtacaaggacccacaggatgaaaataaaattgggattgatggaatccagcagttttgtgatgacctggcgctcgatcccgcctctatcagcgtgctgataattgcatggaagttcagagctgccacacagtgtgagttcagcaaacaagagttcatggacggaatgactgaactgggatgcgacagcatagaaaaactaaaagcgcagataccgaagatggagcaggagctgaaggaacccgggagatttaaagatttctatcaattcacattcaattttgctaagaatcctggccagaaggggctggatctcgagatggccatcgcttactggaacctggtcttgaacggacgattcaaatttctagacttgtggaacaagttcctgcttgaacaccataagagatcaatcccgaaggatacatggaacctgctcctcgatttctccactatgatcgccgacgacatgtcgaactacgatgaagaaggggcgtggcctgtgttgatcgatgattttgtggagttcgcccggccacagatcgctggaaccaagagtaccaccgtgtag

SEQ ID NO: 204974 - DNA, 660 bp, Artificial Sequence
  derived and/or modified sequence
atgaacaaactaaagtcctcgcagaaagataaggtccggcagttcatgatttttacacagtccagtgagaagaccgctgtcagctgtctgtcccagaatgactggaagctagacgtggcgacggacaacttcttccagaacccggagctctatataagagagtccgtcaagggcagtctcgatcgcaagaagctggagcaactgtataatcgctacaaagacccacaggacgagaataaaattggaatcgacgggatgaccgagctgggttgcgactctatagaaaagttaaaagcccagatacctaagatggagcaggagttgaaagagcccggtaggtttaaagacttttaccagttcacgtttaactttgccaaaaaccccggacaaaagggtctggatctggagatggccatagcctactggaatttggtgttaaatggaagattcaagtttctcgatctgtggaataagtttctcttggagcatcataagcggtcgatcccgaaggacacctggaacctgttgctagatttctcgacaatgatagcggacgatatgagcaactacgatgaagagggggcctggcccgttctgattgatgattttgtcgagttcgcaaggccccagattgcaggaaccaagtctaccactgtgtag

SEQ ID NO: 204975 - DNA, 780 bp, Artificial Sequence
  derived and/or modified sequence
atgaacaagctgaagagcagccagaaggacaaggtgcggcagttcatgatcttcacccagagcagcgagaagacagctgtgtcctgcctgagccagaatgactggaagctggatgtggccacagacaacttcttccagaaccctgagctgtacatccgggagagcgtgaagggcagcctggacaggaagaagctggagcagctgtacaaccgctacaaggacccccaggatgagaacaagattggaattgatggcatccagcagttctgtgatgacctggccctggaccctgccagcatctctgtgctgatcatcgcctggaagttccgggccgccacccagtgtgagttcagcaagcaggagttcatggatggcatgacagagctgggctgtgacagcattgagaagctgaaggcccagatccccaagatggagcaggagctgaaggagcccggccgcttcaaggacttctaccagttcaccttcaactttgccaagaaccctggccagaagggcctggacctggagatggccatcgcctactggaacctggtgctgaatggccgcttcaagttcctggacctgtggaacaagttcctgctggagcaccacaagaggagcatccccaaggacacctggaacctgctgctggacttcagcaccatgattgctgatgacatgagcaactatgatgaggagggcgcctggcctgtgctgattgatgactttgtggagtttgcccggccccagattgctggcaccaagagcaccaccgtgtag

SEQ ID NO: 204976 - DNA, 660 bp, Artificial Sequence
  derived and/or modified sequence
atgaacaagctgaagagcagccagaaggacaaggtgcggcagttcatgatcttcacccagagcagcgagaagacagctgtgtcctgcctgagccagaatgactggaagctggatgtggccacagacaacttcttccagaaccctgagctgtacatccgggagagcgtgaagggcagcctggacaggaagaagctggagcagctgtacaaccgctacaaggacccccaggatgagaacaagattggaattgatggcatgacagagctgggctgtgacagcattgagaagctgaaggcccagatccccaagatggagcaggagctgaaggagcccggccgcttcaaggacttctaccagttcaccttcaactttgccaagaaccctggccagaagggcctggacctggagatggccatcgcctactggaacctggtgctgaatggccgcttcaagttcctggacctgtggaacaagttcctgctggagcaccacaagaggagcatccccaaggacacctggaacctgctgctggacttcagcaccatgattgctgatgacatgagcaactatgatgaggagggcgcctggcctgtgctgattgatgactttgtggagtttgcccggccccagattgctggcaccaagagcaccaccgtgtag

SEQ ID NO: 204977 - DNA, 780 bp, Artificial Sequence
  derived and/or modified sequence
atgaacaagctgaagagcagccagaaggacaaggtgcggcagttcatgatattcacacagtcctccgagaagaccgcggttagttgtttatctcaaaatgactggaagctcgacgtggccacagacaattttttccaaaaccccgagctgtatatcagagaatctgtgaagggttctctcgaccgaaaaaagctagagcaactgtataaccgttataaagatcctcaggacgaaaataaaataggcattgacggaattcagcagttctgcgatgacctggccctggaccccgcatccatcagcgtcttaattatcgcctggaagtttagggctgcgacccaatgcgagttttcaaagcaggagttcatggatggaatgactgagcttgggtgcgacagcatcgagaagctgaaagcacaaatcccaaagatggagcaagagttgaaggagcctgggcggttcaaagacttctaccagtttacattcaacttcgctaaaaacccaggccagaaggggctggacctggaaatggcaattgcctattggaatctggtacttaatggtcgttttaaattcctggacctttggaacaagtttttactcgagcatcacaagcgtagtatccctaaggacacctggaaccttttgcttgacttcagcaccatgatcgcggatgacatgagtaattacgatgaggaaggagcctggcctgtactcatcgatgatttcgtggagtttgccagaccacagatcgccgggacaaagtccactaccgtttag

SEQ ID NO: 204978 - DNA, 660 bp, Artificial Sequence
  derived and/or modified sequence
atgaacaagctgaagagcagccagaaggacaaggtgcggcagttcatgatatttacccagtcctccgagaagaccgccgtgtcctgcctgtcacagaatgattggaagctggacgtcgctactgataactttttccaaaaccccgaactatacattcgcgagagcgtgaagggcagcctcgatcgcaaaaagctggaacagctgtacaataggtacaaggatcctcaggatgagaataagatcggaatagatgggatgactgaattagggtgtgactccattgagaagctcaaagctcaaataccaaaaatggaacaggagctgaaggagcctggtaggttcaaagacttctatcagtttactttcaatttcgccaagaatccagggcagaaaggcttggacctagagatggcgattgcctactggaacctcgtcttaaatggccgattcaaattcctggacctttggaacaagtttctcctcgagcatcacaaaaggagcattcctaaggatacatggaacctcctcctagatttttctacaatgattgctgatgatatgagtaattacgacgaggaaggcgcctggccagtcctaattgacgatttcgtggagtttgcccggccacagatcgccgggactaagtctaccacagtgtag

SEQ ID NO: 204979 - DNA, 780 bp, Artificial Sequence
  derived and/or modified sequence
atgaacaagctgaagagttcccagaaagacaaagttcgacagttcatgatctttacgcagagtagcgagaagacagcggtatcttgcctttcacaaaacgattggaaattggatgtggctaccgacaattttttccagaatcctgagctctatatccgtgagtcagtgaaaggatccctcgatagaaaaaaactggaacaactctataacaggtataaagatccgcaggatgaaaacaaaattggaattgatgggatccagcagttctgtgatgacttggcgcttgaccccgctagcatttcagtgctgatcatcgcctggaaatttagagcggcaacacagtgcgagttcagcaagcaagaattcatggacggcatgaccgagcttggttgtgactccattgagaagttgaaggctcagattcccaagatggagcaagagctcaaggagccaggccgtttcaaagacttttaccagtttacctttaattttgccaaaaatcctggtcagaagggtttagacctggagatggccatagcctactggaatctcgttctcaacgggaggtttaagttccttgatctatggaataagttcctgctggaacaccacaaacggtccattccgaaagatacttggaacctgctgctggacttctccactatgattgccgacgacatgtccaattatgatgaggagggagcatggcctgtgctgatcgacgactttgtagagtttgctcggcctcaaattgctggaaccaagagtaccaccgtttag

SEQ ID NO: 204980 - DNA, 660 bp, Artificial Sequence
  derived and/or modified sequence
atgaataagctgaagtcctcccaaaaggataaagtacggcagttcatgatcttcacacagagcagcgagaagaccgccgtcagctgtctgagccagaatgactggaaactagatgttgccacagataacttcttccagaatccagagctgtatatccgggaaagcgtgaagggatcactggaccgaaagaaacttgaacagctgtataacagatacaaagacccccaggatgagaataaaattgggatcgacggaatgactgaactggggtgcgactctatcgaaaaactgaaggcccaaatcccaaagatggaacaggagctcaaggagcccggaagatttaaggacttctaccagtttaccttcaactttgccaagaaccccggtcagaaaggattggatttggagatggctatcgcctactggaacctggtgttaaatggtcgcttcaagttcctggatttatggaataagttcttgctcgagcatcacaagagatccattccaaaagacacatggaatctcctcttggacttcagcactatgatcgcagatgacatgtctaattatgacgaggagggcgcatggcccgtgttaattgatgacttcgttgagttcgctcggcctcaaattgcagggacaaagtcaaccaccgtctag

SEQ ID NO: 204981 - DNA, 7954 bp, Artificial Sequence
  derived and/or modified sequence
cgaggtccggggctgcctcctcgggccgcgccgggccgccccgcactgcgcatgagcgggagccgggcaagcccgtgagaggagccgccgccgccgccgccgtccattcgctgcggagccggaggaggaggggagaggcctggaggacaccaacatgaacaagttgaaatcatcgcagaaggataaagttcgtcagtttatgatcttcacacaatctagtgaaaaaacagcagtaagttgtctttctcaaaatgactggaagttagatgttgcaacagataattttttccaaaatcctgaactttatatacgagagagtgtaaaaggatcattggacaggaagaagttagaacagctgtacaatagatacaaagaccctcaagatgagaataaaattggaatagatggcatacagcagttctgtgatgacctggcactcgatccagccagcattagtgtgttgattattgcgtggaagttcagagcagcaacacagtgcgagttctccaaacaggagttcatggatggcatgacagaattaggatgtgacagcatagaaaaactaaaggcccagatacccaagatggaacaagaattgaaagaaccaggacgatttaaggatttttaccagtttacttttaattttgcaaagaatccaggacaaaaaggattagatctagaaatggccattgcctactggaacttagtgcttaatggaagatttaaattcttagacttatggaataaatttttgttggaacatcataaacgatcaataccaaaagacacttggaatcttcttttagacttcagtacgatgattgcagatgacatgtctaattatgatgaagaaggagcatggcctgttcttattgatgactttgtggaatttgcacgccctcaaattgctgggacaaaaagtacaacagtgtagcactaaaggaaccttctagaatgtacatagtctgtacaataaatacaacagaaaattgcacagtcaatttctgctggctggactgaactgaagatcaatcctcacaattcagactgagggttgagacaaaactttaaggatacatcttggaccatatcgtatttcattcttctaatggtggtttgggcttgtcttctagtctgggccgctctaaacatttataattccaacattgtggatttcatcttatatctgtggaccatcctagtttattctcccataagtcttagaagctttatggtgattattttgaggttttcattctcgcataaagcacaatgctgtcttcatcagaaaacagttggcataagaattaaacatatgaacatcacaaaacaatttataaaaacttcttaaatatacgctttgggctagttgcaaagactatgctaatagcacttccagtgagagtgatatatttaagtgtactggatctggaatggtgttttggtttggggggaattttttttttttcctggcaaatcacatgtgttgttgatgtgagtatctgatgaaaaaacaatgtcagaataaccgacatgaaaattttttaggataacttggtgcctacctgaaaaatgtattgtgttttagactcttgatttcaaaaggttccacagaactagtctgcgcttaccttacccatgtttatatatagctgtcctacagggagcttttatttagaaaatgtctgcataatgttagattcttctcctgtctacattatgcactacataattggacttcattatgcttttgaaatgcttatctgcctgtcacataagttaaactatttaatttgttttgaatgttttggattgctacacaatacaatattctaaatttaggcatgagggtttttttgttttgtttttactttttttttgtcatcgcactatggaacacaaatggaattctcttaatttataagaagatagttgcagttaaattttgaaaatggttgtaatgagccatgaagttcaatctttataatataggtactgctctttcagacaaatagtccattttcgatgacttattattttgttgaaattgctttaactgctaatcactgtggttgccaaatatttacttcaggagcaaagattttcaaacaagcatacacgatgcaaaataccaatctggcttctagtctctttactgttttcgtttcactcagattagctcagttttctcatcaaagcagaatgctatcttgtatgtatttttttcattacaagccccatgagctgcttttatgctgaaaatggtcatttccctgttcacttactgacatgtgaagaagggtttcttgctttcttaaacatttccgtaaggcaggctagaaatgtaatacttcaaatgtttgatgattatggtcttttgataggaatagattctgcttgggatatatatccaggcactctctaaggtctagggttgatattaacaaaggaatgtacttagaatagcagtacattttatgcaaatatggaaattattttaagaaacaatgacatatcaaaactgctttttacatgattttgaaatagactagaaagctttccctatagacatattaatattccaatcataactttaattcaagaatgcagttttaccaaaagaaaaatttgaaaatttctattcaggctactggaattggttattaaaagaaaaaggaaaaagaagaatcttgctgctttcagtatttcctgatttttttgtaaatataaagaggaacttcaattatgaaaaatttttaaaagatatatatatctatatatctatatatatgtactgttttgtttcctgtcttgaagattttgagttatggttattggtttcagattgattaattcacatatgctgtgttttgaaatgagatcccattagcttttttttttttttttttttttcaatataaagtgttttctttaaaagtcatattggttcgtggcctagtgccttggattttacatatttttctttttaaatgcaaaaccttttcaacaaaatagtgtttgtcatcaggttggtactaaacatttataattactgtgtaattataaacaaaaatacataaagctttgaatataattatgtagcataaaagttaaggttgttcactatgatggcatcttagaattaaacaaaacttttactagggctgaaaagagaagactgatttaatgtggtgtgattattctgaagataaatgtctggctacagggaatattttgtactaaaaaatgattacacatatggctgtgtgtgtttgagtctgtgtctgtgagagagccagagagagtgagagagattgacagagaaagggagagacacacacacgccccttgaattgctttaactcctaagtgtttcagtcctcattccggtaaactccccatgctgattctttgttttaaactgaaccataggtacagtttcctttttgccaaatgtcaaaacaggtacaaattttaaaatgtaatgctttttaaatagaaaaatgtataaaattagaagtgcccacatataaaaaatacttgagatgaagattatctttagtgaatatcatctgcatatctctgtaagttcaattgtgtttcttacagtccctgtcatattaccaacagaggcaataaaagctgcagtgaaattgccatgactaaatcttttcacatatttcagtgtattttttttatagatttaaaatatacctgaaaacttttctaggaagaataattattcatggaaagagcattgtaatggcatgttttggggagaaaagacatgccaagtcttgtttactacatttaagatgtttacaactatactgggctgctttattaacaatactgtacttgcataatatggcattataagtacatgtccttccttagacttttaaaaagttttaatgagagaaagtaaatttactcaacaaaataacatgagaaatcctttacgtaatatctttactggggaattcttatttaagcaaggtacactattttttcctcagacttaaatgaatgaagtgttcatttattttttatttgatgataatcaagaagtgagtagtagtagctaacttaatgtacactttgcttaggtttttaaacatgttactattaagactacgtattgtaaaccttctgtaattttcacatatgaatgacaggagaaagttaaacctaatcgaaggagttttggaataaaaaagtggtgctggggaaattcaccatggttcacaaagtatgcctttgtaaaactgaatcaacttttagcaagaattaatttatgtagttttaaatgttaaattgtgtatatttaacagaaaatacttatctggcacctcagcagttttaatgttaccttatacttttaacagtatgatttatattgaatacttagatgttttcataagattttatcaaatttgataatgtaatgataaaatgtttttttaaatgtgaactatttaacatataaatggggacacaaaacctgaattgtgatttctacataatgtgataattagggttcaaattatgactcatcatttaattgattataaatgagtatatttctgaactctttattgcctccatttttacaatcataatatagcaataatttctatttttatttcataggactgtggtgaagttatttatcatgacacctttatctttgatttctgagggaaaggggtgtatattttgtagttaagataaatgagaaagttcctaatagtacaaatgcccttttccaggtttatctttgctatttgttgccatttttcttaaatatttgctttatttgtacccgatttctggaggcaaatagtgctgttttttcaaactcataatatagttacataaatgattttatcagagcattcttgctatcttattttctttcctacctgttgagtaagtagcatttcttgctcaccaactcatttatttgactaggttcagtgtttcctattaatgtgtttttttattttcctttggttgattttgaaaaatctgtcacaaataaggaagttatggtaaaagatgcacagcctttgtagttagtggaattctcaataagtaatgtctttatggagttttaaagggaaattatttaaagggaatcatgttatagttgtccattttttaaattgagattttaaaagtgtttttaagtatagcccaattttctatttacttacaagtgcttcatgattgttttcttttttattttttgccatcatgctgtgcagaaatcataatgtagcttgtaatacttcagagcattggtcttgaagctgtaacttggggctgctgtccttcatgaggtagggccatagcaggcaggccctttcccacttcctttatggcattctacttttatctgttgtaggctgttagtgtttcatattcgatttggtttggggaaaaatactcagttaaaaaaattttttttaatgattggctttagagggactgttacctctttggcatatctgtcagcggaatggaaagaaatggagtcagactgaaattcatgccagcttaatcactgaaggcagcactgctttgaaaagaagaattttcaacccacatcgtaaaaacaaagcctgattggaaacaatgaagtgtttgaaacttaggggcagcatgtaagtggcttaatgagcaaacaaacggaacatactcattttatatttaaaaagtacatatatattcaaatgcatgttcatatgaatattataattttatttcaggttatgaaatattctgagaaaaccttatatctgatggaaaacttgggcaatacccaatacgaagcaagagatttttacaaaaagaaatactatagggcataaggttgggggaagaccaattaatgaaatggctaagggacaatgctaattaaatcgttaacagtgattttgtcacataattacatgacttatagctaaaagagcaatatttaatcagtaagatttagagatgggtgtacttggaatcctttgaaagcagcgtgtttagttttcaagcaaatgctaatgttcttaatcctaatagtatattagacttcgttgtgttgaatatatcaaatgaacgaactatgaaccagagctttaaaatagtgatttgtaagactttgttacaatggtacttaaaaaattgctttgtataatttacacactgtaaaattcacccattgtacatgtacaattaattgtttttagtaaacttaagagttgtgcagtccaattttagaacatgtccatcagcccccaaaatttactcctgctgctctgcggttaatttgctcctgcctccagccccacgcagccacactgatctgctttctgtacagatttaccctttctagaaatttcacagaggtagaatcatgcagttagtcttttatatctggcatctttcacttagcatgtttttgaggttcatccatgttgcagcttatacctgcgtgtagttcctttagttgctgacttagtgttcactgtttggatataccacattttgtttatccattcaccagttgatagacatttggctggcctacaattagtttttttaaattgcgaataataatgctatgaacattcataaatgtctttgtgtggacatgttttcatctcagattcctagttgtggaattgtcaggttgtgtggtaaatttatacctaacgtttttaaaaaaactgctgaactttttccaaagtggctgtacttctagaactattcctgccacagtgcatgcggactgccgtgtctgcacatccttgccaatacttgtcttttttattgcagccatcctggcgggtatttactttatgtgtgtgagttatacctaggcatcccaactcgtgtatcgattggatgtgcagtttgagtgagtttcaagtggcctcagcgattgctgtaaaattagttactctagtagacatgtactctcttggaggtagtattttctgtagtcagtgagggtaataataatacttccagtgggggttccagtccctcagtgatctctggtgagaagaaatgtgtcagcgaagagtggtgctgatggctggtgctttggctctgttattgtttgtaccaaggttgatacagctactcgactagcctatgactgactggtggtggtaattaaactttgtacagattactgtgtgcagatagttactgtcttaatattaagtttcccagagattttacttttgagatagctgagaattaacgactcttggaatttataaaaatttagttgataccatttagttgctgccagctgcctgtgttcttatacataggagacatcggagtgagtgctttttaaaaaattaatggcgtatgtcaggtatatgtaaaaggacaattgcataatgaactcatgttaacatgatcaatccatggccaatcttgatttatctaaatgccattcatctttgaacccctatttattttgaagcaaatcccagatagcaaatcatttcatttgtaaatatttcaatatgtatgtctaaaagataaggactgttaaataaaaccacaattctgttgttagacttaactgttaacagtttgttagtgttaataactacccagcagtgttcaagttgtgcctttttttttttttttccaattcaagtcaggattcaaataagattcctacattgcatacatctcaaatgtcctacccagtggatccccacactctccactctttggcttcaaattcatttttttgaaaaaacaatgattgctttagcactttaaatttctatgcaatttcaaatgtaaggtgaaattttgatgtacttaataaaaaaattctaacgaatatatttttcaagttaatgtagtatataagaagctattatatcaacagattttcctttaacttaaaaatacatcgtgacttgta

SEQ ID NO: 204982 - DNA, 1024 bp, Artificial Sequence
  derived and/or modified sequence
attcgctgcggagccggaggaggaggggagaggcctggaggacaccaacatgaacaagttgaaatcatcgcagaaggataaagttcgtcagtttatgatcttcacacaatctagtgaaaaaacagcagtaagttgtctttctcaaaatgactggaagttagatgttgcaacagataattttttccaaaatcctgaactttatatacgagagagtgtaaaaggatcattggacaggaagaagttagaacagctgtacaatagatacaaagaccctcaagatgagaataaaattggaatagatggcatgacagaattaggatgtgacagcatagaaaaactaaaggcccagatacccaagatggaacaagaattgaaagaaccaggacgatttaaggatttttaccagtttacttttaattttgcaaagaatccaggacaaaaaggattagatctagaaatggccattgcctactggaacttagtgcttaatggaagatttaaattcttagacttatggaataaatttttgttggaacatcataaacgatcaataccaaaagacacttggaatcttcttttagacttcagtacgatgattgcagatgacatgtctaattatgatgaagaaggagcatggcctgttcttattgatgactttgtggaatttgcacgccctcaaattgctgggacaaaaagtacaacagtgtagcactaaaggaaccttctagaatgtacatagtctgtacaataaatacaacagaaaattgcacagtcaatttctgctggctggactgaactgaagatcaatcctcacaattcagactgagggttgagacaaaactttaaggatacatcttggaccatatcgtatttcattcttctaatggtggtttgggcttgtcttctagtctgggccgctctaaacatttataattccaacattgtggatttcatcttatatctgtggaccatcctagtttattctcccataagtcttagaagctttatggtgattattttgagg

SEQ ID NO: 204983 - DNA, 504 bp, Artificial Sequence
  derived and/or modified sequence
agggggcaacggccttgcccctgcccctctgccggctccattgtgtctggtcggggactggggtctggggttccggaacaagttgaaatcatcgcagaaggataaagttcgtcagtttatgatcttcacacaatctagtgaaaaaacagcagtaagttgtctttctcaaaatgactggaagttagatgttgcaacagataattttttccaaaatcctgaactttatatacgagagagtgtaaaaggatcattggacaggaagaagttagaacagctgtacaatagatacaaagaccctcaagatgagaataaaattggaatagatggcatacagcagttctgtgatgacctggcactcgatccagccagcattagtgtgttgattattgcgtggaagttcagagcagcaacacagtgcgagttctccaaacaggagttcatggatggcatgacagaattaggatgtgacagcatagaaaaactaaaggcccagatacccaagat

SEQ ID NO: 204984 - DNA, 780 bp, Artificial Sequence
  derived and/or modified sequence
atgaacaagctgaagagcagccagaaggacaaggtgagacagttcatgatcttcacccagagcagcgagaagaccgccgtgagctgcctgagccagaacgactggaagctggacgtggccaccgacaacttcttccagaaccccgagctgtacatcagagagagcgtgaagggcagcctggacagaaagaagctggagcagctgtacaacagatacaaggacccccaggacgagaacaagatcggcatcgacggcatccagcagttctgcgacgacctggccctggaccccgccagcatcagcgtgctgatcatcgcctggaagttcagagccgccacccagtgcgagttcagcaagcaggagttcatggacggcatgaccgagctgggctgcgacagcatcgagaagctgaaggcccagatccccaagatggagcaggagctgaaggagcccggcagattcaaggacttctaccagttcaccttcaacttcgccaagaaccccggccagaagggcctggacctggagatggccatcgcctactggaacctggtgctgaacggcagattcaagttcctggacctgtggaacaagttcctgctggagcaccacaagagaagcatccccaaggacacctggaacctgctgctggacttcagcaccatgatcgccgacgacatgagcaactacgacgaggagggcgcctggcccgtgctgatcgacgacttcgtggagttcgccagaccccagatcgccggcaccaagagcaccaccgtgtag

SEQ ID NO: 204985 - DNA, 660 bp, Artificial Sequence
  derived and/or modified sequence
atgaacaagctgaagagcagccagaaggacaaggtgagacagttcatgatcttcacccagagcagcgagaagaccgccgtgagctgcctgagccagaacgactggaagctggacgtggccaccgacaacttcttccagaaccccgagctgtacatcagagagagcgtgaagggcagcctggacagaaagaagctggagcagctgtacaacagatacaaggacccccaggacgagaacaagatcggcatcgacggcatgaccgagctgggctgcgacagcatcgagaagctgaaggcccagatccccaagatggagcaggagctgaaggagcccggcagattcaaggacttctaccagttcaccttcaacttcgccaagaaccccggccagaagggcctggacctggagatggccatcgcctactggaacctggtgctgaacggcagattcaagttcctggacctgtggaacaagttcctgctggagcaccacaagagaagcatccccaaggacacctggaacctgctgctggacttcagcaccatgatcgccgacgacatgagcaactacgacgaggagggcgcctggcccgtgctgatcgacgacttcgtggagttcgccagaccccagatcgccggcaccaagagcaccaccgtgtag

SEQ ID NO: 204986 - protein, 210 aa, Artificial Sequence
  derived and/or modified sequence
MDNCLAAAALNGVDRRSLQRSARLALEVLERAKRRAVDWHALERPKGCMGVLAREAPHLEKQPAAGPQRVLPGEREERPPTLSASFRTMAEFMDYTSSQCGKYYSSVPEEGGATHVYRYHRGESKLHMCLDIGNGQRKDRKKTSLGPGGSYQISEHAPEASQPAENISKDLYIEVYPGTYSVTVGSNDLTKKTHVVAVDSGQSVDLVFPV

SEQ ID NO: 204987 - DNA, 633 bp, Artificial Sequence
  derived and/or modified sequence
atggacaactgccttgctgctgcggctctgaatggagttgaccggagatctttgcagcgctcagcccgcctcgcccttgaggtgttggagagagccaaaaggcgagcagtggactggcacgcactcgagcgtcctaaggggtgtatgggagtcctggcacgggaagcaccacatctggagaagcagccagcagccggccctcagcgagtgctgcccggggagagggaagagaggccaccgacattaagcgccagtttcagaacgatggccgagttcatggattacacctcatcccagtgtggaaaatactattcgtccgtccccgaggagggaggcgccacacacgtatataggtatcatcggggggagagtaaattgcatatgtgccttgatattggcaacggccagcgcaaagatcggaagaagacatccctcggtcctggaggttcttaccagatatctgagcatgccccggaggcaagtcagcccgccgagaatatttctaaggatttgtacatagaagtgtatccggggacctactctgtaacagtggggtctaacgatctgaccaagaagactcacgtggtggccgtcgactccggacagagcgtggatttagtctttccagtctag

SEQ ID NO: 204988 - DNA, 633 bp, Artificial Sequence
  derived and/or modified sequence
atggataactgcctcgcagctgcagccctgaacggcgtggatcgtcgtagtcttcagcggtctgcacgtctcgctttagaggtccttgaaagagctaaacggcgagctgtcgactggcacgccctggaaaggccaaagggatgtatgggggtactcgcccgagaagcaccacacctggagaaacaacctgcagctggaccccagagggtgttgccaggcgaacgcgaggagagaccacctacattatcagcctctttcagaacgatggcggagtttatggattataccagcagtcaatgcggcaagtactactcatcggtacccgaagaaggcggcgctacccacgtatacagataccataggggggaatccaagttgcatatgtgtttggacatcggaaatggtcagcgcaaagataggaaaaagacttcgctaggtccggggggttcctaccagattagtgagcatgcaccagaggcctctcagccagctgagaatatcagcaaagatctttacatagaagtgtacccaggaacttacagcgttaccgtgggctcaaacgatctgaccaagaaaacccatgtggttgcggtcgattctggacagagcgtggacttggtgttcccggtgtag

SEQ ID NO: 204989 - DNA, 633 bp, Artificial Sequence
  derived and/or modified sequence
atggacaactgcctggccgccgccgccctgaatggagtggacagaagaagcctgcagaggtctgcccggctggccctggaggtgctggagcgggccaagagaagagctgtggactggcacgccctggagcggcccaagggctgcatgggcgtgctggcccgggaggccccccacctggagaagcagcctgctgctggcccccagagggtgctgcccggggagcgggaggagaggcctcccaccctgagcgccagcttccgcaccatggccgagttcatggactacaccagcagccagtgtgggaagtactacagctctgtgcctgaggagggcggggccacccacgtgtaccgctaccacagaggagagagcaagctgcacatgtgcctggacattggaaatggccagaggaaggacaggaagaagaccagcctgggccctgggggcagctaccagatcagcgagcacgcccctgaggccagccagcctgctgagaacatcagcaaggacctgtacatcgaggtgtacccaggcacctacagcgtgacagtgggcagcaatgacctgaccaagaagacccacgtggtggccgtggacagcggccagagcgtggacctggtgtttcctgtgtag

SEQ ID NO: 204990 - DNA, 633 bp, Artificial Sequence
  derived and/or modified sequence
atggacaactgcctggccgccgccgccctgaacggcgtggaccggcggagcttgcagcggtccgcacgcctggctcttgaggtgctggagagggccaaaagaagggcagtggactggcatgccctcgagcgccctaaagggtgtatgggagtcttggctcgagaagcaccccacctcgaaaaacagccagcagcaggccctcagcgcgttctgccaggcgaaagagaggagaggcctcctacactatcagcatctttccgaaccatggctgagtttatggactacacctccagccagtgtgggaagtattacagctcagtgcccgaagaggggggagcaacgcatgtctacagataccaccggggcgaatccaagctacacatgtgcttggacatcggcaatggacaacgtaaggatcgtaagaaaacatccctggggcctggggggagctatcaaatttcagagcacgctccagaggcctctcagcccgccgagaacatcagcaaagatctctatatcgaggtatatcccggcacctacagtgttaccgtggggtccaacgatttgactaaaaaaacccacgtcgttgcagtggactcaggccagagcgttgatctggtgttcccagtgtag

SEQ ID NO: 204991 - DNA, 633 bp, Artificial Sequence
  derived and/or modified sequence
atggacaactgcctggccgccgccgccctgaacggcgtggaccggcgtagcttacaacgtagcgctagactcgctctcgaggtgttagagagggccaagcgccgtgcagtggactggcatgccttagagcgaccaaagggatgtatgggcgtcctggcacgagaggcgccgcacttggaaaaacagccagctgcgggaccacagcgcgtccttccaggcgagcgggaggagcgcccgccaactctatccgcctcattcagaactatggctgagttcatggactataccagcagccagtgtggcaagtactactcttcagttcctgaggagggaggtgccacccatgtgtataggtaccaccgcggggagagtaagttgcacatgtgtctagatatcgggaatgggcagaggaaggaccgcaaaaaaaccagtctgggccctggggggtcttatcagatttcggagcacgctccagaagcttcccagcctgccgagaacatctcaaaagacttgtacattgaagtgtaccctgggacctatagtgttactgtaggcagcaacgacctgaccaaaaaaacccatgttgtggctgttgatagtggacaaagcgtggacctggtgtttcctgtttag

SEQ ID NO: 204992 - DNA, 633 bp, Artificial Sequence
  derived and/or modified sequence
atggacaattgtcttgcagctgcagccttaaatggtgtggaccgtcggtcactgcagaggtcagccaggctggccttagaggttcttgaacgggcaaaaaggcgtgctgtggactggcacgccctggagagaccaaagggatgcatgggtgtgctggctagggaggcaccccaccttgagaagcaaccggcagctggaccccagcgcgtgctgccaggtgaacgcgaggagagacccccaaccctgtcagcctctttccgcaccatggccgagttcatggattacacctcgtcacagtgcggaaagtactattcgtctgtcccagaagaagggggtgcaacgcatgtttaccgctatcaccgtggagagagcaaactccatatgtgcttggacattggcaacgggcagcggaaagacagaaagaaaacatcactgggacctggcggatcgtaccagatttcggaacatgcgccagaagctagccagccagctgagaatataagtaaggacctttacatcgaagtttatcctggaacttattctgttactgttggttcaaatgatctcacgaagaaaacgcacgtggttgccgttgactccggacaatcagttgacttggtatttccagtttag

SEQ ID NO: 204993 - DNA, 633 bp, Artificial Sequence
  derived and/or modified sequence
atggataactgtctggcggctgctgccctcaacggggtggatagacgctcactgcagaggtccgcaaggctggccttagaagtgctggagagggcaaagagaagggctgttgactggcatgcgctggagcggcctaagggatgcatgggagtcctggctcgagaagcgcctcacctggagaaacaaccggctgctggccctcagagggtcctgcctggtgagagggaggaacgccctccaacattaagtgcctcctttcgtaccatggcagagttcatggactatacatcctcacagtgcgggaagtactacagctctgtgcccgaggagggcggagcaacccatgtctatcggtaccataggggggaaagcaaattgcatatgtgcctagatattggtaatggccagcgcaaagacagaaagaagaccagcctgggcccaggaggatcctaccaaataagcgagcacgcacccgaagcctcccaacctgccgagaatatatccaaggacctttatatcgaagtctatcccggtacgtatagcgtcacagtggggagtaacgacttgaccaaaaaaacacacgtggtcgcagtggattccggccagagcgtggacctggtgtttcccgtatag

SEQ ID NO: 204994 - DNA, 1327 bp, Artificial Sequence
  derived and/or modified sequence
ctgcgccggcgccgccgggagcgctaggcctggtccctcttcctagaatagcgttgcgcgcatgcgccttgacgagtgagccggggagccatggacaactgtttggcggccgcagcgctgaatggggtggaccgacgttccctgcagcgttcagcaaggctggctctagaagtgctggagagggccaagaggagggcggtggactggcatgccctggagcgtcccaaaggctgcatgggggtccttgcccgggaggcgccccacctagagaaacagccggcagccggcccgcagcgcgttctcccgggagagagagaagagagacccccaacccttagtgcttccttcagaacaatggctgaattcatggactatacttcaagtcagtgtgggaaatattattcatctgtgccagaggaaggaggggcaacccatgtctatcgttatcacagaggcgagtcgaagctgcacatgtgcttggacatagggaatggtcagagaaaagacagaaaaaagacatcccttggtcctggaggcagctatcaaatatcagagcatgctccagaggcatcccagcctgctgagaacatctctaaggacctctacatagaagtatatccagggacctattctgtcactgtgggctcaaatgacttaaccaagaagactcatgtggtagcagttgattctggacaaagcgtggacctggtcttccctgtgtgatgttgaccatcactgccatcacatcacctttttttaagtagtaagaataaagccactgtatgattctcttaatagctatacattaatcctgtttttagtgctgactgggtcagccttccgggaactggagtctgtctctttcagtgcttttttgtttgtttggttggtttttttttgagacagtctcactctgttgcccaggctggagtgcagtggcgtgatctcggctcactgcaagttccgcctcccgggttcacaccattctcctgcctcagcctcccgagtagctggcactacaggcacccgccaccatgcccggctattttttttgtatttttagtagagacggggtttcaccatgttggccaggatggtctcgatctcttgacctcgtgatccacccaccttggcctcccaaagtgttgggattacaggcgtgagccaccgcgcccggcctcagtgccttttttaacttgagggtgtagaggtcctccacgcttgtttgcctgaaagtaatataatgatgctgtctgaacaggttttactgcttgctttccaagtaaaggttaattatgataataaagagatttggaaatgaagagaa

SEQ ID NO: 204995 - DNA, 1022 bp, Artificial Sequence
  derived and/or modified sequence
gggagccatggacaactgtttggcggccgcagcgctgaatggggtggaccgacgttccctgcagcgttcagcaaggctggctctagaagtgctggagagggccaagaggagggcggtggactggcatgccctggagcgtcccaaaggctgcatgggggtccttgcccgggaggcgccccacctagagaaacagccggcagccggcccgcagcgcgttctcccgggagagagagaagagagacccccaacccttagtgcttccttcagaacaatggctgaattcatggactatacttcaagtcagtgtgggaaatattattcatctgtgccagaggaaggaggggcaacccatgtctatcgttatcacagaggcgagtcgaagctgcacatgtgcttggacatagggaatggtcagagaaaagacagaaaaaagacatcccttggtcctggaggcagctatcaaatatcagagcatgctccagaggcatcccagcctgctgagaacatctctaaggacctctacatagaagtatatccagggacctattctgtcactgtgggctcaaatgacttaaccaagaagactcatgtggtagcagttgattctggacaaagcgtggacctggtcttccctgtgtgatgttgaccatcactgccatcacatcacctttttttaagtagtaagaataaagccactgtatgattctcttaatagctatacattaatcctgtttttagtgctgactgggtcagccttccgggaactggagtctgtctctttcagtgcttttttgtttgtttggttggtttttttttgagacagtctcactctgttgcccaggctggagtgcagtggcgtgatctcggctcactgcaagttccgcctcccgggttcacaccattctcctgcctcagcctcccgagtagctggcactacaggcacccgccaccatgcccggctattttttttgtatttttagtagagacggggtttcaccatgttggccaggatggtctcgatc

SEQ ID NO: 204996 - DNA, 633 bp, Artificial Sequence
  derived and/or modified sequence
atggacaactgcctggccgccgccgccctgaacggcgtggacagaagaagcctgcagagaagcgccagactggccctggaggtgctggagagagccaagagaagagccgtggactggcacgccctggagagacccaagggctgcatgggcgtgctggccagagaggccccccacctggagaagcagcccgccgccggcccccagagagtgctgcccggcgagagagaggagagaccccccaccctgagcgccagcttcagaaccatggccgagttcatggactacaccagcagccagtgcggcaagtactacagcagcgtgcccgaggagggcggcgccacccacgtgtacagataccacagaggcgagagcaagctgcacatgtgcctggacatcggcaacggccagagaaaggacagaaagaagaccagcctgggccccggcggcagctaccagatcagcgagcacgcccccgaggccagccagcccgccgagaacatcagcaaggacctgtacatcgaggtgtaccccggcacctacagcgtgaccgtgggcagcaacgacctgaccaagaagacccacgtggtggccgtggacagcggccagagcgtggacctggtgttccccgtgtag

SEQ ID NO: 204997 - protein, 223 aa, Artificial Sequence
  derived and/or modified sequence
MKLHYVAVLTLAILMFLTWLPESLSCNKALCASDVSKCLIQELCQCRPGEGNCSCCKECMLCLGALWDECCDCVGMCNPRNYSDTPPTSKSTVEELHEPIPSLFRALTEGDTQLNWNIVSFPVAEELSHHENLVSFLETVNQPHHQNVSVPSNNVHAPYSSDKEHMCTVVYFDDCMSIHQCKISCESMGASKYRWFHNACCECIGPECIDYGSKTVKCMNCMF

SEQ ID NO: 204998 - DNA, 672 bp, Artificial Sequence
  derived and/or modified sequence
atgaagctgcactacgtggccgtgctgaccctggccatcctgatgttcctgacctggctgcccgagagcctgagctgcaacaaggccctgtgcgccagcgacgtgagcaagtgcctgatccaggagctgtgccagtgcagacccggcgagggcaactgcagctgctgcaaggagtgcatgctgtgcctgggcgccctgtgggacgagtgctgcgactgcgtgggcatgtgcaaccccagaaactacagcgacaccccccccaccagcaagagcaccgtggaggagctgcacgagcccatccccagcctgttcagagccctgaccgagggcgacacccagctgaactggaacatcgtgagcttccccgtggccgaggagctgagccaccacgagaacctggtgagcttcctggagaccgtgaaccagccccaccaccagaacgtgagcgtgcccagcaacaacgtgcacgccccctacagcagcgacaaggagcacatgtgcaccgtggtgtacttcgacgactgcatgagcatccaccagtgcaagatcagctgcgagagcatgggcgccagcaagtacagatggttccacaacgcctgctgcgagtgcatcggccccgagtgcatcgactacggcagcaagaccgtgaagtgcatgaactgcatgttctag

SEQ ID NO: 204999 - DNA, 672 bp, Artificial Sequence
  derived and/or modified sequence
atgaagctacattacgtggctgtactcacactggccatcctcatgttcctgacttggctgcccgaaagcttgtcttgtaataaagctctgtgcgcaagcgatgtgtccaagtgcctgatccaggagctgtgtcagtgcaggcctggtgagggaaattgctcttgttgcaaagagtgtatgctctgtctcggtgctctctgggatgagtgctgcgattgcgtcggcatgtgcaacccacgcaactattcagatacaccgccaactagcaaatccacggtcgaggaactgcatgaacccatcccatcattgtttagggctctaacggaaggcgatacgcagttaaattggaacatcgtctcctttcccgttgcagaagaactgtctcaccatgagaacctggtatccttcctggaaacggtaaaccagccccaccaccagaacgttagcgtcccaagtaacaatgtccatgccccttatagctccgacaaggaacatatgtgtaccgtggtatacttcgatgactgtatgtctatccatcagtgtaaaatctcttgcgaatctatgggtgcttcaaagtatcggtggttccacaatgcatgctgcgaatgcatcggacccgagtgcattgattatggcagcaagaccgtcaaatgcatgaactgcatgttctag

SEQ ID NO: 205000 - DNA, 672 bp, Artificial Sequence
  derived and/or modified sequence
atgaagctgcactacgtggccgtgctgaccctggccatcctgatgttcctgacctggctgcctgagagcctgagctgcaacaaggccctgtgtgccagtgatgtgtccaaatgtctcatccaggagctgtgccagtgcaggcctggagagggcaactgcagctgctgcaaggagtgcatgctgtgcctgggcgccctgtgggatgagtgctgtgactgtgtgggcatgtgcaaccccaggaactacagcgacaccccacccaccagcaagagcacagtggaggagctgcacgagcccatccccagcctcttccgggccctgacagaaggagacacccagctgaactggaacatcgtgtccttccctgtggccgaggagctgagccaccacgagaacctggtgtccttcctggagaccgtgaaccagccccaccaccagaatgtgtctgtgcccagcaacaacgtgcacgccccctacagcagtgacaaggagcacatgtgcaccgtggtgtactttgatgactgcatgagcatccaccagtgcaagatcagctgtgagagcatgggcgccagcaagtaccgctggttccacaatgcctgctgtgagtgcatcggcccagaatgtattgattatggcagcaagacagtgaagtgcatgaactgcatgttttag

SEQ ID NO: 205001 - DNA, 672 bp, Artificial Sequence
  derived and/or modified sequence
atgaagctgcactacgtggccgtgctgaccctggccatcctgatgttccttacatggctgcccgagagcctttcctgcaataaagcactgtgcgcctccgacgttagcaaatgtttgattcaagagctgtgtcagtgtcgccctggtgagggcaactgctcttgctgcaaggagtgcatgctctgcctaggcgctctgtgggatgaatgctgtgattgcgttggcatgtgcaatccccggaattacagcgacacaccccccacaagcaaaagtacagtggaggagctgcatgaacccatcccctcactgttccgagctctgacagagggtgatactcagctgaactggaacatagtatcctttccagtcgccgaagaactgtctcaccacgagaacctggtcagctttctggagaccgtcaaccagccccaccaccaaaacgtcagtgttcctagcaacaacgtgcacgccccctactccagtgacaaggagcacatgtgtacagtggtgtatttcgacgactgcatgagcatccaccagtgcaagataagctgcgagtctatgggtgcgtctaaatataggtggttccacaacgcatgctgtgagtgcataggcccagaatgtattgactacggctcaaaaacggtgaaatgcatgaactgtatgttttag

SEQ ID NO: 205002 - DNA, 672 bp, Artificial Sequence
  derived and/or modified sequence
atgaagctccactacgtggcggtgctgactctggccatcctgatgtttctgacttggctaccagagtctttgagctgtaacaaggccctgtgtgcttccgacgtgtctaagtgtttgatccaggagctgtgccagtgccggccaggggaagggaattgctcctgctgtaaagaatgcatgctctgtctaggtgcactgtgggatgagtgctgcgattgcgttggcatgtgcaatcctcgcaactactctgacactcctcctacgtccaagagtaccgtggaggaattgcacgaacctattccaagcctgttccgcgcacttaccgaaggggacactcagctgaactggaatattgtgagttttccggtggctgaggagctcagccaccacgaaaacttggtgagcttcctcgagactgttaatcagccgcatcatcagaacgtgtctgttccatccaacaatgtgcatgcgccttattccagcgataaggagcacatgtgcacggtagtgtatttcgatgactgcatgtctattcaccagtgtaagatcagctgcgagtctatgggcgctagcaaatatcggtggttccacaatgcttgttgcgaatgtatcgggccagagtgtatcgactacggttcaaagaccgttaagtgtatgaactgcatgttctag

SEQ ID NO: 205003 - DNA, 3756 bp, Artificial Sequence
  derived and/or modified sequence
ctctttaaggtgcccgaggctcgcgggcgctgcgctgaggggacggcgggaggcgcggcctggcctcgcactcaaagccgccgcagcgcgccccgggctcggccgacccggcggggatctaggggtgggcgacttcgcgggaccgtggcgcatgtttcctgggagttactgatcatcttctttgaagaaacatgaagttacactatgttgctgtgcttactctagccatcctgatgttcctgacatggcttccagaatcactgagctgtaacaaagcactctgtgctagtgatgtgagcaaatgcctcattcaggagctctgccagtgccggccgggagaaggcaattgctcctgctgtaaggagtgcatgctgtgtcttggggccctttgggacgagtgctgtgactgtgttggtatgtgtaatcctcgaaattatagtgacacacctccaacttcaaagagcacagtggaggagctgcatgaaccgatcccttctctcttccgggcactcacagaaggagatactcagttgaattggaacatcgtttctttccctgttgcagaagaactttcacatcatgagaatctggtttcatttttagaaactgtgaaccagccacaccaccagaatgtgtctgtccccagcaataatgttcacgcgccttattccagtgacaaagaacacatgtgtactgtggtttattttgatgactgcatgtccatacatcagtgtaaaatatcctgtgagtccatgggagcatccaaatatcgctggtttcataatgcctgctgcgagtgcattggtccagaatgtattgactatggtagtaaaactgtcaaatgtatgaactgcatgttttaaagaagacaaatgcaaaccaaagcaacttagtaaaataataggtataaaaagttattctgtaagtctgttggttgtatcttgtatcagaatcccagtaagttaagttgtaaagactttggaataagtttcttttaaaaatatgacatagccagtgatgtgtttaattatataactgttcttactgattttattgccccctagcaataagccctttcctttgaatacatgtacaactttggtcatatgagaagcaggtgcgcagagaattccttgaaagatctgaggtttttaacatgaagtctgacgtggttttcctctagcattccaaaaggtttttgctttgaaagtgttagcagaagcatgttgatgtgaattatgatttcttcatgtgctactgttagcacactgagtttttatagttgcacatcattcctcattgtgccttgttttatccattttataaatagagtagatatttgatataccactctgataactcatataaaaatatcatcataaaaagcttaatttcatcccttttatgttggttttaaaaggtaaatgcttaccatattttataattgagaactcttacatagtagaatccattctataatacatgtgttgacaaagctttagagaaagtttcctattctcttccatttcccctgcccaaagtgctgacataggcagtgatgaagaatctttaccaagattttcagggtgtacctatgaaattgctttaaatgcactgctggtgtaaataattagcaagcaaagcgtttctgtgacttcaggtaccagcttaaagagcactagggatggggaacgaatgccaaatcagactccacctagagcaccaggaaacagcttgtaccctggtagggaaatggtgttgctgaaaggggaggctgagccagtgcgagactgaacttgtgcagccttagccaagacaaagcagtgtttttcagcagacggctgatgggacaggaattgaagaagagaattgactcgtatgaacaggacagggtgaaaatgctgggaattattatgggaaacaaaactatctatgttcatattttgtaatatttcatttgttaagtttatatctggatataatgttctttttaaacaagtataatcatatcgtcggaggttaagattatgaaattttagaatctctattcaagatgatgttcactccaaatacactacagaatttagtcaacattttatataatgtttcaataaatgtttctttcaataaagatactatgtgcccttcatagtaataaaatctcaatcttaaagcatgaatctaaaacataaatatttatattacagactcaattttacaaaattactaattgctctagtgcatatttgaactacaagcaactttttaggaatacctctttatacgtctacatattttagtatataaaaatagataatgctcttggacacattttgtattattcatgatctgaatagtagttagttaaaagatcatttgtaatattatgatcaactgttataaattaaggtcttaataccttttctgctctttcaaataactctaatgaatattcaagatattttagccttttaaaaagttgagatttagctcatggatatattttttggtagggaaacattagggtctccttttcttccttttacctagaatgcctcatttaaaagtgccttgaaaacatttagctccccttcttcatgagcatctgtagagctgaaagtattctggaactttagacagaaagctgaaaggaatctgcagtctcctgctgcagttcaactctgctgtttttcagtcatttcctactgtgagtggagtgatgtttgtgtgtgtgttggcaacatgcctaatgttttcttaatgatgacaacaaatattttaaaactgcatttatcattttttaggtcttcattaaattttaaaatgtaatatctgtttcccaccccctacattaggaggataatttcttaaaccacattgttttaattgatttttcttatcttgatttctttcattagaaactatccctaaatgtaaagatcttttgccttcaaatttggcttattttttctgatttatgagggtttgaaagaaagaattcacctaaaagattccatttccagttttataatgtatttcaggttctgaataacaatatttttccaaattgaaagtaaatattccagaagttgatagcctggttaaaagttagatcctctattaccattctaagcacattcacttctatattgaagttttggtaaaaattcttttttcttttttaataaaaaattaggttattactttttttataaccagatttttaaagcactaggttttaaatcagtgggtatcataaaagccatatataaaagatcctttcttatagtaagacttgtgcttgttagcaggtttttctgttagtttttcccccataacatttaattattactaaaattgtatttacaatagtggtgccaaatcaaatggtaatttaaataaaatctattctgtgtttatgtagggtggtataaaaaagaggtcttcatttagacatgtgatttctaaaattccagaaagcaaaattgataagatgttagaaatttggaccattatttataatcagggtagcattaaaatggagaaaagaaagttttctgaaaaaatgcagtaaatataagccacatttctaaagtttatttttatgaaagcttcttttaagattttgaaatctattctgcattcccaagagtttatgtttattgtattttatatgatctacaacatataaaattgtgtatttttctttggttgtccctattaacaaaaaagtattttaataaaaaattgaaatga

SEQ ID NO: 205004 - protein, 389 aa, Artificial Sequence
  derived and/or modified sequence
MELSAVGERVFAAEALLKRRIRKGRMEYLVKWKGWSQKYSTWEPEENILDARLLAAFEEREREMELYGPKKRGPKPKTFLLKAQAKAKAKTYEFRSDSARGIRIPYPGRSPQDLASTSRAREGLRNMGLSPPASSTSTSSTCRAEAPRDRDRDRDRDRERDRERERERERERERERERERGTSRVDDKPSSPGDSSKKRGPKPRKELPDPSQRPLGEPSAGLGEYLKGRKLDDTPSGAGKFPAGHSVIQLARRQDSDLVQCGVTSPSSAEATGKLAVDTFPARVIKHRAAFLEAKGQGALDPNGTRVRHGSGPPSSGGGLYRDMGAQGGRPSLIARIPVARILGDPEEESWSPSLTNLEKVVVTDVTSNFLTVTIKESNTDQGFFKEKR

SEQ ID NO: 205005 - DNA, 1170 bp, Artificial Sequence
  derived and/or modified sequence
atggaactgtccgcagttggagagagagtttttgctgccgaagcactcctgaagcggcgcattagaaagggtcggatggagtatctcgtcaaatggaaagggtggtcacaaaaatacagcacatgggaacctgaagaaaatatcttagacgccagacttctggcggcatttgaagagagagaaagagagatggagctgtatggcccaaagaagagaggacctaagcccaaaacctttctccttaaggcgcaggcaaaagccaaggcaaaaacctatgagttccgaagcgattcagcacgtggaattaggattccgtaccccggcaggtcacctcaagatctagcaagcacttcgagagcgcgggaaggcttgcgcaatatggggctttcaccacccgccagcagcaccagtacctcctcaacttgtagagctgaagcaccaagggacagggaccgggatcgggatagagacagggagagggatcgcgaacgcgaacgcgagagggaacgggaaagggagagagagcgcgaacgcgaacgaggcacaagccgtgtagatgataagccttcatccccaggtgattcaagtaaaaagcgggggcccaagcctagaaaggagctgccggacccatcccagaggccccttggcgaacccagcgctgggctaggagaatacttgaagggacgaaagctggatgacacccctagcggcgcaggcaagttccccgccggccattcggtcattcagttagccaggcgacaggacagcgaccttgttcagtgcggcgtaacaagcccctcttccgccgaggccacaggaaaactggctgtcgacacatttcccgcacgcgtcatcaagcaccgtgccgcatttctcgaggccaaaggccagggagcacttgaccccaacggaactagagtcagacatgggagtgggccaccgtcttccggcggtggcctctatcgggatatgggcgcacaagggggccgaccctctttaattgccagaattcccgttgcccgcatcctcggtgatccggaggaagaatcctggagccctagcctgaccaatctggaaaaggttgtggtcaccgacgtaacctctaacttcctgacggtgacaataaaggagtctaatacagatcagggattctttaaggagaaaaggtag

SEQ ID NO: 205006 - DNA, 1170 bp, Artificial Sequence
  derived and/or modified sequence
atggagctgtctgctgtgggggagcgggtgtttgctgctgaggccctgctgaagaggcgcatcagaaaaggaaggatggagtacctggtgaagtggaagggctggagccagaagtacagcacctgggagcctgaggagaacatcctggatgcccggctgctggccgcctttgaggagcgggagcgggagatggagctgtatggccccaagaagaggggccccaagcccaagaccttcctgctgaaggcccaggccaaggccaaggccaagacctatgagttcagaagtgacagcgcccggggcatccgcatcccctacccaggccgcagcccccaggacctggccagcaccagccgggcccgggagggcctgaggaacatgggcctgagccccccagccagcagcaccagcaccagcagcacctgcagagctgaggccccccgggaccgggaccgggaccgggaccgggaccgggagcgggaccgggagcgggagcgggagcgggagcgggagcgggagcgggagcgggagcgggagcggggcaccagccgggtggatgacaagcccagcagccctggggacagcagcaagaagaggggccccaagcccaggaaggagctgcctgaccccagccagaggcccctgggggagcccagcgctggcctgggggagtacctgaagggcaggaagctggatgacacccccagcggggccggcaagtttcctgctggccacagcgtcatccagctggcccggcggcaggacagcgacctggtgcagtgtggggtgaccagccccagcagcgctgaggccaccgggaagctggccgtggacaccttccctgcccgggtcatcaagcacagagctgccttcctggaggccaagggccagggcgccctggaccccaacggcaccagggtgagacatggcagcggcccccccagcagcggcggcggcctgtacagagacatgggcgcccagggcggccggcccagcctcatcgcccgcatccctgtggcccgcatcctgggggaccctgaggaggagagctggagccccagcctgaccaacctggagaaggtggtggtgacagatgtgaccagcaacttcctgactgtgaccatcaaggagagcaacacagaccagggcttcttcaaggagaagaggtag

SEQ ID NO: 205007 - DNA, 1170 bp, Artificial Sequence
  derived and/or modified sequence
atggagctgagcgccgtgggcgagcgggtgttcgccgccgaggccctccttaagagacgcatacgcaaaggcaggatggagtacctggtgaagtggaaaggatggagtcaaaaatactccacgtgggaaccggaagagaacatattggatgcaaggctgttggcagccttcgaggagagggagagagagatggagctctacggaccaaagaagagggggccaaagccaaaaacatttcttcttaaggcccaggcaaaagcaaaggccaagacgtacgagtttagaagcgattctgcgcgcggaataaggattccataccccggccgcagcccccaggatctcgcctccacctctcgagcacgagaggggctgagaaacatgggacttagcccacccgcctcctctacgtcaacaagcagcacatgccgtgccgaagctcctcgcgaccgggacagggacagagatcgagaccgagagcgggatcgagagagagaacgggaaagagagcgcgaacgggagcgggaacgagagagagaacgcgggacctctagagtcgacgacaagccctccagcccgggtgacagctccaaaaagcgcggaccgaagccgcgcaaggagttacccgatccatctcagcgcccgctcggggaaccatctgccggcctcggagaatacctaaaaggccgaaaactcgacgacacaccatcgggcgcgggcaaattcccagctggtcattccgtgattcagctggccaggcgccaggacagcgacctcgtgcagtgcggggtcacctccccaagtagtgccgaggccacaggcaagctggcggtggacacctttcccgccagagttattaaacacagagccgcatttctggaagcgaaggggcaaggagctctcgaccccaatgggactagggttagacacggctccggcccaccaagctctggcggtggactctatcgggatatgggtgcccaggggggcagacctagcctcatcgcccggatccctgtggccagaatactgggtgatcctgaggaggagtcctggagccctagtctcaccaatcttgaaaaggtggtggttacagacgtgactagcaactttcttacagtgactataaaggagtctaatactgatcagggcttcttcaaggagaaaaggtag

SEQ ID NO: 205008 - DNA, 1170 bp, Artificial Sequence
  derived and/or modified sequence
atggaactttctgccgtgggagagagggtgtttgcagccgaagccctgctgaaacggagaatccgcaaaggaaggatggaatacctggtcaagtggaaagggtggtcccagaagtactcaacttgggagcctgaggagaatatccttgatgccagacttctggctgctttcgaggaacgggagcgggaaatggagttgtacgggccaaagaagcgtggacccaaaccaaaaactttcctcctgaaggctcaggctaaagcgaaggctaaaacctacgaatttcgatccgatagcgctcggggtattaggattccctatccaggaaggagccctcaggacctggcaagtaccagtagggccagggagggactccgcaacatgggcctgtctcctcctgcatcctcaacatcaactagcagcacctgtcgcgctgaggcaccacgagatcgggacagggatcgtgatcgtgacagagagagggatcgtgagcgcgaaagagagcgcgagagggaacgcgagcgggagagagagcgagagcgtggtacgtcccgggttgatgataaaccctcaagtccaggcgacagctctaagaagaggggtccaaaacccaggaaggaattgccagatcccagtcaaagacccttaggcgagccctctgccggtctgggagaatatttgaagggtcgcaagctcgatgatactcctagtggggctggtaagttccctgccggtcattccgtgatccagctcgccagacgccaggatagcgacctagtgcagtgtggtgtaacatccccctccagtgcggaagcaaccggtaagttggcagtggatacattcccggctcgagtcattaagcaccgagctgcgtttctggaagctaaaggccagggagccctcgatccgaacggaacaagggtcaggcatggaagcggaccccctagctcagggggtggcctgtatcgggacatgggggcacaggggggaagaccctctcttatcgcacgtatcccagtggccagaattcttggcgatccggaagaggagagttggtccccatccctgacaaacttggagaaagtggtcgttactgatgtcacctccaacttcctgacagtgacaatcaaagagtccaacaccgaccagggcttcttcaaggagaaaaggtag

SEQ ID NO: 205009 - DNA, 3791 bp, Artificial Sequence
  derived and/or modified sequence
gagagcgccgggagggggaggagaactgacgtcagcgggagagtattatggtctgtcgtgcgctggctgctgcttttctgctcctggaagcggccaaggggggaagcggcgagtcaacatggagctttcagcggtgggggagcgggtgttcgcggccgaagccctcctgaagcggcgcatacggaaaggacgcatggaatacctcgtgaaatggaagggatggtcgcagaagtacagcacatgggaaccggaggaaaacatcctggatgctcgcttgctcgcagcctttgaggaaagggaaagagagatggagctctatggccccaaaaagcgtggacccaagcccaaaaccttcctcctcaaagcgcaggccaaggcaaaggccaaaacttacgagtttcgaagtgactcagccaggggcatccggatcccctaccctggccgctcgccccaggacctggcctccacttcccgggcccgggagggccttcgaaacatgggtttgtccccgccagcgagcagcaccagcaccagcagcacctgccgcgcagaggcccctcgggaccgggaccgagaccgggatagggaccgggagcgggatcgagaaagggagagggagcgagagagggagcgggaacgtgagagggaacgagagcggggtaccagcagagtggatgacaagcccagctcaccgggggacagctcgaagaagcgaggccccaagccccggaaggagctcccggacccctcacagaggcccttaggcgaacccagcgccggcctcggagagtacctcaagggcaggaagctggacgacaccccttccggggcaggaaagtttccagccggccacagtgtgatccagctggcccgaagacaggactcggacctggtgcagtgtggtgtgaccagccctagctcagctgaggccacgggcaaactggctgtggacaccttcccggccagggtgataaagcacagggctgccttcctggaggccaaaggccagggtgccctagatcccaatggcacccgggtccgacatggctcaggcccccccagctctggggggggcctgtaccgggacatgggggcccaggggggaaggccctccctcatcgccaggatccctgtggccagaatcctgggggacccggaggaagagtcctggagcccctccctgactaacctggagaaggtggtggtcacggacgtgacctcaaactttttgaccgtcaccattaaggaaagtaacacggaccaaggcttttttaaagagaaaagatgaatgctgggtgggtgtgtccaggaggagagcaggggagagagtgagcgtgagcttggcatagtgatttttatttctgggtgggatgtggccttttggctggtcccgtccctgatgtcacccccaccccaccagcccctttcatccctccttcctccccctcagtttttgttggaaagattatctctagagttatattttctattagatgtaaatatgttatttaagaaaaatatctaaatatatatatttcaactcgaagttgttttatttaaaggagagagactctcattgtgctttagttggggcagcccgaatgagctggggcaggaggggcccccttgccccagagctctagggaagttgggccctgggtacaggtttctgagagtgtctggaggggcttggcctgcccacctcacccctcctcccttctcccacagcccaatgccagactcctggcaccaaggcccggcccagatttgctctctcttcccattggccaggcaggccaacaaaaggttggctccccaatcagaaaaaagggggggtggggtcagtctgttttccttttttctatttttttttttttaaggtaaagaagtctattagggaaaaaagtattaacttgaataagcttttcgtgtgtgatgttgaaggttaaaacgtccccagcaggcagggacaggaggtttctccccaggaccacaccaggaaatgcactttagggaggggtgtgtgtgtggtacacgcagatcgtgtgtatgtcatgtggataaaatctccccgttccctcgttcctttccttactccgcagaaagaaaagaaatccagcgaatctgtttacattcccgaaatgccaggataaattgggaggattgcgtgtcagtgctgagagttcgagacagttgttttgcaagaaaagtgttggggtggacttttccttttcgcgtcctctagctttgccaggagaagagacggtggcccccacctcccaggaagagttggacaagcctccctgcctggggagggcgggccgccagctctgtggtggacacatggccagacaggcccaccctgcgggacccacggagggaggcgcggcggcgggcgctgctaggagcagtggcttcgcacccagggcctctccacggccaggcttggagtgtggctgaggaccacggctcggagctcggagctggggctagactcacccccgcggctccggccgggcacgggaaggaggggcgaggcggggttttcatccaagaatgcgcatcggaacttttgctttttccttttttttcccccgtccttcttaaaagcaaaagctataatttataggtcttttcgattcgcagtgttctctatttgaactcgacattcaaactccgccaaagggggagggaggagcgggagttgggagtggggacggccgcggcggggaaggccgtgcgaggcggcggggcctgggacgcccctgcccggcggacttgaccgctctgcgctccgaggacgcagaatgcgcgcccctcttttgactcaaaagcacaaatcagtcccctccactccacccccgtctcttggagcacggatcccgcagcctccctgccctccccgcccttaaagggccagcgaagatctaacttcccattgcttgttgagggaggggcgcgggggccctgcacgccagaggaagcacagactcggggggagcgaggcggggagtcgggggtgggggagcttcgcgtggggtggggggtgctgggagggaaccccagcctcgtcctccgcactcccggcttctcagcctctcctccagactttcttgcctttaaagagagaaaaggagggaaacggtgtactacatgattgtgtttgtttttgaatatcaaattgcgcctataaagagaagcccctggaatggggatttttatctactcacatttgtaaaactggtattttagactttgtataaagaagcgccgttgaccgagtgtatctatttaaatgtcgatgctattttcagatgaaacttcactgaaggggcatgtctgttacctagtggacgggactgggggatacgcgtcttcacctggccgccgccttcccttctctcccgcctgtcctttactcccacctccctcccttcctgggggctgactttgccccttcccttggaccttctttccagccagctctgtccctgccgcccctccgtcctgctgtttgtccgtggccgtgtgtgtatgtgtctccttctctcgctcttgcgacgctgacctggggggtgggtgggcaggggccgggggccacgtggctgggagtctgcaaccgcgcagggtgtgtgcgctgttgggtttatttaattctaagatttgtacaaatctccaatcgatctccgcctcagctcaagagtgaagcttcggtacctatcttctgcggtcgtgaatgtctgtatccaataccgctttttacgtgtttaaatatatactttgtaaataga

SEQ ID NO: 205010 - DNA, 1170 bp, Artificial Sequence
  derived and/or modified sequence
atggagctgagcgccgtgggcgagagagtgttcgccgccgaggccctgctgaagagaagaatcagaaagggcagaatggagtacctggtgaagtggaagggctggagccagaagtacagcacctgggagcccgaggagaacatcctggacgccagactgctggccgccttcgaggagagagagagagagatggagctgtacggccccaagaagagaggccccaagcccaagaccttcctgctgaaggcccaggccaaggccaaggccaagacctacgagttcagaagcgacagcgccagaggcatcagaatcccctaccccggcagaagcccccaggacctggccagcaccagcagagccagagagggcctgagaaacatgggcctgagcccccccgccagcagcaccagcaccagcagcacctgcagagccgaggcccccagagacagagacagagacagagacagagacagagagagagacagagagagagagagagagagagagagagagagagagagagagagagagagagagagaggcaccagcagagtggacgacaagcccagcagccccggcgacagcagcaagaagagaggccccaagcccagaaaggagctgcccgaccccagccagagacccctgggcgagcccagcgccggcctgggcgagtacctgaagggcagaaagctggacgacacccccagcggcgccggcaagttccccgccggccacagcgtgatccagctggccagaagacaggacagcgacctggtgcagtgcggcgtgaccagccccagcagcgccgaggccaccggcaagctggccgtggacaccttccccgccagagtgatcaagcacagagccgccttcctggaggccaagggccagggcgccctggaccccaacggcaccagagtgagacacggcagcggcccccccagcagcggcggcggcctgtacagagacatgggcgcccagggcggcagacccagcctgatcgccagaatccccgtggccagaatcctgggcgaccccgaggaggagagctggagccccagcctgaccaacctggagaaggtggtggtgaccgacgtgaccagcaacttcctgaccgtgaccatcaaggagagcaacaccgaccagggcttcttcaaggagaagagatag

SEQ ID NO: 205011 - protein, 748 aa, Artificial Sequence
  derived and/or modified sequence
MSSGGRFNFDDGGSYCGGWEDGKAHGHGVCTGPKGQGEYTGSWSHGFEVLGVYTWPSGNTYQGTWAQGKRHGIGLESKGKWVYKGEWTHGFKGRYGVRECAGNGAKYEGTWSNGLQDGYGTETYSDGGTYQGQWVGGMRQGYGVRQSVPYGMAAVIRSPLRTSINSLRSEHTNGTALHPDASPAVAGSPAVSRGGFVLVAHSDSEILKSKKKGLFRRSLLSGLKLRKSESKSSLASQRSKQSSFRSEAGMSTVSSTASDIHSTISLGEAEAELAVIEDDIDATTTETYVGEWKNDKRSGFGVSQRSDGLKYEGEWASNRRHGYGCMTFPDGTKEEGKYKQNILVGGKRKNLIPLRASKIREKVDRAVEAAERAATIAKQKAEIAASRTSHSRAKAEAALTAAQKAQEEARIARITAKEFSPSFQHRENGLEYQRPKRQTSCDDIEVLSTGTPLQQESPELYRKGTTPSDLTPDDSPLQSFPTSPAATPPPAPAARNKVAHFSRQVSVDEERGGDIQMLLEGRAGDCARSSWGEEQAGGSRGVRSGALRGGLLVDDFRTRGSGRKQPGNPKPRERRTESPPVFTWTSHHRASNHSPGGSRLLELQEEKLSNYRMEMKPLLRMETHPQKRRYSKGGACRGLGDDHRPEDRGFGVQRLRSKAQNKENFRPASSAEPAVQKLASLRLGGAEPRLLRWDLTFSPPQKSLPVALESDEENGDELKSSTGSAPILVVMVILLNIGVAILFINFFI

SEQ ID NO: 205012 - DNA, 2247 bp, Artificial Sequence
  derived and/or modified sequence
atgtcctcaggaggaagattcaacttcgacgacggagggtcttattgcgggggctgggaggacggcaaggcgcatggacacggtgtttgcactggtcccaagggccagggtgagtatactgggtcctggagccatggttttgaggtgctcggggtctacacatggccatctgggaacacctaccagggcacctgggcccagggcaagaggcatggtatcggcctggaatcaaagggcaaatgggtgtataaaggcgaatggactcatggcttcaaaggtcgctacggagtgcgtgagtgtgccggaaacggggccaagtatgagggcacatggtctaacggtctccaagacggatacgggaccgaaacctactccgatggcggtacttaccaaggacagtgggtaggaggcatgagacaaggctatggcgtccgccagtctgtgccatacggcatggcagccgtgatccgctcacctctgaggaccagtataaatagtctgcgatccgagcatactaacggcaccgctctgcatcccgatgcctccccggcggtcgcagggagcccagccgttagcagaggcgggtttgtgctagttgcacatagcgacagcgaaatcctaaagagtaaaaaaaagggcctttttagacgaagcttgctgagcgggttgaagctgcggaaaagtgaatccaaatccagcttggcctcccaaagaagcaagcagtcctcatttcgcagcgaggcaggcatgtctaccgtgagttcaaccgcaagtgatatccacagtaccatctctctgggcgaagccgaggcggagctggccgtgatagaggacgatatagatgcgacaactacagaaacctatgtcggtgagtggaagaatgacaagcggagcgggtttggggttagtcagaggagcgacggattgaagtacgagggagagtgggcttcaaaccgacggcatggctacggatgtatgacattccccgacggaacaaaagaggagggaaagtacaaacagaacatcttggtgggcggaaaacgaaagaatctgatacctctacgcgccagtaagatacgcgagaaagtggatagagccgtggaagccgccgaacgggccgcgactatagctaagcaaaaagctgagatcgctgcatcacggaccagccactcaagggccaaagccgaagccgcccttaccgcagcgcagaaagcccaggaagaagcgcgcattgcgcggattacagccaaagagttctccccatccttccagcatcgtgagaacggcctcgagtaccaaaggcctaagaggcagacaagctgcgatgacattgaggttctatccaccggcacaccactgcagcaggagagtcccgagttgtacaggaaaggcacgaccccttccgacctcaccccggatgattcgccccttcaatcatttccgactagccccgcagccactcctccgcctgctccagccgcacgcaacaaagtcgcacacttctcccgccaggtgagcgtggacgaagagagagggggagatatacaaatgctactcgaaggtagagccggggattgcgcccggtcaagctggggagaggaacaggccggagggagtagaggtgtcaggtccggcgccctgcgcggtggcttactggtggacgactttcgaactcgggggtccgggaggaaacagccgggcaacccgaagccgcgcgaaagacgcactgagtctccccctgttttcacttggaccagccatcacagagcgagcaaccactcccccggcggttcaagactgctcgagctgcaggaggagaaactgtccaactaccgtatggaaatgaaaccactattgagaatggagactcatcctcagaagaggcgatatagtaaaggaggagcctgcaggggcctcggagacgaccacagacccgaggatagggggtttggcgtgcagagactccggtcaaaggctcaaaacaaagagaatttccgtccggcctcaagcgcagaacccgcagtgcagaagctggcatctctgcgactgggcggggccgaaccccggttattgcggtgggatttgacattttctccacctcagaaatcacttccagtggccttggagagcgatgaggagaacggggatgaactgaaatcctcaactggtagcgccccgatactggtggtgatggtgatactcctgaacattggcgtcgccatcctctttatcaattttttcatttag

SEQ ID NO: 205013 - DNA, 3985 bp, Artificial Sequence
  derived and/or modified sequence
agcgcgagacgctggtcaggctccgcggcgcagctcgaaaaggaataatcgcccccgattgactgaaattcctccggagccggcgccgcggccgcccgcgcccgagaccgcgctccggggccgcgtcctcctctcctccggaaaacgctcgcgacccagggccgccggcggccgcgactctgctgtgtcgatcgcctgagtccgttttcaccgtttgcgggatctggaaccgagttacatgcatgtccagtgggggcaggtttaattttgacgacggagggtcctactgtggaggctgggaggacggcaaggcgcacggccatggcgtctgcaccggccccaagggccaaggcgaatacaccggctcgtggagccacggcttcgaggtgctgggcgtctacacctggcccagcggcaacacgtaccagggcacctgggcgcagggcaagcgccacggcatcggcctggagagcaaggggaagtgggtgtacaagggcgagtggacgcacggattcaaggggcgctacggggtgcgggagtgcgcgggcaacggggccaaatacgaagggacctggagcaacgggctgcaggacggctacgggaccgagacctactcggacggagggacctaccagggccagtgggtcggtggcatgcgccagggctacggcgtccggcagagcgtcccgtatggcatggccgcggtcatccgctcacccctgaggacgtccatcaactccctgcgcagcgagcacaccaacggcacggcgctgcatcccgacgcctctccggcggtggccggcagcccggccgtgtcccgcgggggcttcgtgctcgtggcccacagtgactccgagatcctcaagagcaagaagaaggggctgtttcggcgctcgctgctgagtgggctgaagctgcgcaagtcggagtccaagagcagcctggccagccaacgcagcaagcagagctcctttcgcagcgaggcgggcatgagcaccgtcagctccacggccagcgacatccactccaccatcagcctgggcgaggctgaggccgagctggcggtcatcgaggacgacatcgacgccaccaccaccgagacctacgtgggcgagtggaagaacgacaaacgctccggcttcggcgtgagccagcgctcggacgggctcaagtacgagggcgagtgggccagcaaccggcgccatggctacggctgcatgaccttcccggacggcaccaaggaggagggcaagtacaagcagaacatcctcgtcggcggcaagcgcaagaacctcatccccctgcgggccagcaagatccgcgagaaggtggaccgcgccgttgaggccgctgagcgggccgccaccatcgccaagcagaaggctgagatcgcggcttccaggacctcccactctcgggcaaaggccgaggcagccctcacagcagctcagaaagcccaggaggaggcgcggatcgccaggatcactgccaaagagttctccccttccttccagcaccgggaaaacgggctggagtaccagaggccgaagcgtcagacctcctgtgacgacatcgaggtgctgtccaccgggacacccctgcagcaggagagccccgagctgtaccgcaagggcaccactccctccgacctgacccccgacgacagccccctgcagagcttccccaccagccccgcggccaccccgccgcccgcgcccgccgccaggaacaaggtcgcccacttctcgaggcaggtgtcggtggacgaggagcggggcggggacatccagatgctcctggagggccgggccggggactgcgcccgcagcagctggggcgaggagcaggccgggggctccaggggtgtccgcagcggtgccctgcgcggcggcctgctcgtggatgacttccgcacccgaggttcgggccgcaagcagcccgggaaccccaagccgcgggagcggcggacggagtcaccccccgtgttcacgtggacttcccaccaccgggccagcaaccacagccccggaggctccaggctgctggagctgcaggaggagaagctgagcaactaccggatggagatgaaacccttgctgaggatggagacgcatccccagaaaagacgctacagcaagggcggcgcctgccggggcttgggggacgaccaccgccccgaggaccggggcttcggggtgcagagactgcggtccaaggcccagaacaaggagaacttcaggccggcctcctccgcggagcccgccgtgcagaaactggcgagcctgcggctgggcggggccgagccccggttgctgcgttgggacttgaccttctccccgccccagaaatccttgcctgtcgctctagagtccgacgaggagaatggggatgagctcaagtccagtacgggctcagcgcctatcctggtggtcatggtgatcttgctcaacatcggagtcgccattctgtttattaactttttcatctgatgagatgtcgcggtagcaaaaatagagaaagggtagaaaaaagggacattaaaattaaaagcaaaaccacaagaagggaaagaccgcaactcggacagcccagcgacttccaagtcctctcacagaagaaccacacgattgggtatcactcacagtttgcctttttttctgggtaatgttttttggattttagccaaaattctttgcttgtataacactctgctgtgtggcatggcagaaggaggccagcacgcagcccctccagctccacgtggagacagaagggatcccggcacatcagtggtaacagcggacgttgtcctcgtggtcacacgtcccgtcttgggtgtggatggagggcagcccggggcagagcctcagccccgcggcccctgagtggcagggctgactcccgtcgacacgagcttagaaagtggattcactgctttctctgtctagaacagacgggtgacaagtatgggcaggaggcatggggcagggtggcccaccccagtgggcagtagcctggcctttttctgtgtgagatctgtgctgcacacctgagggagggggagggatcggccacctcctccctgtgagacggatgcaggtccttccctcttctcggcactgcccccggccttccatgagaagccgactccccacaccgagttttaaagcaaagcccttttcttctgctgcccactcactgtgggtcccattcggctgtttcccccaccagaccccagggaagccggggcccactccgatccgcctgggctcagctaagcacggaagccaagggggctgtgccgtggagctgggctcgcgccggggctctgggtgtgtgcgcttggcgtgcagggtggacgcgtggggttccgtgtccccagcagtgagggccctagaggacgccttctcccatggttactgatctccacgggttttcacatctctgtactgtgcctgcctcaacttcccctaacagatatgcatattccttccagatgcctcagtgctacaccacagtgggcctggtcccaggacaggaatgcggttcaaacccagtggcttgaaacttcctgagaaactgtagcatatccagccccctaaaatgtacaatgtaacttgttcagtccaacaaaaacaggttccttatgtttctgccttctccaccagggtcgctccatcacccaaacaaaagaacaaggtttgccaggatgtccgagtgccccctggccctggctctcgtgtgcatggacgtgcctgaggggtccgggcacggccatacgcaggacccctgtgcccggggaggcgctgcagggattccccatccggtcgtcttggggccagcccgtcttatggactctgccttgctttgcttatgtttagctgtttctctgctacctttcgagcagacttctttactacactgcactggattgctatatttttaaccagaaataaactaaagattagagcatgttccagttaaa

SEQ ID NO: 205014 - DNA, 2191 bp, Artificial Sequence
  derived and/or modified sequence
ggaattcgggtgactttgctccaagatacacgcgtgtgtcccgactctcactcaatttataggggagagggactcgccaaatccctgttttctgggggacctaccagggccagtgggtcggtggcatgcgccagggctacggcgtccggcagagcgtcccgtatggcatggccgcggtcatccgctcacccctgaggacgtccatcaactccctgcgcagcgagcacaccaacggcacggcgctgcatcccgacgcctctccggcggtggccggcagcccggccgtgtcccgcgggggcttcgtgctcgtggcccacagtgactccgagatcctcaagagcaagaagaaggggctgtttcggcgctcgctgctgagtgggctgaagctgcgcaagtcggagtccaagagcagcctggccagccaacgcagcaagcagagctcctttcgcagcgaggcgggcatgagcaccgtcagctccacggccagcgacatccactccaccatcagcctgggcgaggctgaggccgagctggcggtcatcgaggacgacatcgacgccaccaccaccgagacctacgtgggcgagtggaagaacgacaaacgctccggcttcggcgtgagccagcgctcggacgggctcaagtacgagggcgagtgggccagcaaccggcgccatggctacggctgcatgaccttcccggacggcaccaaggaggagggcaagtacaagcagaacatcctcgtcggcggcaagcgcaagaacctcatccccctgcgggccagcaagatccgcgagaaggtggaccgcgccgttgaggccgctgagcgggccgccaccatcgccaagcagaaggctgagatcgcggcttccaggacctcccactctcgggcaaaggccgaggcagccctcacagcagctcagaaagcccaggaggaggcgcggatcgccaggatcactgccaaagagttctccccttccttccagcaccgggaaaacgggctggagtaccagaggccgaagcgtcagacctcctgtgacgacatcgaggtgctgtccaccgggacacccctgcagcaggagagccccgagctgtaccgcaagggcaccactccctccgacctgacccccgacgacagccccctgcagagcttccccaccagccccgcggccaccccgccgcccgcgcccgccgccaggaacaaggtcgcccacttctcgaggcaggtgtcggtggacgaggagcggggcggggacatccagatgctcctggagggccgggccggggactgcgcccgcagcagctggggcgaggagcaggccgggggctccaggggtgtccgcagcggtgccctgcgcggcggcctgctcgtggatgacttccgcacccgaggttcgggccgcaagcagcccgggaaccccaagccgcgggagcggcggacggagtcaccccccgtgttcacgtggacttcccaccaccgggccagcaaccacagccccggaggctccaggctgctggagctgcaggaggagaagctgagcaactaccggatggagatgaaacccttgctgaggatggagacgcatccccagaaaagacgctacagcaagggcggcgcctgccggggcttgggggacgaccaccgccccgaggaccggggcttcggggtgcagagactgcggtccaaggcccagaacaaggagaacttcaggccggcctcctccgcggagcccgccgtgcagaaactggcgagcctgcggctgggcggggccgagccccggttgctgcgttgggacttgaccttctccccgccccagaaatccttgcctgtcgctctagagtccgacgaggagaatggggatgagctcaagtccagtacgggctcagcgcctatcctggtggtcatggtgatcttgctcaacatcggagtcgccattctgtttattaactttttcatctgatgagatgtcgcggtagcaaaaatagagaaagggtagaaaaaagggacattaaaattaaaagcaaaaccacaagaagggaaagaccgcaactcggacagcccagcgacttccaagtcctctcacagaagaaccacacgattggggtcgctccatcacccaaacaaaagaacaaggtttgccaggatgtccgagtgccccctggccctggctctcgtgtgcatggacgtgcc

SEQ ID NO: 205015 - DNA, 2247 bp, Artificial Sequence
  derived and/or modified sequence
atgagcagcggcggccgcttcaactttgatgatggcggcagctactgcggcggctgggaggatggcaaggcccacggccatggagtgtgcaccggccccaagggccagggcgagtacacaggctcctggagccacggctttgaggtgctgggcgtgtacacctggcccagcggcaacacctaccagggcacctgggcccagggcaagagacatggaattggcctggagagcaagggcaagtgggtgtacaagggggagtggacccacggcttcaagggccgctatggagtgagagaatgtgctggaaatggagccaagtatgagggcacctggagcaatggcctgcaggacggctatggaacagagacctacagtgatggcggcacctaccagggccagtgggtgggcggcatgaggcagggctacggcgtgcggcagagcgtgccctacggcatggccgccgtcatccgcagccccctgcggaccagcatcaacagcctgcggtctgagcacaccaatggaacagccctgcacccagatgccagccctgctgtggccggcagccctgctgtgtcccggggcggctttgtgctggtggcccacagcgacagcgagatcctgaagagcaagaagaagggcctcttccgccgcagcctgctgagcggcctgaagctgaggaagtctgagagcaagagcagcctggccagccagaggagcaagcagagcagcttccgctctgaggccggcatgagcacagtgagcagcacagccagtgacatccacagcaccatcagcctgggggaggccgaggccgagctggccgtgattgaagatgacattgatgccaccaccacagagacctacgtgggggagtggaagaatgacaagaggagcggcttcggcgtgtcccagaggagtgatggcctgaagtatgaaggagagtgggccagcaacagaagacatggctacggctgcatgaccttcccagatggcaccaaggaggagggcaagtacaagcagaacatcctggtgggcggcaagaggaagaacctgatccccctgcgggccagcaagatccgggagaaggtggacagagctgtggaggccgctgagagagctgccaccatcgccaagcagaaggccgagattgctgccagcaggaccagccacagccgggccaaggccgaggccgccctgacagctgcccagaaggcccaggaggaggccagaattgcccgcatcacagccaaggagttcagccccagcttccagcacagagaaaatggcctggagtaccagaggcccaagaggcagaccagctgtgatgacatcgaggtgctgagcacaggcacccccctgcagcaggagagccctgagctgtacaggaagggcaccacccccagcgacctgaccccagatgacagccccctgcagagcttccccaccagccctgctgccaccccacctccagccccagctgccaggaacaaggtggcccacttcagccggcaggtgtctgtggatgaggagcggggcggggacatccagatgctgctggagggccgggccggggactgtgcccggagctcctggggcgaggagcaggccggcggcagcagaggagtgcgcagcggggccctgcggggcggcctgctggtggatgacttccgcacccggggcagcggcaggaagcagcccggcaaccccaagccccgggagaggagaacagagagcccccctgtgttcacctggaccagccaccaccgggccagcaaccacagccctgggggcagccggctgctggagctgcaggaggagaagctgagcaactacaggatggagatgaagcccctgctgaggatggagacccacccccagaagaggcgctacagcaagggcggggcctgccggggcctgggagatgaccacaggcctgaggaccggggcttcggcgtgcagaggctgcggagcaaggcccagaacaaggagaacttccggcctgccagcagcgctgagcctgctgtgcagaagctggccagcctgcggctgggcggcgctgagccccggctgctgcgctgggacctgaccttcagccccccccagaagagcctgcctgtggccctggagagtgatgaagaaaatggagatgagctgaagagcagcacaggcagcgcccccatcctggtggtgatggtgatcctgctgaacattggagtggccatcctcttcatcaacttcttcatctag

SEQ ID NO: 205016 - DNA, 2247 bp, Artificial Sequence
  derived and/or modified sequence
atgagcagcggcggccggttcaacttcgacgacggcggcagctactgcggaggctgggaggatggtaaggctcacggccatggcgtctgcaccgggcccaaaggccagggcgagtataccggttcctggtctcacgggttcgaagtattgggtgtctacacatggccctcagggaacacctaccaggggacctgggcccagggcaaacgacacgggatagggttagagagcaaggggaagtgggtgtacaagggcgaatggacgcatgggtttaaagggaggtacggtgtccgcgagtgcgcagggaacggggcgaagtatgaagggacttggtccaacgggttacaggacggctatgggacagagacgtatagcgacggcggaacataccaggggcagtgggtaggtggcatgcgccaggggtatggggttcgccagtccgtcccgtacgggatggcagcggtgattagatcccctttgcggacgtccataaacagtctgcgcagtgaacacaccaacggtacggccctgcaccctgacgcgtctcctgctgtggctgggtcaccagccgtcagccggggtggtttcgtgctagtggcccacagcgacagtgaaattctgaaatccaagaagaaagggcttttccgcaggtccctgcttagcggactgaaacttagaaagagcgaatccaaaagcagtctggcttctcagaggagtaagcagagtagtttccggtccgaggctgggatgtcaacagtcagttctaccgccagtgacatccactctaccatcagcctcggggaggcggaagctgagctcgctgtgatcgaggatgatatcgacgcaaccactacggagacttatgtcggcgagtggaaaaatgataaaaggagtgggtttggcgtatcacaacgctctgatggtctgaagtacgaaggcgaatgggcctccaaccgaaggcatgggtatggatgcatgacttttcccgatggcacaaaggaagagggaaaatacaagcagaatatcttagtcggcggaaagcggaagaatctgatcccgctgagagccagcaagatcagagagaaggtagatcgcgcggttgaggctgcagagcgtgccgccacaattgctaaacaaaaagccgaaattgccgctagccggactagtcactctcgggcaaaggccgaggccgccctaacggccgcccaaaaagctcaggaagaagcaagaatagcacgcataactgctaaggagtttagcccctccttccagcacagggaaaacgggctggagtaccagcgcccaaagcgccagacctcgtgcgatgacatagaggtgctgtctactgggacaccgctgcagcaggagtcccctgagctgtaccgtaaagggaccacgcctagtgatctcactcccgatgatagccctctccagtcctttccgaccagccccgctgccacgcctcctccagctccagctgctcggaacaaagtggcccatttctcaaggcaggtaagcgtggatgaagagagaggcggagatatccagatgctcctggagggacgggccggtgactgtgcccggtcatcttggggggaggagcaagctggaggaagcagaggagtgcgctctggagccttaaggggtggcctgctggtggatgacttcagaactaggggatctggtcgaaagcagccaggaaatcccaaacctagagagcggagaacagaaagcccccccgtcttcacatggacctctcaccacagggcatcaaaccattccccgggagggagccgtctactggagctgcaggaagagaaactgagcaattatcgcatggagatgaaaccgctactgaggatggagacccacccccagaagagacgctacagcaagggcggagcctgccgtgggctgggagacgaccacagacccgaagatcggggattcggagtgcagagactgcgctcaaaagcgcagaacaaagagaatttccgcccagccagttccgctgagcccgccgtccagaaactggcctcactgcgactgggaggagctgaacctaggcttctaaggtgggatttgaccttttctcccccccagaagtcattgccggtggccctggaaagcgatgaggaaaatggagacgaattgaagtccagtactggctccgcccccattcttgttgtgatggtgatcctcctgaatattggagtcgcaattcttttcatcaatttttttatctag

SEQ ID NO: 205017 - DNA, 2247 bp, Artificial Sequence
  derived and/or modified sequence
atgtccagtggaggcaggttcaattttgacgatggaggcagctattgcggcggatgggaggacgggaaagcacacggtcatggggtttgtacaggccctaagggtcaaggcgaatacaccggatcctggtctcacggcttcgaagtgttgggagtatatacatggccctcagggaacacttatcaggggacctgggctcaaggcaagcggcatgggattggcttggagtctaaaggaaaatgggtctataaaggggagtggacccacggcttcaaagggcgatacggagtgagagagtgtgctgggaatggagccaagtatgagggcacatggtctaacggactccaggacgggtacgggacagagacctacagtgatggcggtacctaccaaggtcagtgggtgggcggtatgaggcagggatatggagttaggcagtcggtcccctacggtatggccgctgtcataagaagtccccttcgaacgtccattaacagcctccggtccgaacatacgaacggaacagccctacatcccgacgccagtccagccgtggctgggtcgcctgcagtgagcagggggggatttgttctggttgcacactccgatagcgagatcttaaagtctaagaaaaaggggctgttccggcgtagcctgttgtcgggactgaagctgagaaaaagtgaatctaaatccagcctggcctctcagcggtctaagcagagcagtttccgctctgaggctgggatgtcaactgtatcgagtacagcctccgatatacatagcaccatttcgctgggcgaagcggaagcagagctggcggtcatagaggacgacatcgacgccaccactactgaaacatacgtgggcgaatggaagaacgataaacggtcagggttcggcgttagccagcggtcagacggcttgaaatacgagggcgagtgggccagcaatcggaggcacgggtacggttgtatgacatttcctgacggaacgaaagaagaagggaagtacaagcaaaacatcctcgtcgggggaaaacgtaagaacctaatcccactccgggcatctaagattcgggagaaagttgaccgggcagttgaagctgcagagagggccgcaaccatcgccaaacagaaagccgagatcgctgcttctcgaacctcccacagccgggcaaaagccgaggctgcactcacagccgcacagaaggctcaggaggaagccaggatagccagaataaccgccaaagagttctcaccctcatttcagcacagagaaaacgggttagaataccagcgacccaaacgccaaacatcatgcgacgacattgaggtcctgagcaccggtaccccactgcagcaagaatctccggagctctacagaaaaggcactacccctagtgatttgacccccgacgatagccccctgcaaagcttccctacttccccagctgccactcctccccctgccccagcagcaagaaataaagtagcccacttctctcggcaagtgagtgttgacgaggagagaggaggggacatccaaatgctgctggagggaagggcaggcgactgcgcacgctcatcatggggtgaagaacaagcagggggatctagaggtgtacgctccggtgcattgcgtggtggtttattggtggatgatttccgtacaagaggatctggacgtaaacaacccggaaatcctaaacctcgcgagcggcgaactgagtccccccctgtttttacatggactagccaccaccgcgctagtaaccactctcctgggggatcaaggttgcttgaactccaggaagagaaactctcaaattaccgtatggaaatgaaaccactgctccggatggagactcacccacagaagaggaggtacagcaagggcggagcctgtagaggcttgggcgacgaccaccggccagaggatcgaggtttcggcgtccagcgccttaggagcaaggctcaaaataaggaaaacttcaggccggctagctcagccgagcctgcagtgcagaagctggccagccttcgcctcggcggtgccgagcccagactcttgagatgggacctcactttctcaccccctcagaaatctctgcctgtcgcgctggaatcagacgaagaaaacggtgacgagctcaagtcttctactggctccgctcccatccttgtggtcatggtcatcctattaaacataggcgtggcaatattatttatcaacttcttcatatag

SEQ ID NO: 205018 - DNA, 2247 bp, Artificial Sequence
  derived and/or modified sequence
atgagcagcggcggcagattcaacttcgacgacggcggcagctactgcggcggctgggaggacggcaaggcccacggccacggcgtgtgcaccggccccaagggccagggcgagtacaccggcagctggagccacggcttcgaggtgctgggcgtgtacacctggcccagcggcaacacctaccagggcacctgggcccagggcaagagacacggcatcggcctggagagcaagggcaagtgggtgtacaagggcgagtggacccacggcttcaagggcagatacggcgtgagagagtgcgccggcaacggcgccaagtacgagggcacctggagcaacggcctgcaggacggctacggcaccgagacctacagcgacggcggcacctaccagggccagtgggtgggcggcatgagacagggctacggcgtgagacagagcgtgccctacggcatggccgccgtgatcagaagccccctgagaaccagcatcaacagcctgagaagcgagcacaccaacggcaccgccctgcaccccgacgccagccccgccgtggccggcagccccgccgtgagcagaggcggcttcgtgctggtggcccacagcgacagcgagatcctgaagagcaagaagaagggcctgttcagaagaagcctgctgagcggcctgaagctgagaaagagcgagagcaagagcagcctggccagccagagaagcaagcagagcagcttcagaagcgaggccggcatgagcaccgtgagcagcaccgccagcgacatccacagcaccatcagcctgggcgaggccgaggccgagctggccgtgatcgaggacgacatcgacgccaccaccaccgagacctacgtgggcgagtggaagaacgacaagagaagcggcttcggcgtgagccagagaagcgacggcctgaagtacgagggcgagtgggccagcaacagaagacacggctacggctgcatgaccttccccgacggcaccaaggaggagggcaagtacaagcagaacatcctggtgggcggcaagagaaagaacctgatccccctgagagccagcaagatcagagagaaggtggacagagccgtggaggccgccgagagagccgccaccatcgccaagcagaaggccgagatcgccgccagcagaaccagccacagcagagccaaggccgaggccgccctgaccgccgcccagaaggcccaggaggaggccagaatcgccagaatcaccgccaaggagttcagccccagcttccagcacagagagaacggcctggagtaccagagacccaagagacagaccagctgcgacgacatcgaggtgctgagcaccggcacccccctgcagcaggagagccccgagctgtacagaaagggcaccacccccagcgacctgacccccgacgacagccccctgcagagcttccccaccagccccgccgccacccccccccccgcccccgccgccagaaacaaggtggcccacttcagcagacaggtgagcgtggacgaggagagaggcggcgacatccagatgctgctggagggcagagccggcgactgcgccagaagcagctggggcgaggagcaggccggcggcagcagaggcgtgagaagcggcgccctgagaggcggcctgctggtggacgacttcagaaccagaggcagcggcagaaagcagcccggcaaccccaagcccagagagagaagaaccgagagcccccccgtgttcacctggaccagccaccacagagccagcaaccacagccccggcggcagcagactgctggagctgcaggaggagaagctgagcaactacagaatggagatgaagcccctgctgagaatggagacccacccccagaagagaagatacagcaagggcggcgcctgcagaggcctgggcgacgaccacagacccgaggacagaggcttcggcgtgcagagactgagaagcaaggcccagaacaaggagaacttcagacccgccagcagcgccgagcccgccgtgcagaagctggccagcctgagactgggcggcgccgagcccagactgctgagatgggacctgaccttcagccccccccagaagagcctgcccgtggccctggagagcgacgaggagaacggcgacgagctgaagagcagcaccggcagcgcccccatcctggtggtgatggtgatcctgctgaacatcggcgtggccatcctgttcatcaacttcttcatctag

SEQ ID NO: 205019 - protein, 450 aa, Artificial Sequence
  derived and/or modified sequence
MGAPPGYRPSAWVHLLHQLPRADFQLRPVPSVFAPQEQEYQQALLLVAALAGLGLGLSLIFIAVYLIRFCCCRPPEPPGSKIPSPGGGCVTWSCIVALLAGCTGIGIGFYGNSETSDGVSQLSSALLHANHTLSTIDHLVLETVERLGEAVRTELTTLEEVLEPRTELVAAARGARRQAEAAAQQLQGLAFWQGVPLSPLQVAENVSFVEEYRWLAYVLLLLLELLVCLFTLLGLAKQSKWLVIVMTVMSLLVLVLSWGSMGLEAATAVGLSDFCSNPDPYVLNLTQEETGLSSDILSYYLLCNRAVSNPFQQRLTLSQRALANIHSQLLGLEREAVPQFPSAQKPLLSLEETLNVTEGNFHQLVALLHCRSLHKDYGAALRGLCEDALEGLLFLLLFSLLSAGALATALCSLPRAWALFPPSDDYDDTDDDDPFNPQESKRFVQWQSSI

SEQ ID NO: 205020 - protein, 453 aa, Artificial Sequence
  derived and/or modified sequence
MGAPPGYRPSAWVHLLHQLPRADFQLRPVPSVFAPQEQEYQQDQSSLAVTQRPPPTTPLHRLRPRPRLTPALARRPPEAARGDPRPQSPPEALLLVAALAGLGLGLSLIFIAVYLIRFCCCRPPEPPGSKIPSPGGGCVTWSCIVALLAGCTGIGIGFYGNSETSDGVSQLSSALLHANHTLSTIDHLVLETVERLGEAVRTELTTLEEVLEPRTELVAAARGARRQAEAAAQQLQGLAFWQGVPLSPLQVAENVSFVEEYRWLAYVLLLLLELLVCLFTLLGLAKQSKWLVIVMTVMSLLVLVLSWGSMGLEAATAVGLSDFCSNPDPYVLNLTQEETGLSSEADSVPASSGQHPLPAAGPGARSCASVPFSAEASAVLGGDSECDRRKFPPVGGTATLPQPAQGLWCSPAGPVRRRPGRPALPATLLPAVCRSAGHCPLQPAPSLGPLPTQ

SEQ ID NO: 205021 - DNA, 1353 bp, Artificial Sequence
  derived and/or modified sequence
atgggcgccccccccggctacagacccagcgcctgggtgcacctgctgcaccagctgcccagagccgacttccagctgagacccgtgcccagcgtgttcgccccccaggagcaggagtaccagcaggccctgctgctggtggccgccctggccggcctgggcctgggcctgagcctgatcttcatcgccgtgtacctgatcagattctgctgctgcagaccccccgagccccccggcagcaagatccccagccccggcggcggctgcgtgacctggagctgcatcgtggccctgctggccggctgcaccggcatcggcatcggcttctacggcaacagcgagaccagcgacggcgtgagccagctgagcagcgccctgctgcacgccaaccacaccctgagcaccatcgaccacctggtgctggagaccgtggagagactgggcgaggccgtgagaaccgagctgaccaccctggaggaggtgctggagcccagaaccgagctggtggccgccgccagaggcgccagaagacaggccgaggccgccgcccagcagctgcagggcctggccttctggcagggcgtgcccctgagccccctgcaggtggccgagaacgtgagcttcgtggaggagtacagatggctggcctacgtgctgctgctgctgctggagctgctggtgtgcctgttcaccctgctgggcctggccaagcagagcaagtggctggtgatcgtgatgaccgtgatgagcctgctggtgctggtgctgagctggggcagcatgggcctggaggccgccaccgccgtgggcctgagcgacttctgcagcaaccccgacccctacgtgctgaacctgacccaggaggagaccggcctgagcagcgacatcctgagctactacctgctgtgcaacagagccgtgagcaaccccttccagcagagactgaccctgagccagagagccctggccaacatccacagccagctgctgggcctggagagagaggccgtgccccagttccccagcgcccagaagcccctgctgagcctggaggagaccctgaacgtgaccgagggcaacttccaccagctggtggccctgctgcactgcagaagcctgcacaaggactacggcgccgccctgagaggcctgtgcgaggacgccctggagggcctgctgttcctgctgctgttcagcctgctgagcgccggcgccctggccaccgccctgtgcagcctgcccagagcctgggccctgttcccccccagcgacgactacgacgacaccgacgacgacgaccccttcaacccccaggagagcaagagattcgtgcagtggcagagcagcatctag

SEQ ID NO: 205022 - DNA, 1353 bp, Artificial Sequence
  derived and/or modified sequence
atgggcgcccccccaggttatagaccttctgcttgggtacacctactacatcagctgcctcgcgctgattttcagttgcggcctgtgccctcggtgtttgcaccacaggaacaggaataccagcaggccctactgctggttgcagccctggcagggctaggcctgggcctgagcctcatcttcattgcagtatacctgattcgtttttgttgctgcagaccccccgagccaccaggaagcaaaataccgagccctggcggtggttgcgtcacttggtcttgtattgttgcactccttgccggctgtaccggcatagggattgggttctacggcaatagcgaaacctccgatggcgtgtcccagctttcatctgcactactgcacgcaaaccacacgctttcaactatcgatcatctggttctggaaactgttgagcgcttgggagaagcagtgaggacagagctgaccacactcgaggaggtcctcgaaccccgaacagaactcgtggccgctgcccgcggggcccgacgccaggcagaagccgcagcccagcagttacaagggcttgcattttggcagggggtccctctgtcacctctgcaggtggccgagaatgtgagttttgtggaagagtaccgctggttagcttacgtgctgttgctcctgctggaactgctggtgtgcctgttcactcttctggggttagcgaagcaaagcaaatggctcgtgatcgtaatgaccgttatgtccttgttggtcctcgtgctgtcatggggatctatgggactggaggccgctactgcagtggggctgtccgatttctgcagcaaccccgacccctacgtgttgaacctgacacaagaagagacaggcctatcctccgatattctgtcttactatctcctgtgcaacagagctgtgtccaacccgtttcagcagaggctgacactctcccagagggccctcgcaaacattcacagtcagctgttaggactggagcgtgaagccgtgccacagtttccatctgcccaaaagcctctcctctcacttgaagagaccctgaatgttactgaagggaattttcaccagttagtggctttactccattgcagaagcctgcacaaggactacggcgccgccttaagggggctgtgcgaggatgcattagagggtttgctgtttttgctactgtttagcttgctgagtgccggggcgctggccacagccctgtgttctttaccaagagcgtgggccctgtttcccccttcagatgactatgacgatacagacgatgacgatccatttaatccacaggaatcaaaacgttttgttcagtggcaaagcagcatttag

SEQ ID NO: 205023 - DNA, 1353 bp, Artificial Sequence
  derived and/or modified sequence
atgggcgcccctcctggctaccggcccagcgcctgggtgcacctgctgcaccagctgcccagggctgacttccagctgcggcctgtgcccagcgtgtttgccccccaggagcaggagtaccagcaggccctgctgctggtggccgccctggccggcctgggcctgggcctgagcctcatcttcatcgctgtgtacctgatccgcttctgctgctgccggcccccagagcccccaggcagcaagatccccagccctgggggcggctgtgtgacctggagctgcatcgtggccctgctggccggctgcacaggaattggaattggcttctacggcaacagcgagaccagtgatggagtgtcccagctgagcagcgccctgctgcacgccaaccacaccctgagcaccatcgaccacctggtgctggagaccgtggagcggctgggggaggccgtgaggacagagctgaccaccctggaggaggtgctggagcccaggacagagctggtggccgccgcccggggggcccggcggcaggccgaggccgccgcccagcagctgcagggcctggccttctggcagggcgtgcccctgagccccctgcaggtggccgagaatgtgtcctttgtggaggagtaccgctggctggcctacgtgctgctgctgctgctggagctgctggtgtgcctcttcaccctgctgggcctggccaagcagagcaagtggctggtgattgtgatgacagtgatgagcctgctggtgctggtgctgtcctggggctccatgggcctggaggccgccacagctgtgggcctgagtgacttctgcagcaacccagacccctacgtgctgaacctgacccaggaggagaccggcctgagcagtgacatcctgagctactacctgctgtgcaacagagctgtgagcaaccccttccagcagaggctgaccctgagccagagggccctggccaacatccacagccagctgctgggcctggagcgggaggccgtgccccagttccccagcgcccagaagcccctgctgagcctggaggagaccctgaatgtgacagagggcaacttccaccagctggtggccctgctgcactgccgcagcctgcacaaggactatggagctgccctgcggggcctgtgtgaagatgccctggagggcctgctcttcctgctgctcttcagcctgctgtctgctggggccctggccacagccctgtgcagcctgccccgggcctgggccctcttccccccatctgatgattatgatgacacagatgatgatgaccccttcaacccccaggagagcaagagatttgtgcagtggcagagcagcatctag

SEQ ID NO: 205024 - DNA, 1353 bp, Artificial Sequence
  derived and/or modified sequence
atgggcgccccccccggctaccggcccagcgcctgggtgcacctgctgcaccagctaccgcgcgccgatttccagcttcggccagtccccagcgtcttcgccccccaagagcaagaataccagcaggcattactgctggtggccgcacttgccggcctcggactcggtctatccctgatattcatcgcagtgtacctcatccgcttctgttgttgcaggcctccagaaccgcctggttccaagatcccctcgcctggaggcggatgcgtgacctggtcttgtatcgtagccctcctggcagggtgcaccgggataggtattggcttctacggtaattcagagacttcagatggtgtatcccagctttcttccgcactcctgcatgccaatcatacactatcaactattgaccacttggtacttgaaaccgtggagaggttgggagaagcagtccggacagagttaacaacacttgaggaagtattagagccaagaaccgagctcgtggccgccgctagaggtgccaggagacaggccgaagccgcagcccagcaactgcagggactcgctttttggcagggtgttcctttgagcccactgcaggttgcagaaaacgtgtctttcgttgaagagtatcgatggcttgcctatgtgctgttgctgctcctggagctcctggtctgtcttttcaccctgcttggcctggcaaagcagtctaaatggctagtgatcgtcatgactgtaatgagcctcctagtgttggtgttaagttggggatctatgggcctggaggccgcaactgccgttggtctgtccgacttttgtagcaaccccgatccttacgtgttgaacctgactcaggaggagaccgggctcagttcagacatcctctcttactacctgctgtgcaatagggcagtcagcaaccccttccagcagaggttgaccctgtcccagcgggctttggccaacatccactcccaactgctaggcttggagagagaagccgtaccacagttccccagcgcacagaagcccctcctgtccttagaggaaacgctcaacgttactgagggcaactttcaccagctcgtcgcgctactccactgccgttccttgcataaagattatggagcagccctgcggggtctctgtgaagatgctcttgagggtctgctgttcctcctgttattttctctgctgtctgctggggcactggccacggcgctgtgttcccttcccagagcttgggccctcttccccccatctgacgattacgatgacacggatgatgatgatccatttaatcctcaggagtccaaacggtttgtccaatggcaaagtagcatatag

SEQ ID NO: 205025 - DNA, 1353 bp, Artificial Sequence
  derived and/or modified sequence
atgggagccccacctgggtacaggccctcagcctgggtgcacctccttcaccaactgcctagagccgattttcaactcaggccagttccatctgtctttgcaccccaggaacaggaataccagcaggcactcctccttgttgccgctttggcaggactgggcctgggtcttagcctgatcttcatagctgtctacctgatccggttttgttgttgcaggccacccgagccccctggaagtaaaatccccagccccggaggcggatgtgtcacatggtcatgtatcgtcgccttacttgccggttgcacaggtattggtattggattctacggaaattccgaaacaagcgacggcgtgtctcagttgtccagtgccctcttgcacgctaatcatactctttccacgattgaccacctggttcttgaaacagtggagcgcttgggagaggcggtacggaccgagctcaccactttggaagaagtgttagaacctagaacagagcttgtggcggcagccagaggagctaggagacaagcagaagccgctgcccagcagttacagggtctggccttttggcagggcgtgccactgtctccgcttcaggtggccgaaaatgtgtcttttgtggaggagtaccggtggctggcttatgtgctccttctgctgcttgaactcttggtgtgtttgttcactttactgggactggctaaacagtcaaagtggctggtgatcgttatgactgtcatgagcctgctcgtcctggtgttgtcgtggggatctatgggcctcgaagcagccacagccgtagggctgtctgacttctgctcaaaccctgacccatacgtgttaaatctaacacaggaggaaacgggactgtcctccgatatcctctcatattacctgttatgcaaccgggcagtgtccaatccatttcagcagagactgacactgtctcagagagccctggcaaacatccacagccagctcctcggcctggagcgtgaggctgtcccccagtttccttcggcacaaaagcctctgctatctctggaggaaactctaaacgtgacagaggggaactttcatcagctggtagccctgctgcattgtcgctctttgcacaaggactacggagccgctctgcgaggtctctgcgaagatgctctcgagggcttgttgtttctgctgttattttccctcctgtccgcaggggcattagccaccgccctgtgttcgttgccgcgagcctgggcactgtttcctccgtccgatgattacgatgatacggatgatgacgaccctttcaacccccaggaaagcaagcgattcgtccagtggcagtcttctatttag

SEQ ID NO: 205026 - DNA, 1885 bp, Artificial Sequence
  derived and/or modified sequence
gctcccctgagcccagccagaccccgcgccgcccgcgccccgctcgactccggaggctcccgcagccccggcgtccgccccgctgccccctcccccgggggccatgggggcgcccccgggctaccggccctcagcttgggtgcatctcctccaccagctgccccgcgccgacttccagctccgcccggtgcccagcgttttcgcgccccaagagcaggaataccagcaggccttgttgctggtggcggccttggcgggcctgggcttgggcctgagcctcattttcatcgctgtctacctcatccgcttctgctgctgccggccccccgagccccccgggtccaagatcccctcgcccgggggaggctgcgtcacctggagctgcattgtcgcccttctcgccggctgcactggcattggcatcggtttctatggcaacagtgagaccagtgatggggtgtcccagctcagctctgcgctgctgcacgccaaccacacactcagcaccattgaccacctggtgttggagacggtggagaggctgggcgaggcggtgaggacagagctgaccaccctggaggaggtgctcgagccgcgcacggagctggtggctgccgcccgaggggctcgacggcaggcggaggctgcggcccagcagctgcaggggctggccttctggcagggagtgcccctgagccccctgcaggtggctgaaaatgtgtcctttgtggaggagtacaggtggctggcctacgtcctcctgctgctcctggagctgctggtctgcctcttcaccctcctgggcctggcgaagcagagcaagtggctggtgatcgtgatgacagtcatgagtctcctggttctcgtcctgagctggggctccatgggcctggaggcagccacggccgtgggcctcagtgacttctgctccaatccagacccttatgttctgaacctgacccaggaggagacagggctcagctcagacatcctgagctattatctcctctgcaaccgggccgtctccaaccccttccaacagaggctgactctgtcccagcgagctctggccaacatccactcccagctgctgggcctggagcgagaagctgtgcctcagttcccttcagcgcagaagcctctgctgtccttggaggagactctgaatgtgacagaaggaaatttccaccagttggtggcactgctacactgccgcagcctgcacaaggactatggtgcagccctgcggggcctgtgcgaagacgccctggaaggcctgctcttcctgctactcttctccctgctgtctgcaggagcgctggccactgccctctgcagcctgccccgagcctgggccctcttcccacccagtgacgactacgatgacacagacgatgacgaccctttcaaccctcaggaatccaagcgctttgtgcagtggcagtcgtctatctgagcccctcctcccggctggactggagcctggctcccctcttcgttccttccctggctgccggaggagaccccactaacccagcctgcctgggctctgaccactaacactcttggccatggacagcctgcacaggaccgcctccctgctcttggccactgtgctcccatttctgtccttggccttgggagtagctgagggggcagactagggagtagggctggcaggggagggggcagacagcctcgcctcgcacccttcatccctggctgccggtcccatccttggagggactaagctgggggtgggggacatgagtccccctgctgcccctgccacatcccagtgggctctgaccccctgatctcaactcgtggcactaacttggaaaagggttgatttaaaataaaagggaagactattttacaagca

SEQ ID NO: 205027 - protein, 321 aa, Artificial Sequence
  derived and/or modified sequence
MGEWTILERLLEAAVQQHSTMIGRILLTVVVIFRILIVAIVGETVYDDEQTMFVCNTLQPGCNQACYDRAFPISHIRYWVFQIIMVCTPSLCFITYSVHQSAKQRERRYSTVFLALDRDPPESIGGPGGTGGGGSGGGKREDKKLQNAIVNGVLQNTENTSKETEPDCLEVKELTPHPSGLRTASKSKLRRQEGISRFYIIQVVFRNALEIGFLVGQYFLYGFSVPGLYECNRYPCIKEVECYVSRPTEKTVFLVFMFAVSGICVVLNLAELNHLGWRKIKLAVRGAQAKRKSIYEIRNKDLPRVSVPNFGRTQSSDSAYV

SEQ ID NO: 205028 - DNA, 966 bp, Artificial Sequence
  derived and/or modified sequence
atgggcgagtggacaatcctggagcgactgctcgaggccgccgttcagcagcacagcactatgattggtaggatacttttaacggtggtggtgatcttcagaattttaattgtggccatcgtgggagagactgtgtacgatgatgaacagaccatgtttgtgtgcaatactctccagccaggctgtaaccaggcctgttacgaccgagcatttcccattagtcatatccggtactgggtgttccaaattatcatggtttgtacaccttccctctgcttcattacctatagtgtccaccaatctgccaagcagcgtgaaagacggtactcaaccgtgttcttggccctcgacagggacccacctgagagcattggtggtcccggggggaccgggggaggagggtctggcggcggaaaacgggaggataagaaattgcagaacgcaatcgtgaacggggttctgcagaacactgaaaacacttcaaaggagacggagcctgattgtctggaagtcaaggagctgacccctcacccatctggcttgaggaccgcttctaagtccaagctcagaagacaggaaggaatatccagattttacatcatccaggttgtgttcaggaatgctctggaaattggtttccttgtcggacagtacttcttgtatggcttctccgtgccaggcctgtacgagtgcaaccggtatccatgcattaaagaagtagagtgctacgtgtctcgaccaactgagaagacagtgtttcttgttttcatgttcgcagtctcagggatttgtgtcgtgctgaatctcgcagagctgaatcacctaggctggagaaaaataaaacttgcagtgcggggggctcaagctaaaaggaaatctatatacgaaattcgtaataaggacctgccgagagttagcgtccctaactttgggcgcacgcaatcctcagatagtgcgtacgtttag

SEQ ID NO: 205029 - DNA, 2889 bp, Artificial Sequence
  derived and/or modified sequence
gctcggccctggcctcgcaggctgccgcgccggagcgccaggtgcccgctgaagtagcaggaacagagccggtgttcggaccctcccctggcccccaacctgcggcggagagcggcgctgagacttctcctgggcgggcgagcgctggaggacctgcaggctgccaccccgccccgcccctcgtcccggcgtccgcgggatccagacccgaaccccggacggcgcccgaggttcgtgccctctctctagaccgcgccaactgccccatcggtcgggacgcgcttggatttctttccccatttcttctcttttaagtacaataaaaggaaagggggattcgaggattttttaaaaaattgcttctttaattgggaggcaattcactcccattctggaagtgcggcccggggaggggccaggagcgggaacgtgcccggtgctgcccagtctttgtctgctgcctccggatgcacagcgatgggggaatggaccatcttggagaggctgctagaagccgcggtgcagcagcactccactatgatcgggaggatcctgttgactgtggtggtgatcttccggatcctcattgtggccattgtgggggagacggtgtacgatgatgagcagaccatgtttgtgtgcaacaccctgcagcccggctgtaaccaggcctgctatgaccgcgccttccccatctcccacatacgttactgggtcttccagatcataatggtgtgtacccccagtctttgcttcatcacctactctgtgcaccagtccgccaagcagcgagaacgccgctactctacagtcttcctagccctggacagagacccccctgagtccataggaggtcctggaggaactgggggtgggggcagtggtgggggcaaacgagaagataagaagttgcaaaatgctattgtgaatggggtgctgcagaacacagagaacaccagtaaggagacagagccagattgtttagaggttaaggagctgactccacacccatcaggtctacgcactgcatcaaaatccaagctcagaaggcaggaaggcatctcccgcttctacattatccaagtggtgttccgaaatgccctggaaattgggttcctggttggccaatattttctctatggctttagtgtcccagggttgtatgagtgtaaccgctacccctgcatcaaggaggtggaatgttatgtgtcccggccaactgagaagactgtctttctagtgttcatgtttgctgtaagtggcatctgtgttgtgctcaacctggctgaactcaaccacctgggatggcgcaagatcaagctggctgtgcgaggggctcaggccaagagaaagtcaatctatgagattcgtaacaaggacctgccaagggtcagtgttcccaattttggcaggactcagtccagtgactctgcctatgtgtgagagggcaggtttcatgaaggtctgggggatggcaaggagccccaaggcagatgactgctcagacgtggctgtatccaccctcatttatgtgaccctcaccattaagatgtaggataagactggataaaagaagattttgcaccaatgggaaaggaggaaaagtggacccattttcacatatcacctaattggttctacagagacgattgggtagagtgatgaaatggatcaattagacttctttggtccctttctgtttatggcctagcctgatcctgataacactgaacttgcacagctaccaagtaggacttagccctgctgagctctttattctggtgaatggtgtgagttgagtacttcattgatataaaatttgtgacctatctcaacccatccctttatcctgagccatgggacaaacatccttgaggcactcttcatgtatctcccccaccagcatgcccctttccctcaatccaaaatagcatgccagctttttttttttttttttttttttttccagaatctggccttacattagacctaatatgttttatttgcaaacttagagggaattacatggggtgcttattggagaacggccatggcagaggttttcattagagccccatctgactggcccttagtcgtgatgaaaaccttaggaatgtctcaatatttccagttttctaactcaaactgcactggtgctgtttactagggatgggggatgggtgggagggagggaattgcaatatgcaactacaacacttttgtgagattgttgttgcacagttaggcacacggttacgagcttcaggatatttctgccttccagcttgtggactttggttaacattaaaaagattttttttggctaatatcaagagtgtctagctgagccacagcatttgtaactggtgtatctcactcattttcttacatagttttgttgtgcaacacagctgcacggtcattttgccatgatttgaatttacctgtgtgcttacaccagagaccttaatcatcccatgtcaatcctgatttattattttttcagttactctttgaaacacacacacatatacagacacacatacaaaattactggcttaaaagacctgcaactaaacactattggctaacgtgtgtttacggtgacttatttgagacatataccaaaggttcaaaaacctattgcattggactgtcaatatgttttcttctttttgctcttatttatttaagtgccatactgtacctttcatatccactgtgtatttagttaaaatattggccaagagaaacatctgggtaatgtgcttttatgaagccctttgttccctttgaattatcattatcatttttgatttagatatggacatggtgtaacacacaactaaggatttgtttaaaataaagttcttgcctttttttgtaaaa

SEQ ID NO: 205030 - DNA, 966 bp, Artificial Sequence
  derived and/or modified sequence
atgggagagtggaccatcctggagcggctgctggaggccgctgtgcagcagcacagcaccatgattggccgcatcctgctgactgtggtggtgatcttccgcatcctgattgtggccatcgtgggggagaccgtgtatgatgatgagcagaccatgtttgtgtgcaacaccctgcagcccggctgcaaccaggcctgctatgaccgggccttccccatcagccacatccgctactgggtgttccagatcatcatggtgtgcacccccagcctgtgcttcatcacctacagcgtgcaccagagcgccaagcagcgggagcggcgctacagcacagtgttcctggccctggaccgggaccccccagagagcatcggcggccctgggggcaccggcggcggcggcagcggcggcggcaagcgggaggacaagaagctgcagaatgccatcgtgaatggagtgctgcagaacacagagaacaccagcaaggagacagagccagactgcctggaggtgaaggagctgaccccccaccccagcggcctgaggacagccagcaagagcaagctgcggcggcaggagggcatcagccgcttctacatcatccaggtggtgttcagaaatgccctggagatcggcttcctggtgggccagtacttcctgtatggcttctctgtgcccggcctgtatgagtgcaaccgctacccctgcatcaaggaggtggagtgctacgtgtcccggcccacagagaagacagtgttcctggtgttcatgtttgctgtgtctggcatctgtgtggtgctgaacctggccgagctgaaccacctgggctggaggaagatcaagctggccgtgcggggggcccaggccaagaggaagagcatctatgagatccggaacaaggacctgccccgggtgtctgtgcccaactttggccgcacccagagcagtgacagcgcctacgtgtag

SEQ ID NO: 205031 - DNA, 966 bp, Artificial Sequence
  derived and/or modified sequence
atgggcgagtggaccatcctggagcggctgctggaggccgccgtgcaacagcactcaaccatgatcggacgtatcttactgacggtggtcgtgatctttagaatactaattgttgccattgttggggaaactgtatatgatgacgaacaaactatgttcgtgtgtaatacattgcagcccgggtgtaaccaggcctgctatgatcgggctttccccatctcgcacatccgctactgggtgttccagatcatcatggtttgcacgccaagcctgtgtttcattacttactccgtgcatcagtctgctaagcagcgcgagaggcggtactcgactgtgtttttagcgctggatagggatccaccagagtcgatcggagggcctggtggaacagggggaggaggatccggaggaggcaaaagagaggacaagaagctgcagaatgccatcgtcaacggagtgttacagaataccgagaacacttccaaggagaccgaacctgactgtttggaagttaaagaactcacgccccatccctctggattgcgaactgcctctaagtccaaactgcgccggcaggaagggattagcaggttctacatcatccaagtcgtgtttcggaacgccttggaaataggatttctcgtgggccagtactttctgtacggttttagtgtccctggattgtatgagtgtaatcgctacccctgcatcaaagaggtcgagtgttacgtgtctcgcccaaccgagaagactgttttcctcgtgttcatgtttgctgtatctggcatctgtgtggtcctaaacctagctgaattgaatcacctgggctggagaaagattaagctcgccgtgcgaggagcacaagcgaagcgcaagtcgatctacgagatccgcaacaaggacctcccacgagtcagtgtgcctaactttggaagaacacagagctcagattctgcatacgtttag

SEQ ID NO: 205032 - DNA, 966 bp, Artificial Sequence
  derived and/or modified sequence
atgggagaatggacaatcctcgaacgactccttgaggcggctgtccagcagcactctacgatgatcggaaggatcctactgactgtggttgtgatcttccgaatcctgatagtggctattgtgggggaaaccgtgtacgatgacgagcagactatgttcgtgtgcaataccctgcagccagggtgcaaccaggcatgttacgatcgggcttttccaatctcccacatccgatattgggtgtttcagatcatcatggtttgcacacctagtttgtgcttcattacctactctgtccaccagtcggctaagcagcgggagagacgttatagcaccgttttcctggccctggatcgagacccgcctgaaagcatcgggggaccagggggaacaggaggcggaggctccgggggaggcaaacgcgaggacaaaaaactccagaatgccatcgtcaatggcgtgctgcagaacaccgaaaataccagcaaggagactgaacccgactgcctggaagtgaaagagctgactcctcatccctctggcctcagaactgcatcaaagagtaaattacggcgtcaggaaggcattagcaggttctatattatccaagtagtgttccgcaacgctctggaaatcggattcctcgtcggccagtacttcttgtacgggttttcagtcccagggttgtatgaatgcaatcgatatccttgcatcaaggaagtagaatgctacgtcagtaggcctactgagaagactgtctttctggtctttatgtttgcggtatcggggatctgtgtcgtgttgaacctggctgagctgaaccacctaggttggcgaaagattaagctagccgttaggggtgctcaggccaaacgtaagtctatatacgaaattagaaacaaggatttgccacgggtgtcagttccgaacttcggacgtacccagtcgagcgatagcgcgtacgtgtag

SEQ ID NO: 205033 - DNA, 966 bp, Artificial Sequence
  derived and/or modified sequence
atgggcgagtggaccatcctggagagactgctggaggccgccgtgcagcagcacagcaccatgatcggcagaatcctgctgaccgtggtggtgatcttcagaatcctgatcgtggccatcgtgggcgagaccgtgtacgacgacgagcagaccatgttcgtgtgcaacaccctgcagcccggctgcaaccaggcctgctacgacagagccttccccatcagccacatcagatactgggtgttccagatcatcatggtgtgcacccccagcctgtgcttcatcacctacagcgtgcaccagagcgccaagcagagagagagaagatacagcaccgtgttcctggccctggacagagacccccccgagagcatcggcggccccggcggcaccggcggcggcggcagcggcggcggcaagagagaggacaagaagctgcagaacgccatcgtgaacggcgtgctgcagaacaccgagaacaccagcaaggagaccgagcccgactgcctggaggtgaaggagctgaccccccaccccagcggcctgagaaccgccagcaagagcaagctgagaagacaggagggcatcagcagattctacatcatccaggtggtgttcagaaacgccctggagatcggcttcctggtgggccagtacttcctgtacggcttcagcgtgcccggcctgtacgagtgcaacagatacccctgcatcaaggaggtggagtgctacgtgagcagacccaccgagaagaccgtgttcctggtgttcatgttcgccgtgagcggcatctgcgtggtgctgaacctggccgagctgaaccacctgggctggagaaagatcaagctggccgtgagaggcgcccaggccaagagaaagagcatctacgagatcagaaacaaggacctgcccagagtgagcgtgcccaacttcggcagaacccagagcagcgacagcgcctacgtgtag

SEQ ID NO: 205034 - protein, 198 aa, Artificial Sequence [sequence omitted]

SEQ ID NO: 205035 - DNA, 597 bp, Artificial Sequence
  derived and/or modified sequence
atggactccctcctcatgaatcgcagaaagttcctctaccagttcaagaacgtacgctgggccaagggcaggagggagacctacctctgctatgtggtgaagcgacgagatagtgcaacctcattttcactggactttggctacctccgcaacaaaaacggctgccatgttgaactcctctttctgcggtacatcagtgactgggatctggaccctgggcgttgctacagggttacctggttcaccagctggtctccatgttatgattgtgccaggcatgttgccgattttttaagaggaaatccaaatctcagcttaaggatcttcactgcccgactgtatttctgtgaggacaggaaggctgaaccggagggcctgaggaggctacaccgtgctggcgtccagatcgccattatgacctttaaagattacttctactgttggaatacattcgtcgagaaccatgagagaactttcaaagcatgggagggcctgcacgagaactccgtcagattaagcagacagctgcgcagaattcttcttcccttgtacgaagtagacgacttgcgggacgccttccgcaccctaggattgtag

SEQ ID NO: 205036 - DNA, 597 bp, Artificial Sequence
  derived and/or modified sequence
atggacagcctgctgatgaacagaagaaagttcctgtaccagttcaagaacgtgagatgggccaagggcagaagagagacctacctgtgctacgtggtgaagagaagagacagcgccaccagcttcagcctggacttcggctacctgagaaacaagaacggctgccacgtggagctgctgttcctgagatacatcagcgactgggacctggaccccggcagatgctacagagtgacctggttcaccagctggagcccctgctacgactgcgccagacacgtggccgacttcctgagaggcaaccccaacctgagcctgagaatcttcaccgccagactgtacttctgcgaggacagaaaggccgagcccgagggcctgagaagactgcacagagccggcgtgcagatcgccatcatgaccttcaaggactacttctactgctggaacaccttcgtggagaaccacgagagaaccttcaaggcctgggagggcctgcacgagaacagcgtgagactgagcagacagctgagaagaatcctgctgcccctgtacgaggtggacgacctgagagacgccttcagaaccctgggcctgtag

SEQ ID NO: 205037 - DNA, 597 bp, Artificial Sequence
  derived and/or modified sequence
atggatagcctgctgatgaataggaggaagtttctgtatcagttcaagaatgtacggtgggccaaaggtcgacgggagacatatctgtgctacgtagtcaagagacgggactcagctactagcttctctctggacttcggctacctcaggaacaagaacggatgccatgttgagctcctgttcctgaggtacatttccgactgggatctcgatccgggtcggtgctaccgggtcacttggtttaccagctggtccccgtgctatgattgtgctaggcatgttgctgacttcctgcgtggaaaccctaatctcagcctgagaatttttactgcaaggttatatttctgtgaagaccggaaagctgaacccgaaggtctgcgcagactccatcgtgcgggagtgcagattgcaatcatgacatttaaagattacttttactgttggaacacatttgtagagaatcatgagaggacatttaaggcctgggaaggcctgcacgaaaactctgtaaggctgagcagacaactgcgcagaatcctcctgcctctctacgaggtggatgacttaagagatgcctttcgcaccctaggcctttag

SEQ ID NO: 205038 - DNA, 597 bp, Artificial Sequence
  derived and/or modified sequence
atggacagcctgctgatgaacagaaggaagttcctgtaccagttcaagaatgtgcgctgggccaagggccggcgggagacctacctgtgctacgtggtgaagagaagagacagcgccaccagcttcagcctggactttggctacctgaggaacaagaatggctgccacgtggagctgctcttcctgcgctacatcagtgactgggacctggaccccggccgctgctacagagtgacctggttcacctcctggagcccctgctatgactgtgcccggcacgtggccgacttcctgcggggcaaccccaacctgagcctgcgcatcttcaccgcccggctgtacttctgtgaggacaggaaggccgagcctgagggcctgcggcggctgcaccgggccggcgtgcagatcgccatcatgaccttcaaggactacttctactgctggaacacctttgtggagaaccacgagaggaccttcaaggcctgggagggcctgcatgaaaattctgtgcggctgagccggcagctgcggcgcatcctgctgcccctgtatgaggtggatgacctgagagatgccttccgcaccctgggcctgtag

SEQ ID NO: 205039 - DNA, 597 bp, Artificial Sequence
  derived and/or modified sequence
atggacagcctgctgatgaaccggcggaagttcctgtaccagttcaagaatgtgagatgggctaaaggacggcgagagacctatttgtgctacgtggttaagcggagagacagcgctacctcattcagcttagacttcggatatctccgtaacaagaatgggtgccatgtagaactgctgtttctcagatatattagtgactgggatctggatcccggcagatgttatcgcgtgacttggtttacttcctggtccccctgctatgactgcgccaggcacgtggctgacttcctgagggggaatcctaacctctcactccggatttttacagcccgcctttacttttgtgaggatagaaaagcagaacctgaggggctgaggcgtcttcaccgggcaggggtgcagatcgcaatcatgacatttaaggactacttctactgttggaacacattcgtagagaaccacgagcgaacatttaaagcttgggagggcctgcatgagaactccgtgaggctgtctcgtcagctaaggagaatccttctgcccctgtacgaggtcgacgacctccgggatgctttccggaccttggggctttag

SEQ ID NO: 205040 - DNA, 2819 bp, Artificial Sequence
  derived and/or modified sequence
ggccaatgcactgtcagactaagacagagaaccatcattaattgaagtgagatttttctggcctgagacttgcagggaggcaagaagacactctggacaccactatggacagcctcttgatgaaccggaggaagtttctttaccaattcaaaaatgtccgctgggctaagggtcggcgtgagacctacctgtgctacgtagtgaagaggcgtgacagtgctacatccttttcactggactttggttatcttcgcaataagaacggctgccacgtggaattgctcttcctccgctacatctcggactgggacctagaccctggccgctgctaccgcgtcacctggttcacctcctggagcccctgctacgactgtgcccgacatgtggccgactttctgcgagggaaccccaacctcagtctgaggatcttcaccgcgcgcctctacttctgtgaggaccgcaaggctgagcccgaggggctgcggcggctgcaccgcgccggggtgcaaatagccatcatgaccttcaaagattatttttactgctggaatacttttgtagaaaaccacgaaagaactttcaaagcctgggaagggctgcatgaaaattcagttcgtctctccagacagcttcggcgcatccttttgcccctgtatgaggttgatgacttacgagacgcatttcgtactttgggactttgatagcaacttccaggaatgtcacacacgatgaaatatctctgctgaagacagtggataaaaaacagtccttcaagtcttctctgtttttattcttcaactctcactttcttagagtttacagaaaaaatatttatatacgactctttaaaaagatctatgtcttgaaaatagagaaggaacacaggtctggccagggacgtgctgcaattggtgcagttttgaatgcaacattgtcccctactgggaataacagaactgcaggacctgggagcatcctaaagtgtcaacgtttttctatgacttttaggtaggatgagagcagaaggtagatcctaaaaagcatggtgagaggatcaaatgtttttatatcaacatcctttattatttgattcatttgagttaacagtggtgttagtgatagatttttctattcttttcccttgacgtttactttcaagtaacacaaactcttccatcaggccatgatctataggacctcctaatgagagtatctgggtgattgtgaccccaaaccatctctccaaagcattaatatccaatcatgcgctgtatgttttaatcagcagaagcatgtttttatgtttgtacaaaagaagattgttatgggtggggatggaggtatagaccatgcatggtcaccttcaagctactttaataaaggatcttaaaatgggcaggaggactgtgaacaagacaccctaataatgggttgatgtctgaagtagcaaatcttctggaaacgcaaactcttttaaggaagtccctaatttagaaacacccacaaacttcacatatcataattagcaaacaattggaaggaagttgcttgaatgttggggagaggaaaatctattggctctcgtgggtctcttcatctcagaaatgccaatcaggtcaaggtttgctacattttgtatgtgtgtgatgcttctcccaaaggtatattaactatataagagagttgtgacaaaacagaatgataaagctgcgaaccgtggcacacgctcatagttctagctgcttgggaggttgaggagggaggatggcttgaacacaggtgttcaaggccagcctgggcaacataacaagatcctgtctctcaaaaaaaaaaaaaaaaaaaagaaagagagagggccgggcgtggtggctcacgcctgtaatcccagcactttgggaggccgagccgggcggatcacctgtggtcaggagtttgagaccagcctggccaacatggcaaaaccccgtctgtactcaaaatgcaaaaattagccaggcgtggtagcaggcacctgtaatcccagctacttgggaggctgaggcaggagaatcgcttgaacccaggaggtggaggttgcagtaagctgagatcgtgccgttgcactccagcctgggcgacaagagcaagactctgtctcagaaaaaaaaaaaaaaaagagagagagagagaaagagaacaatatttgggagagaaggatggggaagcattgcaaggaaattgtgctttatccaacaaaatgtaaggagccaataagggatccctatttgtctcttttggtgtctatttgtccctaacaactgtctttgacagtgagaaaaatattcagaataaccatatccctgtgccgttattacctagcaacccttgcaatgaagatgagcagatccacaggaaaacttgaatgcacaactgtcttattttaatcttattgtacataagtttgtaaaagagttaaaaattgttacttcatgtattcatttatattttatattattttgcgtctaatgattttttattaacatgatttccttttctgatatattgaaatggagtctcaaagcttcataaatttataactttagaaatgattctaataacaacgtatgtaattgtaacattgcagtaatggtgctacgaagccatttctcttgatttttagtaaacttttatgacagcaaatttgcttctggctcactttcaatcagttaaataaatgataaataattttggaagctgtgaagataaaataccaaataaaataatataaaagtgatttatatgaagttaaaataaaaaatcagtatgatggaataaacttg

SEQ ID NO: 205041 - protein, 443 aa, Artificial Sequence
  derived and/or modified sequence
MECLRSLPCLLPRAMRLPRRTLCALALDVTSVGPPVAACGRRANLIGRSRAAQLCGPDRLRVAGEVHRFRTSDVSQATLASVAPVFTVTKFDKQGNVTSFERKKTELYQELGLQARDLRFQHVMSITVRNNRIIMRMEYLKAVITPECLLILDYRNLNLEQWLFRELPSQLSGEGQLVTYPLPFEFRAIEALLQYWINTLQGKLSILQPLILETLDALVDPKHSSVDRSKLHILLQNGKSLSELETDIKIFKESILEILDEEELLEELCVSKWSDPQVFEKSSAGIDHAEEMELLLENYYRLADDLSNAARELRVLIDDSQSIIFINLDSHRNVMMRLNLQLTMGTFSLSLFGLMGVAFGMNLESSLEEDHRIFWLITGIMFMGSGLIWRRLLSFLGRQLEAPLPPMMASLPKKTLLADRSMELKNSLRLDGLGSGRSILTNR

SEQ ID NO: 205042 - DNA, 1332 bp, Artificial Sequence
  derived and/or modified sequence
atggagtgcctgagaagcctgccctgcctgctgcccagagccatgagactgcccagaagaaccctgtgcgccctggccctggacgtgaccagcgtgggcccccccgtggccgcctgcggcagaagagccaacctgatcggcagaagcagagccgcccagctgtgcggccccgacagactgagagtggccggcgaggtgcacagattcagaaccagcgacgtgagccaggccaccctggccagcgtggcccccgtgttcaccgtgaccaagttcgacaagcagggcaacgtgaccagcttcgagagaaagaagaccgagctgtaccaggagctgggcctgcaggccagagacctgagattccagcacgtgatgagcatcaccgtgagaaacaacagaatcatcatgagaatggagtacctgaaggccgtgatcacccccgagtgcctgctgatcctggactacagaaacctgaacctggagcagtggctgttcagagagctgcccagccagctgagcggcgagggccagctggtgacctaccccctgcccttcgagttcagagccatcgaggccctgctgcagtactggatcaacaccctgcagggcaagctgagcatcctgcagcccctgatcctggagaccctggacgccctggtggaccccaagcacagcagcgtggacagaagcaagctgcacatcctgctgcagaacggcaagagcctgagcgagctggagaccgacatcaagatcttcaaggagagcatcctggagatcctggacgaggaggagctgctggaggagctgtgcgtgagcaagtggagcgacccccaggtgttcgagaagagcagcgccggcatcgaccacgccgaggagatggagctgctgctggagaactactacagactggccgacgacctgagcaacgccgccagagagctgagagtgctgatcgacgacagccagagcatcatcttcatcaacctggacagccacagaaacgtgatgatgagactgaacctgcagctgaccatgggcaccttcagcctgagcctgttcggcctgatgggcgtggccttcggcatgaacctggagagcagcctggaggaggaccacagaatcttctggctgatcaccggcatcatgttcatgggcagcggcctgatctggagaagactgctgagcttcctgggcagacagctggaggcccccctgccccccatgatggccagcctgcccaagaagaccctgctggccgacagaagcatggagctgaagaacagcctgagactggacggcctgggcagcggcagaagcatcctgaccaacagatag

SEQ ID NO: 205043 - DNA, 1332 bp, Artificial Sequence
  derived and/or modified sequence
atggaatgtttgcgttcactcccttgtcttcttcctcgggccatgcgcttaccgaggaggacactctgcgccctggcactggatgttacatccgtcggtccgcctgtggctgcttgcgggagacgggccaacctgattgggcgttcccgggctgctcagctgtgcggcccggatagactcagagttgccggagaggtccataggttccggaccagcgatgtctcccaggccacactggcttctgtcgccccagtgttcaccgtcacgaaatttgataagcaggggaacgtaacttctttcgaacggaagaaaaccgagttgtatcaggaactgggcctgcaggcccgcgatctaagattccagcacgttatgagtatcaccgtgaggaacaaccgcatcatcatgcggatggaatacctcaaggctgtgataactccagagtgcctcctgatcctggattaccggaatttgaatctagaacaatggctgtttcgcgaactcccaagccagctaagtggcgagggccaattggtgacctatccgctcccgtttgaattcagggctatagaggcccttctccagtactggatcaatacactgcagggtaagctgtccatcctccagccactgatactggaaaccctggatgcgctagtcgacccaaagcactcgtctgtcgatcgatcgaagttgcatatactcctgcagaacggcaagtccttgtcagagctggaaacagatattaagatcttcaaggaatcaatcctggagatactagacgaggaagagcttctagaagaattgtgcgtaagtaaatggagcgatcctcaggtttttgaaaaatcctctgctggcatcgatcacgcggaagagatggaacttttgttggagaactactataggttagctgatgacctttctaatgcagccagggagctgcgcgtgctgatcgacgatagccagagtataattttcataaatctcgattcccatcggaacgttatgatgagacttaacctccaattaactatggggactttcagcctatctctgttcggcctcatgggagtggctttcggcatgaacctagagtcttcgctggaagaggaccacagaattttttggctgattaccggtatcatgttcatgggatctgggctgatctggagaagactcttgagctttctaggccgccagctagaagcgccgttaccaccaatgatggccagcctgcccaagaaaacactcttggctgatcgctccatggagctgaaaaattcacttcggctggacggcctcggctcagggagatcgattcttactaatagatag

SEQ ID NO: 205044 - DNA, 1332 bp, Artificial Sequence
  derived and/or modified sequence
atggagtgcctgcggagcctgccctgcctgctgccccgggccatgaggctgcccaggaggaccctgtgtgccctggccctggatgtgacctctgtgggcccccctgtggccgcctgtggcagaagagccaacctgattggccgcagcagagctgcccagctgtgtggccctgaccggctgcgggtggccggggaggtgcaccgcttccgcaccagtgatgtgtcccaggccaccctggcctctgtggcccctgtgttcaccgtgaccaagtttgacaagcagggcaatgtgaccagctttgagaggaagaagacagagctgtaccaggagctgggcctgcaggcccgggacctgcgcttccagcacgtgatgagcatcaccgtgaggaacaaccgcatcatcatgaggatggagtacctgaaggccgtcatcaccccagaatgtctgctgatcctggactacagaaacctgaacctggagcagtggctgttccgggagctgcccagccagctgagcggggagggccagctggtgacctaccccctgccctttgagttccgggccatcgaggccctgctgcagtactggatcaacaccctgcagggcaagctgagcatcctgcagcccctcatcctggagaccctggatgccctggtggaccccaagcacagctctgtggacaggagcaagctgcacatcctgctgcagaatggcaagagcctgtctgagctggagacagacatcaagatcttcaaggagagcatcctggagatcctggatgaggaggagctgctggaggagctgtgtgtgtccaagtggagcgacccccaggtgtttgagaagagcagcgctggcatcgaccatgctgaggagatggagctgctgctggagaactactaccgcctggctgatgacctgagcaatgctgcccgggagctgcgggtgctgattgatgacagccagagcatcatcttcatcaacctggacagccacagaaatgtgatgatgaggctgaacctgcagctgaccatgggcaccttcagcctgagcctgtttggcctgatgggcgtggccttcggcatgaacctggagagcagcctggaggaggaccaccgcatcttctggctgatcaccggcatcatgttcatgggcagcggcctcatctggaggcggctgctgtccttcctgggccggcagctggaggcccccctgccccccatgatggccagcctgcccaagaagaccctgctggccgaccgctccatggagctgaagaacagcctgcggctggatggcctgggcagcggccgcagcatcctgaccaacagatag

SEQ ID NO: 205045 - DNA, 3228 bp, Artificial Sequence
  derived and/or modified sequence
atgcctggtgcacagagtctgcaggtcgggcggtagcgacaggtcagagctgcggcctgagcagccagcgtccggcatgaaggtctggggtctggctgctgcctgcttcttgctccagcaccatggaatgcctgcgcagtttaccctgcctcctgccccgcgcgatgagacttccccggcggacgctgtgtgccctggccttggacgtgacctctgtgggtcctcccgttgctgcctgcggccgccgagccaacctgattggaaggagccgagcggcgcagctttgcgggcccgaccggctccgcgtggcaggtgaagtgcaccggtttagaacctctgacgtctctcaagccactttagccagtgtagccccagtatttactgtgacaaaatttgacaaacagggaaacgttacttcttttgtatttgaaagctgtgataactccagagtgtcttctgatattagattatcgtaatttaaacttagagcaatggctgttccgggaactcccttcacagttgtctggagagggtcaactcgttacataccctttaccttttgagtttagagctatagaagcactcctgcaatattggatcaacacccttcaggggaaacttagcattttgcagccactgatccttgagaccttggatgctttggtggaccccaaacattcttctgtagacagaagcaaactgcacattttactacagaatggcaaaagtctatcagagttagaaacagatattaaaattttcaaagagtcaattttggagatcttggatgaggaagagttgctagaagagctctgtgtatcaaaatggagtgacccacaagtctttgaaaagagcagtgctgggattgaccatgcagaagagatggagttgctgttggaaaactactaccgattggctgacgatctctccaatgcagctcgtgagcttagggtgctgattgatgattcacaaagtattattttcattaatctggacagccaccgaaacgtgatgatgaggttgaatctacagctgaccatgggaaccttctctctttcgctctttggactaatgggagttgcttttggaatgaatttggaatcttcccttgaagaggaccatagaattttttggctgattacaggaattatgttcatgggaagtggcctcatctggaggcgcctgctttcattccttggacgacagctagaagctccattgcctcctatgatggcttctttacctaaaaagactcttctggcagatagaagcatggaattgaaaaatagcctcagactggatggacttggatcaggaaggagcatcctaacaaaccgttaggaacagccccgtggatactgaagttttttttatggtagttacaggaaacttctgatactctttttattattttcttgtatagagtcagacacttgaaaaaaactaatgtttgaagacaaaaatattttggcagtcacaataccagaactggattgcatttccagaattctgagttaaagaaacaaagtatttgctttgtaaaaggccaaaattctatttcctacaaactttaaatgctgtttttatagatgtgatatgaggcaacacaagcacagacagttgcatagattttaatttatacatatcaagaaaagtgcaatttcatgctgaatgaagcgtaggaacttgacaagcccataggtagctatagttctttgtcagtatagggaattatgttcatgtgaatttcctgattctcaggtgactaaaaagctagcattctatgtattaaccttacaacagactctgtaagtttgagctttaaaaaccaaactttgacataaccttatttcttgtatttgcccccttttttttataaaaggtgaataaaaagaaataatttaatatcaccattgtatggattcctaatcaagatttcacgttctcagcccctgagactagttttctttgctctctgtaattagagcctttggaagcaaagttgaaaggaagtatttccattctgttactgttttgtagcactttgtccatttattgatttttaaagtagatatttagataccacccctgccctgccccaaaaagaaaaatgtttattgtcctgctaatctatatgcctacacctcagaagctgacagatgagcttcctaaaacatgaggatgaataaatgttagaactgtgatatcttctcatttccacagagatttgggtttaaaacaaatggctaatatttgtaagcctgaaagctgccatcctctttaacatcctacctaccttttaaaatattttctggaggttaagtacagttaggcactagaacatttgttaagcctcccaaagtagtgtgcatggaagattctagagtgtccagctcttgcactacaaatgtaataataacagaataaatacacttaccctgatgatattgagggtacatgattagcctaatgtgatgtcatatgaggaagtttaggagtccatttttcaggtggtttggtgataggaataaaaatgttactcccgtcgctgatttggaagaaaaccgatgaagtacaagtaaggtttccccactcctgtgtgtggtcatgggaagccattagagggaagctgcagaacagaatggaacaggacaggctgggctagactcgagcacgcagtggcccctgtgccaccacactgtgggtcaggaacacgcgtcatggtgttcttgtcggaatgtgaacatacagcaccctctagcattacgaatctcttaggatttttaagattgtatttgataatacttatatttcacagggcacacttttggcacacctcagagcacactgctgctattttgggtcgtatcactgtaaaatacataataagtactacttaactgtgacatgaagaattggaatcccagagggcaacatttgatttgactaagatcaggcataagatagaatttttgtcatttttccttgcagttttattgacttagtttatgagcttggataaaataattttttgatgaatcatgtcaataaaaggaaaaataatgtaactacctcataagtctgataaaaggaagttgctagtgttttatagaatttctgaaggtggttaaatcaagtatgatttcaaaatatcaactagttccacttttgtgattgcaggatgcttcttatactaaagttctcataaataataaatcagcttatgcc

SEQ ID NO: 205046 - DNA, 3313 bp, Artificial Sequence
  derived and/or modified sequence
gcggtagcgacaggtcagagctgcggcctgagcagccagcgtccggcatgaaggtctggggtctggctgctgcctgcttcttgctccagcaccatggaatgcctgcgcagtttaccctgcctcctgccccgcgcgatgagacttccccggcggacgctgtgtgccctggccttggacgtgacctctgtgggtcctcccgttgctgcctgcggccgccgagccaacctgattggaaggagccgagcggcgcagctttgcgggcccgaccggctccgcgtggcaggtgaagtgcaccggtttagaacctctgacgtctctcaagccactttagccagtgtagccccagtatttactgtgacaaaatttgacaaacagggaaacgttacttcttttgaaaggaagaaaactgaattataccaagagttaggtcttcaagccagagatttgagatttcagcatgtaatgagtatcacagtcagaaacaataggattatcatgagaatggagtatttgaaagctgtgataactccagagtgtcttctgatattagattatcgtaatttaaacttagagcaatggctgttccgggaactcccttcacagttgtctggagagggtcaactcgttacataccctttaccttttgagtttagagctatagaagcactcctgcaatattggatcaacacccttcaggggaaacttagcattttgcagccactgatccttgagaccttggatgctttggtggaccccaaacattcttctgtagacagaagcaaactgcacattttactacagaatggcaaaagtctatcagagttagaaacagatattaaaattttcaaagagtcaattttggagatcttggatgaggaagagttgctagaagagctctgtgtatcaaaatggagtgacccacaagtctttgaaaagagcagtgctgggattgaccatgcagaagagatggagttgctgttggaaaactactaccgattggctgacgatctctccaatgcagctcgtgagcttagggtgctgattgatgattcacaaagtattattttcattaatctggacagccaccgaaacgtgatgatgaggttgaatctacagctgaccatgggaaccttctctctttcgctctttggactaatgggagttgcttttggaatgaatttggaatcttcccttgaagaggaccatagaattttttggctgattacaggaattatgttcatgggaagtggcctcatctggaggcgcctgctttcattccttggacgacagctagaagctccattgcctcctatgatggcttctttacctaaaaagactcttctggcagatagaagcatggaattgaaaaatagcctcagactggatggacttggatcaggaaggagcatcctaacaaaccgttaggaacagccccgtggatactgaagttttttttatggtagttacaggaaacttctgatactctttttattattttcttgtatagagtcagacacttgaaaaaaactaatgtttgaagacaaaaatattttggcagtcacaataccagaactggattgcatttccagaattctgagttaaagaaacaaagtatttgctttgtaaaaggccaaaattctatttcctacaaactttaaatgctgtttttatagatgtgatatgaggcaacacaagcacagacagttgcatagattttaatttatacatatcaagaaaagtgcaatttcatgctgaatgaagcgtaggaacttgacaagcccataggtagctatagttctttgtcagtatagggaattatgttcatgtgaatttcctgattctcaggtgactaaaaagctagcattctatgtattaaccttacaacagactctgtaagtttgagctttaaaaaccaaactttgacataaccttatttcttgtatttgcccccttttttttataaaaggtgaataaaaagaaataatttaatatcaccattgtatggattcctaatcaagatttcacgttctcagcccctgagactagttttctttgctctctgtaattagagcctttggaagcaaagttgaaaggaagtatttccattctgttactgttttgtagcactttgtccatttattgatttttaaagtagatatttagataccacccctgccctgccccaaaaagaaaaatgtttattgtcctgctaatctatatgcctacacctcagaagctgacagatgagcttcctaaaacatgaggatgaataaatgttagaactgtgatatcttctcatttccacagagatttgggtttaaaacaaatggctaatatttgtaagcctgaaagctgccatcctctttaacatcctacctaccttttaaaatattttctggaggttaagtacagttaggcactagaacatttgttaagcctcccaaagtagtgtgcatggaagattctagagtgtccagctcttgcactacaaatgtaataataacagaataaatacacttaccctgatgatattgagggtacatgattagcctaatgtgatgtcatatgaggaagtttaggagtccatttttcaggtggtttggtgataggaataaaaatgttactcccgtcgctgatttggaagaaaaccgatgaagtacaagtaaggtttccccactcctgtgtgtggtcatgggaagccattagagggaagctgcagaacagaatggaacaggacaggctgggctagactcgagcacgcagtggcccctgtgccaccacactgtgggtcaggaacacgcgtcatggtgttcttgtcggaatgtgaacatacagcaccctctagcattacgaatctcttaggatttttaagattgtatttgataatacttatatttcacagggcacacttttggcacacctcagagcacactgctgctattttgggtcgtatcactgtaaaatacataataagtactacttaactgtgacatgaagaattggaatcccagagggcaacatttgatttgactaagatcaggcataagatagaatttttgtcatttttccttgcagttttattgacttagtttatgagcttggataaaataattttttgatgaatcatgtcaataaaaggaaaaataatgtaactacctcataagtctgataaaaggaagttgctagtgttttatagaatttctgaaggtggttaaatcaagtatgatttcaaaatatcaactagttccacttttgtgattgcaggatgcttcttatactaaagttctcataaataataaatcagcttatgcca

SEQ ID NO: 205047 - DNA, 1332 bp, Artificial Sequence
  derived and/or modified sequence
atggagtgcctgcggagcctgccctgcctgctgccccgggccatgcgattaccacggcgtactttgtgtgccctggctctcgatgtgacctccgtagggcctcccgtggcagcctgcgggcgacgagccaatctaatcggaagaagtcgtgccgcacagttgtgcggaccagatcgcctgagggtggcgggcgaagtacataggttccggacctcagatgtgtctcaagcgacactggcttcagtggcacctgtgtttacggtgactaaatttgataagcagggcaacgtcacatccttcgagaggaaaaaaactgaattatatcaggaactgggcctgcaagcccgggatcttagatttcagcatgtgatgtctattactgtcaggaacaatcgcattatcatgcgaatggaatacttgaaggcggttatcacccccgagtgtcttttgattctggactacaggaacttaaacctcgaacagtggctgtttagggagttgccgagccagctatccggcgagggccagttggtcacgtacccacttcccttcgaattcagggccattgaagctctgttgcagtactggattaacacacttcaggggaagctcagtatactgcaacccctcattctggagactctggacgccctagtggatccgaaacatagcagcgtagatcgatccaaactgcatatcctgctgcagaatggcaaaagcctgtccgagctagagacagatatcaaaatcttcaaggagtccattctggagattctcgacgaggaagagctgctcgaagagctgtgtgtgtctaagtggtccgatcctcaggtcttcgagaagtcatctgcaggcattgatcacgccgaagagatggaactccttctagagaattactaccgcctagcagatgacctctcaaatgctgcccgggagctacgagtgctgattgacgactctcagagcatcattttcattaacttggacagtcacaggaacgtgatgatgcgcctcaaccttcagctcactatggggactttctccctgtccctgttcggtcttatgggagtagcatttgggatgaacctcgaaagtagtttggaagaagatcaccgcattttttggctcatcactggtatcatgtttatggggtccggcctcatctggcggcgccttctgagcttcctcgggcgacagctggaggctccactgcctcctatgatggccagcctgcccaaaaagacattattggccgatcgcagtatggagctgaagaattccttgcgcctagatggtctcggttctggtcggagtattctcaccaacagatag

SEQ ID NO: 205048 - DNA, 1332 bp, Artificial Sequence
  derived and/or modified sequence
atggagtgcctgcgttcccttccttgccttctgccacgtgccatgaggctccctcgcagaaccctgtgtgcactagccttagacgtcacctccgtgggtccacccgtagctgcctgcggccgaagggcaaatctcataggtcggagccgtgcggcacagctgtgcgggcctgacagactgagggtcgccggagaggttcatcgatttcggacgtccgacgtttcccaagctacactcgctagtgtggctccagtatttaccgtcactaaatttgacaaacagggtaatgtcacaagcttcgaacggaagaaaacagagctgtatcaggagctgggcctccaggccagagacctgagattccagcatgtgatgtcgatcactgtcagaaacaaccggattatcatgcgaatggaataccttaaggcagtgatcacaccggaatgcctgcttattcttgattatagaaacctgaatttggaacagtggctgttcagagagttgcccagccagctctcaggcgaaggccagctggtgacctacccactgccgttcgagttcagggcaatagaagccctactgcagtattggatcaacactctacaagggaaactttctatacttcagcctctgatcctggaaaccttggacgccctggtggacccaaagcatagcagcgtagaccgctccaagcttcacatcctgctgcagaacgggaaatcgctgagcgaactcgagactgatattaaaatttttaaagagtccatcttggaaattctcgacgaggaggaactgctcgaggaattgtgtgtcagcaaatggtccgatccccaggtgttcgaaaaatcatcggccggaattgaccacgcggaagaaatggagttgctcttagagaactactatcgacttgctgatgatctttctaacgccgcacgggaactaagggtgttgatcgacgactctcagagcatcattttcattaatctcgactctcacaggaacgttatgatgcggctgaacctgcagctcacaatggggacgttcagtttgtcgctcttcggactgatgggcgtggcatttggtatgaacctcgagagctctctggaggaggaccaccgaatcttctggctgatcaccggaattatgttcatgggaagcggactgatctggaggagacttttgagctttctaggcagacagcttgaggcccctctacccccaatgatggccagcctacccaagaagactctattagccgatcgatccatggagctcaaaaactcacttcggctcgatggtctcgggagcgggaggtcaattctcacgaatcggtag

SEQ ID NO: 205049 - protein, 214 aa, Artificial Sequence
  derived and/or modified sequence
MNCKEGTDSSCGCRGNDEKKMLKCVVVGDGAVGKTCLLMSYANDAFPEEYVPTVFDHYAVTVTVGGKQHLLGLYDTAGQEDYNQLRPLSYPNTDVFLICFSVVNPASYHNVQEEWVPELKDCMPHVPYVLIGTQIDLRDDPKTLARLLYMKEKPLTYEHGVKLAKAIGAQCYLECSALTQKGLKAVFDEAILTIFHPKKKKKRCSEGHSCCSII

SEQ ID NO: 205050 - DNA, 645 bp, Artificial Sequence
  derived and/or modified sequence
atgaactgcaaggagggcaccgacagcagctgcggctgcagaggcaacgacgagaagaagatgctgaagtgcgtggtggtgggcgacggcgccgtgggcaagacctgcctgctgatgagctacgccaacgacgccttccccgaggagtacgtgcccaccgtgttcgaccactacgccgtgaccgtgaccgtgggcggcaagcagcacctgctgggcctgtacgacaccgccggccaggaggactacaaccagctgagacccctgagctaccccaacaccgacgtgttcctgatctgcttcagcgtggtgaaccccgccagctaccacaacgtgcaggaggagtgggtgcccgagctgaaggactgcatgccccacgtgccctacgtgctgatcggcacccagatcgacctgagagacgaccccaagaccctggccagactgctgtacatgaaggagaagcccctgacctacgagcacggcgtgaagctggccaaggccatcggcgcccagtgctacctggagtgcagcgccctgacccagaagggcctgaaggccgtgttcgacgaggccatcctgaccatcttccaccccaagaagaagaagaagagatgcagcgagggccacagctgctgcagcatcatctag

SEQ ID NO: 205051 - DNA, 645 bp, Artificial Sequence
  derived and/or modified sequence
atgaattgcaaggaagggactgattcatcttgtggatgcagggggaacgatgagaagaaaatgctgaagtgtgtggtcgtgggggatggagctgtgggaaaaacctgcctcctgatgagttacgccaacgatgcattcccagaggagtatgtccctactgtgttcgatcattacgccgtgaccgttactgtgggcggcaagcagcatctgctggggctttacgacaccgcaggtcaggaggattacaatcagctgaggcctttgagttaccccaacactgatgtgttcctcatttgcttctctgttgtgaaccctgccagctatcataacgtccaagaggagtgggtccctgagttaaaggactgtatgccccacgttccttatgtgctgattgggacgcagatcgacctgcgcgatgatcctaagactttagcccgcttactgtatatgaaagagaaaccattgacgtacgaacatggtgtgaaactggccaaggctatcggagcccaatgttatctagagtgtagcgctctgacccagaagggtcttaaggccgtgtttgacgaagcgatcctgaccatctttcatcctaagaaaaaaaagaaacgttgttccgaaggccattcctgctgctcaatcatttag

SEQ ID NO: 205052 - DNA, 645 bp, Artificial Sequence
  derived and/or modified sequence
atgaactgcaaggagggcacagacagcagctgtggctgcagaggaaatgatgagaagaagatgctgaagtgtgtggtggtgggagatggagctgtgggcaagacctgcctgctgatgtcctatgccaatgatgccttccctgaggagtatgtgcccaccgtgtttgaccactatgctgtgacagtgacagtgggcggcaagcagcacctgctgggcctgtatgacacagctggccaggaggactacaaccagctgcggcccctgagctaccccaacacagatgtgttcctgatctgcttctctgtggtgaacccagccagctaccacaacgtgcaggaggagtgggtgcctgagctgaaggactgcatgcctcatgtgccctacgtgctgattggcacccagattgacctgagagatgaccccaagaccctggcccggctgctgtacatgaaggagaagcccctgacctatgaacatggagtgaagctggccaaggccatcggggcccagtgctacctggagtgcagcgccctgacccagaagggcctgaaggctgtgtttgatgaggccatcctgaccatcttccaccccaagaagaagaagaagcgctgcagcgagggccacagctgctgcagcatcatctag

SEQ ID NO: 205053 - DNA, 645 bp, Artificial Sequence
  derived and/or modified sequence
atgaactgcaaggagggcaccgacagcagctgcggctgccggggcaatgatgaaaagaaaatgctgaaatgtgttgtggtaggtgacggcgccgtgggtaagacctgcctcctgatgtcgtacgcaaatgatgccttccctgaagaatacgttcccactgtattcgaccattacgccgtcacagttaccgtgggtgggaagcaacacctactggggctctatgacaccgcaggccaggaggactacaaccagctaagaccactatcctaccccaatactgatgtgttcttgatttgtttcagcgtcgtgaatcccgctagctatcacaacgttcaggaagagtgggtgcccgagttaaaggactgcatgcctcacgtcccatacgttctcatcggcacgcagatcgatctccgggacgacccaaagacactcgcccgtttgctgtatatgaaggagaagccactcacctacgaacacggggttaaactcgccaaggcgataggcgcacagtgctatctggagtgtagcgctctgacccagaagggtcttaaggccgtgtttgatgaggcaattctcaccatctttcatcctaaaaagaagaagaaacggtgctccgagggacattcttgttgttccatcatatag

SEQ ID NO: 205054 - DNA, 645 bp, Artificial Sequence
  derived and/or modified sequence
atgaactgcaaagaaggtaccgatagcagttgcggctgccgcggtaatgacgaaaaaaagatgctgaagtgtgtggtcgtcggcgacggcgctgtgggcaaaacttgcttactgatgtcttatgcaaacgatgcttttccagaggagtatgtgccgacggtcttcgatcattatgctgtgaccgttacagtcgggggaaagcagcacctcctcggcttgtacgatacggctggccaggaagattataatcagctgcggcctctgtcataccccaatactgatgtgttcctgatatgtttcagcgtcgtaaaccctgccagctatcacaacgtgcaggaagaatgggtgccagagttgaaggactgcatgccacacgtgccatacgtgcttatcggcacccagatcgacttgagggatgatcccaagacactggccaggttgttgtatatgaaggagaagcctttaacatacgagcatggagtcaaactcgccaaggccattggggcacagtgttacctcgagtgttctgcactgacccagaagggcctgaaggcagttttcgacgaggcaatcttaaccatcttccatccaaagaaaaagaaaaaaaggtgcagtgagggacactcttgctgcagtattatttag

SEQ ID NO: 205055 - DNA, 3302 bp, Artificial Sequence
  derived and/or modified sequence
cggcaagctggaggaagcaaagggaaaaaaactccattaaaaagcccagctttcctccatgttagatgtgacttggaaaatgagaaagatttagcaaaattccaccgtatcttttgccaggctagagacagggagagcagagtaaaaccctcaggctgctgaaatttctaggctgttaggaagcccctcgaattctgtgaaaatgagggtttcttaactcacactgagagcggaaaggggcagacccttttcataactccctcaagtgtgtgttacctttctttaccagcatggtaagcaacaggacatatcccagcctcggacatgtctgtatgatccaaggtacccaaagtcagacagagtaaactcaagcctggcactggctttctgccgcttcatgtgctttggaaaaagcaggagaagcaatagcagcaggagtccccagcagctggagccgcaagaatgaactgcaaagagggaactgacagcagctgcggctgcaggggcaacgacgagaagaagatgttgaagtgtgtggtggtgggggacggtgccgtggggaaaacctgcctgctgatgagctacgccaacgacgccttcccagaggaatacgtgcccactgtgtttgaccactatgcagttactgtgactgtgggaggcaagcaacacttgctcggactgtatgacaccgcgggacaggaggactacaaccagctgaggccactctcctaccccaacacggatgtgtttttgatctgcttctctgtcgtaaaccctgcctcttaccacaatgtccaggaggaatgggtccccgagctcaaggactgcatgcctcacgtgccttatgtcctcatagggacccagattgatctccgtgatgacccaaaaaccttggcccgtttgctgtatatgaaagagaaacctctcacttacgagcatggtgtgaagctcgcaaaagcgatcggagcacagtgctacttggaatgttcagctctgactcagaaaggtctcaaagcggtttttgatgaagcaatcctcaccattttccaccccaagaaaaagaagaaacgctgttctgagggtcacagctgctgttcaattatctgaggttgtctgggacctgcctccaccccatccagggatgagaatggcagccaatctctgtggccaagctccagccaaaaaggagggcacgaccagaaaggaactccctttgcacggaggcttgccccatcaccctctgagccctcccaacacagcacactagtcagcccactgccacgacctccctgccagccagaagcatccgtactgcacgctgtctgagaatgctgggcctggattgcagacagtgccgctgctgatcgcatcaaaaacaaagtcaaaggccatctcacattttacaaatccccagctcatgaacgtgaagctgataggaaatcaccccagggaacccgaaaaagaaacttgattcctctattgctggccttacttgatgtcttttataaaacttgggactacaatactaacctttttttctgaatctgctgttctacccatgtgtctcacattcatttgtattatttcaagaaatgtactaatttccagttcactcaggccttactaatccataccaaattagcctaaagacaaggcattttatattcatttctattttcagcatgtttctaccaaagctattagaaccaacacgtacctctgaatgcccgattataagaagacatgagaagactttaaaagttttggaaatttacagagccatgatttttgaacctaattgaaagaaaaccatctgaattgttgcaggtccacatttttgccaaagatacactctatagatgcttagtagtggcctgatttttttccatgtattgccacgacaaactaaaaatgaactgtgtttaagaatgtagtatttctgtttttcatccaagttgattgggggaagaatatggcaggatccatcttttacagtattttgtattcagtaaagtggacattcctgctcctcccttcccccattgcatgccctcttcctcccttgatttcactttctctcatgcccggatccttttattctccccagttataacccagttataaaagaaagatctgagcataaagatacgtgtttaaaaataactaaaagtaaaggaaagtgccttaatttttctatttgcttcaactgaaagtgcttctcagctcgccccatgtaagttctcattccatgtaaatgacattttccagttacaactggtactgagattttgcctctctctttccttactcatcctcccaaatgtctttgtgggagccatatcagtggataccaagctctgtatccatttgtcccctgccctccacaatgtgtgacatagaacagggactttggccctgggaaagcaaaagctcccagtaaggaatcctgtgcccaatgatgtaaaacaattccaaacatccaggaatttttgtatcatagagcgaattacttcctatcttttcattagaggctatgaggacttctaattagtcttagttgcttataagtgccctggaatcacccaggtaggcacttaatttttttttcagttgcatgagcaaagtgcttcttagtagtgtgaaattacaacaactttaagactttccagattcaagctcccactgttggaaaaagccagcctttctaatctcttctgctactggaataagcacttaagaattgcgtgatagccaggcaccgtggctcatgcctgtaatcccaacacttagggaggctgaggtgggtgggccgcttgagctcaggagttcaagaccagcctgggtaatatagtgagatcctgtgtctctataaaaaaattaaaaattagtcagttgtagtgacacatacctgtagtcccagctactcaggaggctgaggtggaaggatcacttgagcccagaaggtaaggctgcagtgagctgtgactgtgccactacactccagcctgagtgacagagaaagaacctgtcaaaaaaaaaaaaaaaacaacctacatttcaagtactatttcccttctctcccatctaattgctaaagattttctttcatacgcacacactccagtgactggaaaaacgggagttttcagtcaaagcttgacatttagagaaaacaaggactttctgcctttataaatggaaatcaactgtgtatgaactataactctgcagaggttatgaattcatcctttacaaacaataatgaacttttagtcctgtaataaatgaaatgttattaggca

SEQ ID NO: 205056 - protein, 222 aa, Artificial Sequence
  derived and/or modified sequence
MLWLLFFLVTAIHAELCQPGAENAFKVRLSIRTALGDKAYAWDTNEEYLFKAMVAFSMRKVPNREATEISHVLLCNVTQRVSFWFVVTDPSKNHTLPAVEVQSAIRMNKNRINNAFFLNDQTLEFLKIPSTLAPPMDPSVPIWIIIFGVIFCIIIVAIALLILSGIWQRRRKNKEPSEVDDAEDKCENMITIENGIPSDPLDMKGGHINDAFMTEDERLTPL

SEQ ID NO: 205057 - DNA, 669 bp, Artificial Sequence
  derived and/or modified sequence
atgctgtggctgctgttcttcctggtgaccgccatccacgccgagctgtgccagcccggcgccgagaacgccttcaaggtgagactgagcatcagaaccgccctgggcgacaaggcctacgcctgggacaccaacgaggagtacctgttcaaggccatggtggccttcagcatgagaaaggtgcccaacagagaggccaccgagatcagccacgtgctgctgtgcaacgtgacccagagagtgagcttctggttcgtggtgaccgaccccagcaagaaccacaccctgcccgccgtggaggtgcagagcgccatcagaatgaacaagaacagaatcaacaacgccttcttcctgaacgaccagaccctggagttcctgaagatccccagcaccctggccccccccatggaccccagcgtgcccatctggatcatcatcttcggcgtgatcttctgcatcatcatcgtggccatcgccctgctgatcctgagcggcatctggcagagaagaagaaagaacaaggagcccagcgaggtggacgacgccgaggacaagtgcgagaacatgatcaccatcgagaacggcatccccagcgaccccctggacatgaagggcggccacatcaacgacgccttcatgaccgaggacgagagactgacccccctgtag

SEQ ID NO: 205058 - DNA, 669 bp, Artificial Sequence
  derived and/or modified sequence
atgctctggctcctgttttttctagttaccgctatacacgcggagctctgccagccaggtgccgaaaacgccttcaaggtgcggctgtccattcgtacagcgctgggcgacaaggcctacgcctgggacaccaacgaggagtacctgtttaaggcgatggtcgccttctcaatgagaaaggttccaaaccgcgaagcaaccgaaatctcccatgtgctcctgtgcaacgtgacacagcgagtcagcttctggtttgtagtgactgacccatctaagaatcatacacttcctgccgtggaagtccagtctgccatcagaatgaataagaacagaattaacaatgcttttttcctaaatgaccagacactcgaattcctgaaaattccctccactctggcaccccctatggacccctccgtgcccatctggataatcattttcggagttatcttctgtattatcatcgtggccattgccctgttgattctgtccggcatctggcagcggagacgcaaaaacaaggagccaagcgaggtcgatgatgctgaggacaaatgtgaaaacatgattactatcgagaatggcatcccttccgatcctttggacatgaagggaggccacattaatgacgcattcatgactgaggatgaacggctgacccccttatag

SEQ ID NO: 205059 - DNA, 669 bp, Artificial Sequence
  derived and/or modified sequence
atgctgtggctgctcttcttcctggtgacagccatccacgccgagctgtgccagcctggagcagaaaatgccttcaaggtgcggctgagcatcagaacagccctgggggacaaggcctatgcctgggacaccaatgaggagtacctgttcaaggccatggtggccttctccatgaggaaggtgcccaaccgggaggccacagagatcagccacgtgctgctgtgcaatgtgacccagagggtgtccttctggtttgtggtgacagaccccagcaagaaccacaccctgcctgctgtggaggtgcagagcgccatccgcatgaacaagaaccgcatcaacaatgccttcttcctgaatgaccagaccctggagttcctgaagatccccagcaccctggccccacccatggaccccagcgtgcccatctggatcatcatctttggagtcatcttctgcatcatcatcgtggccatcgccctgctgatcctgagcggcatctggcagaggaggaggaagaacaaggagcccagcgaggtggatgatgctgaagataaatgtgagaacatgatcaccattgaaaatggcatccccagcgaccccctggacatgaagggcggccacatcaatgatgccttcatgacagaagatgagcggctgacccccctgtag

SEQ ID NO: 205060 - DNA, 669 bp, Artificial Sequence
  derived and/or modified sequence
atgctgtggctgctgttcttcctggtgaccgccatccacgccgagctgtgccagcctggcgctgaaaatgcttttaaagttagactatccatcagaaccgcgctaggagacaaagcctacgcttgggatactaatgaagaatatctgttcaaggcgatggtggcgtttagtatgagaaaggtgccaaacagagaggccaccgagatctctcacgtactgctttgtaatgtgacgcagcgagtgtctttttggtttgtagtgacggacccatccaaaaatcatacactccccgctgttgaagtacaatctgctatcagaatgaataagaatcgtatcaataatgcctttttcctgaatgatcagaccctcgagttcctcaagattccctccacacttgccccaccaatggatcccagtgtgcctatttggatcatcatatttggggtgatcttttgtatcattatagtggccatagctcttttgattctcagtgggatctggcagcggagacgcaaaaataaggaacccagcgaggtggatgatgctgaggacaaatgcgagaatatgataacaatcgagaacggtatcccatccgacccactggatatgaagggcggacatataaatgacgcctttatgactgaagacgagcggttaacaccattatag

SEQ ID NO: 205061 - DNA, 669 bp, Artificial Sequence
  derived and/or modified sequence
atgttatggctcctgttctttctagtcaccgccatccatgctgagttgtgccagcccggtgccgaaaacgcctttaaggtgcgcctctctataagaaccgccttaggcgataaggcatacgcatgggacacaaacgaggagtatctatttaaggccatggtggccttttcaatgaggaaggttcctaatagagaagccaccgaaatctctcatgttttgctctgtaacgtaacccaaagggtgtctttttggtttgtagtcacagatcctagcaaaaaccacaccctgcccgctgtggaagtgcagtctgccattagaatgaacaagaaccgcatcaacaacgcttttttcctcaacgaccagacactcgaattcctcaagatcccttcaaccctggctccccctatggatccgtccgtgccaatctggatcataatatttggggtgattttttgcatcattatcgtcgccattgcccttctgatcctctctgggatttggcagaggcggagaaagaacaaagaaccctccgaagtggacgacgcagaagacaaatgtgaaaacatgataactatcgagaatggaatcccaagcgatcctctggatatgaaaggaggtcatattaatgacgcttttatgaccgaggatgagaggttgactcctctctag

SEQ ID NO: 205062 - DNA, 1578 bp, Artificial Sequence
  derived and/or modified sequence
cttttgaggtagagtcagagtagggaaaacaactaatctgttttccaaacaggttttcataaataactgacaggagatgggctgtttttatggaagtattaacccaaatgatgggtgttaatcattaaacctttttggtggtggctcgcttgtttctctgatattctaatccgggtcacagaatggctaaggcagatttaagtgcagcgtggattttttttttctcactttgccttgtgttttccaccctgaaagaatgttgtggctgctcttttttctggtgactgccattcatgctgaactctgtcaaccaggtgcagaaaatgcttttaaagtgagacttagtatcagaacagctctgggagataaagcatatgcctgggataccaatgaagaatacctcttcaaagcgatggtagctttctccatgagaaaagttcccaacagagaagcaacagaaatttcccatgtcctactttgcaatgtaacccagagggtatcattctggtttgtggttacagacccttcaaaaaatcacacccttcctgctgttgaggtgcaatcagccataagaatgaacaagaaccggatcaacaatgccttctttctaaatgaccaaactctggaatttttaaaaatcccttccacacttgcaccacccatggacccatctgtgcccatctggattattatatttggtgtgatattttgcatcatcatagttgcaattgcactactgattttatcagggatctggcaacgtagaagaaagaacaaagaaccatctgaagtggatgacgctgaagataagtgtgaaaacatgatcacaattgaaaatggcatcccctctgatcccctggacatgaagggagggcatattaatgatgccttcatgacagaggatgagaggctcacccctctctgaagggctgttgttctgcttcctcaagaaattaaacatttgtttctgtgtgactgctgagcatcctgaaataccaagagcagatcatatattttgtttcaccattcttcttttgtaataaattttgaatgtgcttgaaagtgaaaagcaatcaattatacccaccaacaccactgaaatcataagctattcacgactcaaaatattctaaaatatttttctgacagtatagtgtataaatgtggtcatgtggtatttgtagttattgatttaagcatttttagaaataagatcaggcatatgtatatattttcacacttcaaagacctaaggaaaaataaattttccagtggagaatacatataatatggtgtagaaatcattgaaaatggatcctttttgacgatcacttatatcactctgtatatgactaagtaaacaaaagtgagaagtaattattgtaaatggatggataaaaatggaattactcatatacagggtggaattttatcctgttatcacaccaacagttgattatatattttctgaatatcagcccctaataggacaattctatttgttgaccatttctacaatttgtaaaagtccaatctgtgctaacttaataaagtaataatcatctctttttgattgtg

SEQ ID NO: 205063 - protein, 194 aa, Artificial Sequence
  derived and/or modified sequence
MALRELKVCLLGDTGVGKSSIVWRFVEDSFDPNINPTIGASFMTKTVQYQNELHKFLIWDTAGQERFRALAPMYYRGSAAAIIVYDITKEETFSTLKNWVKELRQHGPPNIVVAIAGNKCDLIDVREVMERDAKDYADSIHAIFVETSAKNAININELFIEISRRIPSTDANLPSGGKGFKLRRQPSEPKRSCC

SEQ ID NO: 205064 - DNA, 585 bp, Artificial Sequence
  derived and/or modified sequence
atggcattacgtgaactgaaagtgtgtctgttgggcgacactggggtgggcaagagcagcattgtctggcgctttgtggaagatagcttcgaccctaacattaaccctactatcggcgcatccttcatgacaaaaaccgtccagtatcagaatgaattgcacaaatttcttatctgggacacagcgggccaggaacggtttcgcgcactggctccgatgtattatagaggctctgccgcggccattatcgtttacgacattacgaaggaagagaccttttccaccctgaagaactgggtgaaagaactgaggcaacatggcccccctaacatcgtggtggccatcgctggaaataaatgtgacttgattgatgtgcgggaagttatggaaagggacgccaaagactacgccgatagtattcatgccattttcgtggagacctccgcaaaaaacgcaatcaacatcaacgaattgttcatagagatttcccggcgaataccgagtaccgatgctaacctgccctccgggggcaaggggttcaaattgcgtagacagccctccgagccaaagcggagttgttgctag

SEQ ID NO: 205065 - DNA, 585 bp, Artificial Sequence
  derived and/or modified sequence
atggccctgcgggagctgaaggtgtgcctgctgggggacaccggggtgggcaagagcagcatcgtgtggaggtttgtggaggacagctttgaccccaacatcaaccccaccatcggggccagcttcatgaccaagacagtgcagtaccagaatgagctgcacaagttcctgatctgggacacagctggccaggagcgcttccgggccctggcccccatgtactaccggggcagcgctgctgccatcatcgtgtatgacatcaccaaggaggagaccttcagcaccctgaagaactgggtgaaggagctgcggcagcacggcccccccaacatcgtggtggccatcgccggcaacaagtgtgacctgattgatgtgcgggaggtgatggagagagatgccaaggactatgctgacagcatccacgccatctttgtggagaccagcgccaagaatgccatcaacatcaatgagctgttcatcgagatcagccgccgcatccccagcacagatgccaacctgcccagcggcggcaagggcttcaagctgcggcggcagcccagcgagcccaagaggagctgctgctag

SEQ ID NO: 205066 - DNA, 585 bp, Artificial Sequence
  derived and/or modified sequence
atggccctgcgggagctgaaggtgtgcctgctgggcgacaccggcgtcgggaagtccagcatcgtatggcgcttcgtcgaggattcattcgaccctaatatcaatcctacaatcggggctagctttatgacaaagaccgtgcagtatcagaatgagctgcataagtttcttatctgggatactgcagggcaagaacgcttcagggccttggcaccaatgtattaccgcggttccgccgccgcaattattgtgtacgatatcaccaaagaagaaaccttttctaccctgaaaaattgggttaaagagctgaggcagcacggcccgccaaatatagtagtggctatagctgggaacaaatgtgatctcatcgacgtgagagaggtgatggagcgggatgcaaaggactatgcggactccattcacgcgatatttgtggagacatctgcgaagaacgccatcaacatcaacgaactcttcatcgagatatccaggcggattcctagcacggacgcaaatctcccctccggcgggaagggcttcaagctcaggagacagccttctgagcccaaaagatcttgttgctag

SEQ ID NO: 205067 - DNA, 585 bp, Artificial Sequence
  derived and/or modified sequence
atggcgcttcgagagctcaaagtctgcctgctgggtgacactggcgtcgggaagtcgagcatcgtttggcggtttgtagaggactcgttcgatcccaacatcaatccaacaatcggcgcaagttttatgacaaaaaccgtgcagtaccaaaatgagcttcacaaattcctcatatgggatacagcaggtcaggaacgctttagagccctagcccctatgtattatcggggaagtgcggcagcaattattgtgtacgatatcactaaagaggagacattttctacgcttaaaaactgggtgaaagaactgagacaacacggaccgccaaacattgtagtggcgattgcagggaataaatgtgatctaatcgatgtaagggaagtgatggaacgggacgcaaaagactatgctgattcaatccacgcaatcttcgtggaaacatctgccaaaaacgctatcaatataaatgagctgtttatagaaatttctcggcgaattccctccacggatgctaacctgccatcaggcggaaagggttttaagctaaggaggcagccgtctgagcccaaacggagttgctgttag

SEQ ID NO: 205068 - DNA, 8670 bp, Artificial Sequence
  derived and/or modified sequence
cgaggtgggcggggaggtcaggtgacgcggccggcgtcccaagatggcggcggcggcggctcccggaaggccgcggcggcgtcccggctgctaaggcgggccccacgcggctggcagcggacaggccggacctacggccggaggacgggcggcagccgcctctgcgcggaccggggctgggccgtgcggcggcagcggcgccaggggatgctcttgctgggcctggcctctcccttctcaacttagggcggcggcgggcccgcgcccctggctcccgggccatggcgctgagggagctcaaagtgtgtctgctcggggatacaggtgtaggtaaatcgagtattgtgtggcggtttgtggaagacagttttgatccaaacatcaacccaacaataggggcatcttttatgaccaagactgtccagtaccaaaatgagctacataaattcctaatctgggatacagctggacaagaacgatttcgtgccttagcaccaatgtactatcgagggtcggctgcagctataatcgtttatgatatcacaaaagaagagacattttcaacattaaagaattgggtgaaagagcttcgacagcatggcccacctaatattgtagttgccattgcaggaaataaatgtgatcttatcgatgtaagagaagtcatggagagagatgcaaaggactacgccgactctattcatgcaatttttgtagagaccagcgcaaaaaacgcgataaacataaatgaactctttatagaaattagtcgaagaattccatccactgacgccaacctgccatctggcggtaagggcttcaaactccgaagacagccttcagagccaaagcggagctgctgctgaccgaacctcagcctctcagacttgatgatgaagtaggtggtcctgaaagttaacaggagggctggggtccctgccaccagttttcacctagccagtcttgagtcttctccgtgcaaaaaggattcacagaaatggaccagttctgttctccaaagactgcagcaatgatatttcagtctgtgaacttctattatgtaaagaatctctagtgtacaaagggactacatcgttggcttttgaccttgctgaaaaggaacatataattgtatggatggtaggattaagttgttgagtagttttgtaatcaagattttatgtaacatttgtaaagggaaaattagcacttttgtggttcttaagggaaaagaaacagaccttgtggagattataatttccttggtttctgttaccactgttagagggagttgtatcatttaacatatagtaggatagtttaagtgtagggaggacaattattgtctgaagctaaaatgggttatttataggactgatggaaatgatttcatctctgccatctctaaagcacttttcattgaacatgttagcctaggatacgtacagtaaattaacaatgatagcagcagatgcctagctcatcctgggtttgcttctgaccttgtcatgtgtgtgccaccaaacacgttattggcacctttttaaataagctctcatgatcaagatggtgatggtagagaagctgcccggaataaactgaatttcatatgttctaaaatgactagcaatggtttaaaaaggaagaagagtggaagtgaagaaggtggtataaatgctgtcaatttttttttaacccaagtattttggtggggaaaagcaagtatctattgcttagcatatgtaaagttgtagtctatatttatggggccattgcttaaagattataaattatgtaaatacattaataaattctaagtttcatttgacattccattgaatctcgcacccagtcttgcgtatgcctgcccagttttcagcctcttaacgggagactcaagcacattggtattgtataaaggtatagagcacttagcttacaatctttaaaggtttctctgccttcccttctacccacccgcctcccaccagatcccatctggaaatcataataaagacatatgccactttgacaaacctgactagtccttactagcctgagggtaaaagattaagctccaacctcaagtcatttacctggtcttggtaataagtttcttttagcttgtacagcatcctcagaccaactgaggagctttccttgttaacaatttagcttatctttctgtttcctttatttttcccctgcctctgttagtggttaacactcttttccctcagggagcctaatgaggtttttaatatcatctaaaaataaagcattgaagtgaagttggtgaaaatttgttcctggtctaatttggcacccttccaacctgagtattgtaggggaaggaaatttacaagatttaataggaaatgaaacagcttgaatttcaaactaaattgtattttcagagctatcctgaaactgaacagctgaaactttaaaaaataattggtattattttgtgccccccacttaatatggatagattttaatgggaaaattataattcagattaaataaaaaacaattcccttttccctgttgtatatcttaagcatttggaattttttttatcttctgaaatcatataaaaagaatgtcattagtaaaaattctaacttcgttttgtttaaaagacatgtggatgctccatgcccctaggattttgcttcctccccggtgctaaattagcaagctcctagagaagccatgtgattcccagagccaggcgctttacacctaaagtagtttgactttcttctgtatacatccagatggatcccaggcatccgggcaccaccctggtgtgtccctagaattcccactgctgggcctctatctccatgacaacaaaataaaaacagaggttgcttgactcattaccaaagaggcaaagcatgtgcgaccctttctgtcttattttaccaaaagatggtgcaaatctatgaccttcacattttttccaccacacccaccagtagctgttggtgattgcatggtgtctcggtgcatggggaaaggcaaggtcttctgagctcatcttaactggtgaggcatctggatgtgtctgatcttactgtgatgttttactgtaccgagcccaatgtgggtccatctcatcagccctttgctgatttcatgatttctcaccctccctcccatatgtagggtgtgattctgttttattatagccacatgttttattaacagaatgagtgatatgaagcttgtacttatgcatttctcgggcctcttccctcattttcatcagtctgtctaagaacttgactcggcactgtttctcgtgtaatatccttctaatgcttagcaacaacaacaaaaaattgctctctcagatccataatccatactcagtgaaagcagggaaaaaatattttcacttattttatttgcttctaaaatgcaaagatgaatactaaagtcagaagcagtgtttcattttgaacacattttggattattaagctgactaagcaatgatctaatacacatttcatattttctttataataatttcttatggagaagaggctatatttcaaaggaattgagacatactcccatctataaacatgtttggttttcttacgatacagggccatttttttaaaactctcaggactgaacagaagagaaaaattattaattagctgctactgtatgttgattcttttcggagaaattgaaataagctctttgcaggcgtccaatcctagaaaccaatggtctccagaactctcacacaagtgtttttctgattctatgataactaattaaccatcatctggtgattaaaagaacataaagtaagattatgattaagtgtccatcacctgcctgtcagccgtggtcagaataagttttacacgaagcaggtgaaagatttagttcttttcaaagtaacttattttcttgtgacccgtttatgatgttgtttgaagtccctgtttcccattgtgtacgcactttctggatgtctggaaggatcgggacttttgtgtgagaggcttgagcgcctcctctatgtgggctggtgtccttcttgaagttgtcaattcctcttattcttaaatatctaaagggaaaggaaaccaactttaatttcagaacttctctttacgtcttgtatgtatttcttttctgttctcaaggaggaaaattggtctaggaagccttctaaattaaactctgggaaatatagtaatgaaaatatcctttagctaactttcctgtaactgtcaaaccaaaatgtcagtatttttagggcattgtgttaaaataagcagtttagattccgacgacactgcactaattggcatgtcagcctccagctcagaaaggcatttgctcatggttacaggcatcttttagattctaagagtgagttacagaattctttttggtactttcacttattctttcagaatacatcaaggatgtgatttatgggcccttaagagtataagatataggtgcacagtatgttacttaagtaacggatgagcccccctaaacatccacgtgtctctgcaggaacctgtgtaagtattgtgaaaacccttttcttccagggaaaaattattggaaattccttaactgagctatacttggtacttgctctagaacatttgggaaatgacaaactcaggctggctctcctctctaacctcactgggctataaatgttccttctaactctgtaatgaaagttcagtgacaaactagatagtgaacctgtgaaagtcattatttacatttgctttaaagggacagttttaccgttcaacttcaagagtttttctacctctttaacagttaatattttttaaaggaagaaatggaatgtaccttcaggggtcaagctgttaactgtatacctgcctctagttagcttggtttatcaaaaggatttttaaatgattcaaggtaatgtttaggatatttgttttaactcctgctgtgctgtgatttaaaaaaaaatagtctaagaaacaaatttatccatgagataaacatcatattttatagttttagaaaaaagggttgggggtggaatttagcctagaacttaaagaaacaacctctgcgaatttctcttgacagcggagttgcttgtcttgacttctaataatataaatccaggcagtttgattatccgatttgcaagaaactttaatggaattctggggcatttgtcctgttttatgtgcaaatgaaagtctaaaaaatatgaggaagatattacatttttcaggagcctccattttttcagtctaagagaatgataagtgagaggcctattgtgatgaagttgcattggacataatgtgggaagtgaataaatagaaccaagaatcttcatctatctctgttggtctttcaggattctcttagcatataggaaaatgatttaccttccagatctcgaaggacttccaatagcatagatcaggtttaatttgatggtctataccatcagaaataactaatatctgttttctttccttttagagtataatcaattatggataggccagaatatttttggcttcaaaacaaaaggattcataagcttaaaaaaacaaaaatcccaaaccttccatctatcccttttattacgttgaacattttagatagtaagattaagatgtatcattagtatatggtgaaattaaaaccgtggtgtctaacagatttaacaaaaagtgtttaatttactgcaagttcatttttagatctgtatggtgcccagtactccacaaaatgcatcataattgaaacaacaaaattattttcatgagcaagaattcaagtatcaaggcctatcagccaattaaaagccgtaagatagtaatgattttttttctttttttttttttttctttttttagatggagtctcactctgtcgcccaggctggtatgcagtggcgcgatctcagctcactgcaacctgtctcctgggttcaagcagttctcctgcctcagcctcctgagtagctgggatgacaggcgtgcaccaccatacccagctaatttttgtatttttagtagagatggggtttcaccatgtttgccaggctggtctcgaactcctgacctcaggtgatctgcttgcctcggcttcgcaacattctgggattacagacgtgagccaccgcgcccaaccagtaacgatttttttaaagggcctttcttaattgacagttttaagctgtagacattaatattataacaaacaaaacatgccagttttactgattccgctttttgcttgattcaggaacttttcattgtttggggaagcttttgaatgcagtactgtggaggaaatcatccttaaaatagcatttcacacatagggccaaaattgaaattgtcaaggaaacccctcagcatctaacgtcatcttgtagaagagctgggcatacctcttcctctaggccaattcagaggccactggccacccaagtagagtggggcccactggcatgagtagtccctgtgcccatgcccatggtggtgcttgactttgctttggggcttaatcctagtatcatttggccattaatttttaattaagtttatacttgaataatcagttttactcctgaaaaattttgaagccagcactgactttgtttatattcacttaccttgtatatgaacttatgacattagagtttgtgaaactgtcttaacgtggctcatacacgtgatgtcagagggactggtcagttctttacagggtgaattaatcggcagctggctagtcagagcaactgatgggtggcttttttttctttttttttttgagacggagtctcgctctgtcacccaggctggagtgtaagggcgcgatctcggctcactgcaacctccgcctcccaggttcaagcaattctcctgcctcagccacctgaatagctaggattacaggcgcccgcccccacacccggctaatattttttgtatttttagtagagacagggtttcaccgtgttgatcaggctggtctcgaactcctgacctcacgatccgcccgcctcggcctcccaaagtgctgggattacaggcgtgagtggtggccctatttttaaaccattcgttacgctgtgtagacagagctttattgccctggaaaagattttttttttaactctcatgcagttcagtctttccatcatttcactttgtgagtcactcacataattgtcaatcattcctctgaccttcttaagaatttacaccttaccgtctctgtgattgaagcagacttctcgctttatttcccttaggctcatttttctgtgggctctcccttaaagacacatggccacagacacctccttcgcatatgtaatctgccttcccctgcggccttccgtggtcacagcaacagggactgctcaccccctccagctggggcttttctaacaagcacagtcagaaatgcgcaggcctggggttggggatgaacagaagttgattagtgggcacagaaatacagttagatagaaggaatagttccagcattcgatattacagtagggagactgcatttaacaataattgattgtatatttgaaaacagctagaagaataagaatattcccaacacaaagaaaagataagcgaggtgaaggaaatcccagttaccctcattcagtccattacacattcgatacaggtatcaaaatatcataggcacctcaaagacatgtacaactcttaatttaacatttttgaaagaaaaaaaaaccggccagagcattaaaacaaataaaataagaaacacagaggccagtgttaggtgaagaactccgctgcttcagaaagagaatagcagcgctcgcttaccgtgggaacacggccagttaacaaaatgggttttggttttttgttttgttttgttttaccattggtaataagatagttaacataagtggtcagaacttcgctgaatttgtaataaagcatttgttaagcgtgtaaaagtccaaattaaaagtcttgaagaaaaacagctatggcaatgagcctagacatttttcaaaaaaaaaagctaagccgtcctaccagcaatctctctttctcctaagaatgtcatgccttctcaagacctgatgaaaggaataagatatttgtgcctttttataaaagcatctattacgaaagtaaaattcagttgcttacagttttggccgctttgtagcactattataaacagcccaaatttatggccttggacttactgcatgacacatggcctggttacctgtcatggaatgctgcagtggtggtttgccaagcttctgtggatgtttgaagactttatttttgcagtcttaaccttgggctggacctaagtgtatgtaaaccatatgatgcctgtattgtttatagatgctgacaaaagaaaactagaccttttgttttttgttgtaagatttttgttttcatgcctatgctcatagtagatagtttgcaaatgaaagttgatttgccatacttttaaataatattgttttagcttgaatattctataatacacttttatagagtataacatgctaaatcactgttttgttgtaagaagggtgtaaacattttgttaataaaatgctatgtttacaaatata

SEQ ID NO: 205069 - DNA, 585 bp, Artificial Sequence
  derived and/or modified sequence
atggccctgagagagctgaaggtgtgcctgctgggcgacaccggcgtgggcaagagcagcatcgtgtggagattcgtggaggacagcttcgaccccaacatcaaccccaccatcggcgccagcttcatgaccaagaccgtgcagtaccagaacgagctgcacaagttcctgatctgggacaccgccggccaggagagattcagagccctggcccccatgtactacagaggcagcgccgccgccatcatcgtgtacgacatcaccaaggaggagaccttcagcaccctgaagaactgggtgaaggagctgagacagcacggcccccccaacatcgtggtggccatcgccggcaacaagtgcgacctgatcgacgtgagagaggtgatggagagagacgccaaggactacgccgacagcatccacgccatcttcgtggagaccagcgccaagaacgccatcaacatcaacgagctgttcatcgagatcagcagaagaatccccagcaccgacgccaacctgcccagcggcggcaagggcttcaagctgagaagacagcccagcgagcccaagagaagctgctgctag

SEQ ID NO: 205070 - protein, 224 aa, Artificial Sequence
  derived and/or modified sequence
MVEDELALFDKSINEFWNKFKSTDTSCQMAGLRDTYKDSIKAFAEKLSVKLKEEERMVEMFLEYQNQISRQNKLIQEKKDNLLKLIAEVKGKKQELEVLTANIQDLKEEYSRKKETISTANKANAERLKRLQKSADLYKDRLGLEIRKIYGEKLQFIFTNIDPKNPESPFMFSLHLNEARDYEVSDSAPHLEGLAEFQENVRKTNNFSAFLANVRKAFTATVYN

SEQ ID NO: 205071 - DNA, 675 bp, Artificial Sequence
  derived and/or modified sequence
atggttgaggacgagcttgccctatttgataaaagtattaacgagttttggaacaagtttaaaagcactgatacctcctgccagatggccgggctgcgggatacgtacaaagatagtatcaaggccttcgccgagaagctgagtgttaagttgaaggaagaggagaggatggtggagatgttcctggaatatcagaaccaaatttctcgacagaataaactgatccaggaaaaaaaggataatcttctgaaactgatagccgaagtgaagggtaagaagcaggaacttgaggtactaaccgcaaacatacaagacctaaaagaagaatatagcaggaaaaaggagacaatcagtacagccaataaagccaacgccgagagattaaaaaggcttcaaaagagcgctgatctgtataaggaccggctgggattggagatcagaaagatctatggcgagaagctacagtttattttcactaatatcgatccgaagaaccccgagagcccgttcatgttctcacttcacctgaatgaagctcgagactacgaggtgtccgatagcgccccccatctggagggcctggccgagtttcaggaaaatgtccggaaaacaaacaactttagtgcatttctggctaatgttcgcaaagcatttaccgcaactgtatacaactag

SEQ ID NO: 205072 - DNA, 675 bp, Artificial Sequence
  derived and/or modified sequence
atggtggaggatgagctggccctgtttgacaagagcatcaatgagttctggaacaagttcaagagcacagacaccagctgccagatggccggcctgcgggacacctacaaggacagcatcaaggcctttgctgagaagctgtctgtgaagctgaaggaggaggagaggatggtggagatgttcctggagtaccagaaccagatcagccggcagaacaagctgatccaggagaagaaggacaacctgctgaagctgattgctgaggtgaagggcaagaagcaggagctggaggtgctgacagccaacatccaggacctgaaggaggagtacagcaggaagaaggagaccatcagcacagccaacaaggccaatgctgagcggctgaagaggctgcagaagtctgctgacctgtacaaggaccggctgggcctggagatcaggaagatctacggggagaagctgcagttcatcttcaccaacatcgaccccaagaaccctgagagccccttcatgttcagcctgcacctgaatgaggcccgggactatgaggtgtctgattctgccccccacctggagggcctggccgagttccaggagaatgtgaggaagaccaacaacttcagcgccttcctggccaacgtgaggaaggccttcaccgccaccgtgtacaactag

SEQ ID NO: 205073 - DNA, 675 bp, Artificial Sequence
  derived and/or modified sequence
atggtggaggacgagctggccctgttcgacaagagcatcaacgagttttggaataagtttaagtccaccgacacttcatgtcagatggccggcctcagagatacctataaagactccatcaaggcctttgctgagaaactgtccgtcaagctgaaggaagaagagagaatggtagagatgtttcttgaataccaaaatcagataagccgacagaacaagttgattcaggaaaagaaggataatctcctgaagctaatcgcagaggtgaagggaaaaaaacaggaactggaagtgttaaccgcaaatatccaagatctaaaagaggaatactctcgaaagaaggagacaatctctaccgctaataaggccaacgctgagcggctaaaaaggttacagaagtcagcggacctgtacaaggataggctcggccttgaaatccggaaaatctatggtgaaaaattgcaatttatatttacaaatatagaccctaagaatcccgagagcccattcatgtttagtctgcacctcaacgaggcgcgcgactatgaggtgtcggactcagcacctcacctagaggggctcgctgaattccaagagaacgtccgcaaaactaacaacttcagcgctttcctggctaacgttcgcaaagctttcactgccactgtctacaattag

SEQ ID NO: 205074 - DNA, 675 bp, Artificial Sequence
  derived and/or modified sequence
atggtcgaggacgaactggccctgtttgataaatctatcaatgaattctggaacaagttcaagtcgaccgatacatcttgccagatggccggactgcgggacacatacaaggatagcattaaggcttttgccgagaaactgagcgttaagcttaaggaagaagagagaatggtcgagatgtttctcgagtaccagaatcaaattagtcggcagaataagctcatccaggaaaaaaaagacaacctccttaagctgatagccgaggtcaaaggaaagaaacaagagctcgaggtgttgacggctaatatccaggacctgaaggaggaatactccagaaagaaggaaacgatatcaaccgccaataaagctaacgccgagcggctgaagcgactccagaagagcgctgacctgtacaaggacaggctgggcttggagataagaaagatttatggggagaagcttcagttcatctttaccaatattgatccaaaaaacccagagagtcccttcatgttctccctccacctgaatgaagccagggactacgaggtgtccgattctgcaccacacttagaaggcctcgcagagtttcaggagaacgtaaggaagacaaataacttctccgcatttctggctaatgtccgaaaggcattcaccgctaccgtttacaattag

SEQ ID NO: 205075 - DNA, 1354 bp, Artificial Sequence
  derived and/or modified sequence
aagtgcactaggtttgaaatcggaaagttggcggggctgcgggagctgagcctagagtccggctgttggctagagtgggcgcggatctggtgtggggaaggcggcgggactcaggcctgcctgcgaagcattgtcctacataatggtagaggacgaactggcacttttcgataaaagcataaatgaattttggaataaattcaaaagtacggacacctcctgtcagatggcgggactaagagatacctacaaggattccatcaaagcatttgcagaaaagctgtctgtgaaattaaaggaagaagaacgaatggttgagatgtttctggaatatcaaaatcagatcagcaggcaaaataagctcattcaagaaaaaaaggataacttgttaaaattgattgctgaagtaaaaggcaaaaagcaggaattggaagtactgactgcaaatatccaggatcttaaggaagaatattctaggaagaaggaaactatttctactgctaataaagcgaatgcagagaggttgaaaaggctgcagaaatctgcagacttgtataaagatcgacttggactagaaattcgaaaaatttatggtgagaaattgcagtttattttcactaatattgaccctaagaatcctgagagcccatttatgttttccttacatctcaatgaagcaagggactatgaagtgtcagatagtgcccctcatcttgagggcctagcagaatttcaagagaatgtaaggaagaccaacaatttttcagcttttcttgccaatgttcggaaagcttttactgccacggtttataattaacatacaaatagtgtatataaaaacggtttatttttcttctctattacatatctctttttttcttgtttttattattattatactttaagttttagggtacatgtgcacaatgtgcaggtttgttacatatgtatacatgtgccatattggtgtgctgcacccattaactcgtcatttcattaggtatatctcctaatgctatccctcccccctcccccaacccacaacagtccccgttgtgtgatgttccccttcctgtgtccatgtgttctcattgttcaattcccacctaggagtgagaatatgtggtgtttggttttttgtcctttcgatagtttgctgagaatgatggtttccagcttcatccatgttcctacaaaggacatgaactcatccttttttatggctgcatagtattccatggtgtatatgtgccacattttcttaatccagtctatcattgttggacatttgggttggttccaagtctttgctattgtgaatagtgccgaaataaacatacgtgtgcatgtgtct

SEQ ID NO: 205076 - DNA, 675 bp, Artificial Sequence
  derived and/or modified sequence
atggtggaggacgagctggccctgttcgacaagagcatcaacgagttctggaacaagttcaagagcaccgacaccagctgccagatggccggcctgagagacacctacaaggacagcatcaaggccttcgccgagaagctgagcgtgaagctgaaggaggaggagagaatggtggagatgttcctggagtaccagaaccagatcagcagacagaacaagctgatccaggagaagaaggacaacctgctgaagctgatcgccgaggtgaagggcaagaagcaggagctggaggtgctgaccgccaacatccaggacctgaaggaggagtacagcagaaagaaggagaccatcagcaccgccaacaaggccaacgccgagagactgaagagactgcagaagagcgccgacctgtacaaggacagactgggcctggagatcagaaagatctacggcgagaagctgcagttcatcttcaccaacatcgaccccaagaaccccgagagccccttcatgttcagcctgcacctgaacgaggccagagactacgaggtgagcgacagcgccccccacctggagggcctggccgagttccaggagaacgtgagaaagaccaacaacttcagcgccttcctggccaacgtgagaaaggccttcaccgccaccgtgtacaactag

SEQ ID NO: 205077 - protein, 337 aa, Artificial Sequence
  derived and/or modified sequence
MDLDVVNMFVIAGGTLAIPILAFVASFLLWPSALIRIYYWYWRRTLGMQVRYVHHEDYQFCYSFRGRPGHKPSILMLHGFSAHKDMWLSVVKFLPKNLHLVCVDMPGHEGTTRSSLDDLSIDGQVKRIHQFVECLKLNKKPFHLVGTSMGGQVAGVYAAYYPSDVSSLCLVCPAGLQYSTDNQFVQRLKELQGSAAVEKIPLIPSTPEEMSEMLQLCSYVRFKVPQQILQGLVDVRIPHNNFYRKLFLEIVSEKSRYSLHQNMDKIKVPTQIIWGKQDQVLDVSGADMLAKSIANCQVELLENCGHSVVMERPRKTAKLIIDFLASVHNTDNNKKLD

SEQ ID NO: 205078 - protein, 318 aa, Artificial Sequence
  derived and/or modified sequence
MDLDVVNMFVIAGGTLAIPILAFVASFLLWPSALIRIYYWYWRRTLGMQVRYVHHEDYQFCYSFRGRPGHKPSILMLHGFSAHKDMWLSVVKFLPKNLHLVCVDMPGHEGTTRSSLDDLSIDGQVKRIHQFVECLKLNKKPFHLVGTSMGGQVAGVYAAYYPSDVSSLCLVCPAGLQYSTDNQFVQRLKELQGSAAVEKIPLIPSTPEEMSEMLQLCSYVRFKVPQQILQGLVDVRIPHNNFYRKLFLEIVSEKSRYSLHQNMDKIKVPTQIIWGKQDQVLDVSGADVGQVNCQLPGGASGKLWALSSDGKPGRQPSS

SEQ ID NO: 205079 - DNA, 1014 bp, Artificial Sequence
  derived and/or modified sequence
atggacctggacgtggtgaacatgttcgtgatcgccggcggcaccctggccatccccatcctggccttcgtggccagcttcctgctgtggcccagcgccctgatcagaatctactactggtactggagaagaaccctgggcatgcaggtgagatacgtgcaccacgaggactaccagttctgctacagcttcagaggcagacccggccacaagcccagcatcctgatgctgcacggcttcagcgcccacaaggacatgtggctgagcgtggtgaagttcctgcccaagaacctgcacctggtgtgcgtggacatgcccggccacgagggcaccaccagaagcagcctggacgacctgagcatcgacggccaggtgaagagaatccaccagttcgtggagtgcctgaagctgaacaagaagcccttccacctggtgggcaccagcatgggcggccaggtggccggcgtgtacgccgcctactaccccagcgacgtgagcagcctgtgcctggtgtgccccgccggcctgcagtacagcaccgacaaccagttcgtgcagagactgaaggagctgcagggcagcgccgccgtggagaagatccccctgatccccagcacccccgaggagatgagcgagatgctgcagctgtgcagctacgtgagattcaaggtgccccagcagatcctgcagggcctggtggacgtgagaatcccccacaacaacttctacagaaagctgttcctggagatcgtgagcgagaagagcagatacagcctgcaccagaacatggacaagatcaaggtgcccacccagatcatctggggcaagcaggaccaggtgctggacgtgagcggcgccgacatgctggccaagagcatcgccaactgccaggtggagctgctggagaactgcggccacagcgtggtgatggagagacccagaaagaccgccaagctgatcatcgacttcctggccagcgtgcacaacaccgacaacaacaagaagctggactag

SEQ ID NO: 205080 - DNA, 678 bp, Artificial Sequence
  derived and/or modified sequence
atggacctggacgtggtgaacatgttcgtgatcgccggcggcaccctggccatccccatcctggccttcgtggccagcttcctgctgtggcccagcgccctgatcagaatctactactggtactggagaagaaccctgggcatgcaggtgagatacgtgcaccacgaggactaccagttctgctacagcttcagaggcagacccggccacaagcccagcatcctgatgctgcacggcttcagcgcccacaaggacatgtggctgagcgtggtgaagttcctgcccaagaacctgcacctggtgtgcgtggacatgcccggccacgagggcaccaccagaagcagcctggacgacctgagcatcgacggccaggtgaagagaatccaccagttcgtggagtgcctgaagctgaacaagaagcccttccacctggtgggcaccagcatgggcggccaggtggccggcgtgtacgccgcctactaccccagcgacgtgagcagcctgtgcctggtgtgccccgccggcctgcagtacagcaccgacaaccagttcgtgcagagactgaaggagctgcagggcagcgccgccgtggagaagatccccctgatccccagcacccccgaggagatgagcgagatgctgcagctgtgcagctacgtgagattcaaggtgccctag

SEQ ID NO: 205081 - DNA, 522 bp, Artificial Sequence
  derived and/or modified sequence
atggacctggacgtggtgaacatgttcgtgatcgccggcggcaccctggccatccccatcctggccttcgtggccagcttcctgctgtggcccagcgccctgatcagaatctactactggtactggagaagaaccctgggcatgcaggtgagatacgtgcaccacgaggactaccagttctgctacagcttcagaggcagacccggccacaagcccagcatcctgatgctgcacggcttcagcgcccacaaggacatgtggctgagcgtggtgaagttcctgcccaagaacctgcacctggtgtgcgtggacatgcccggccacgagggcaccaccagaagcagcctggacgacctgagcatcgacggccaggtgaagagaatccaccagttcgtggagtgcctgaagctgaacaagaagcccttccacctggtgggcaccagcatgggcggccaggtggccggcgtgtacgccgcctactaccccagcgacgtgagcagcctgtgcctggtgtgcccctag

SEQ ID NO: 205082 - DNA, 957 bp, Artificial Sequence
  derived and/or modified sequence
atggacctggacgtggtgaacatgttcgtgatcgccggcggcaccctggccatccccatcctggccttcgtggccagcttcctgctgtggcccagcgccctgatcagaatctactactggtactggagaagaaccctgggcatgcaggtgagatacgtgcaccacgaggactaccagttctgctacagcttcagaggcagacccggccacaagcccagcatcctgatgctgcacggcttcagcgcccacaaggacatgtggctgagcgtggtgaagttcctgcccaagaacctgcacctggtgtgcgtggacatgcccggccacgagggcaccaccagaagcagcctggacgacctgagcatcgacggccaggtgaagagaatccaccagttcgtggagtgcctgaagctgaacaagaagcccttccacctggtgggcaccagcatgggcggccaggtggccggcgtgtacgccgcctactaccccagcgacgtgagcagcctgtgcctggtgtgccccgccggcctgcagtacagcaccgacaaccagttcgtgcagagactgaaggagctgcagggcagcgccgccgtggagaagatccccctgatccccagcacccccgaggagatgagcgagatgctgcagctgtgcagctacgtgagattcaaggtgccccagcagatcctgcagggcctggtggacgtgagaatcccccacaacaacttctacagaaagctgttcctggagatcgtgagcgagaagagcagatacagcctgcaccagaacatggacaagatcaaggtgcccacccagatcatctggggcaagcaggaccaggtgctggacgtgagcggcgccgacgtgggccaggtgaactgccagctgcccggcggcgccagcggcaagctgtgggccctgagcagcgacggcaagcccggcagacagcccagcagctag

SEQ ID NO: 205083 - DNA, 2393 bp, Artificial Sequence
  derived and/or modified sequence
acctctgtaggcgatcctgctctcgccgtggctttcgggtgctaggagacagttgccggcgttgggttgtgcgagacgctaactgtaccctccgggtttaacgctgtgaggcagcgcgcggaggaactggggataagcgccccggagcccccaaacagagcgcggccgctgggggacagcgcgcggcgccgggtcggggcggggcggcttttctgtcggaggacgcgaaccggcacgctgcgcctttaaggagtccagctgggctgggcgccggagctgggagcggcgcgggtaggagcccggcggcaggtcccagcccggggctagagaccgagggccggggtccgggcccggcggcgggacccaggcggttgaggctggtcaggagtcagccagcctgaaagagcaggatggatcttgatgtggttaacatgtttgtgattgcgggcggcacgctggccatcccaatcctggcatttgtggcttcatttcttctgtggccttcagcactgataagaatctattattggtactggcggaggacattgggcatgcaagtccgctatgttcaccatgaagactatcagttctgttattccttccggggcaggcctgggcacaaaccctccatcctcatgctccacggattctctgcccacaaggatatgtggctcagtgtggtcaagttccttccaaagaacctgcacttggtctgcgtggacatgccaggacatgagggcaccacccgctcctccctggatgacctgtccatagatgggcaagttaagaggatacaccagtttgtagaatgcctgaagctgaacaaaaaacctttccacctggtaggcacctccatgggtggccaggtggctggggtgtatgctgcttactacccatcggatgtctccagcctgtgtctcgtgtgtcctgctggcctgcagtactcaactgacaatcaatttgtacaacggctcaaagaactgcagggctctgccgccgtggagaagattcccttgatcccgtctaccccagaagagatgagtgaaatgcttcagctctgctcctatgtccgcttcaaggtgccccagcagatcctgcaaggccttgtcgatgtccgcatccctcataacaacttctaccgaaagttgtttttggaaatcgtcagtgagaagtccagatactctctccatcagaacatggacaagatcaaggttccgacgcagatcatctgggggaaacaagaccaggtgctggatgtgtctggggcagacatgttggccaagtcaattgccaactgccaggtggagcttctggaaaactgtgggcactcagtagtgatggaaagacccaggaagacagccaagctcataatcgactttttagcttctgtgcacaacacagacaacaacaagaagctggactgaggccccgactgcagcctgcattctgcacacagcatctgctcccatcccccaagtctgacgcagccaccactctcagggatcctgccccaaatgcggtcggagcgccagtgaccctgaggaagcccgtcccttatccctggtatccacggttccccagagctttggggaccacgcgaaaacctccaagatatttttcacaaaatagaaactcatatggaacaaaataagaaaccccagccatgaaatctaccatgaagtcttcaagttcatgtcactgagaagcttgtgcaaagcagccaccttggaccataattaaatcaaggacattttctttgagacattccttatagttggagactcaagatatttttgttgcatcaggtgtattcccttgcatgggcagtggcttttataggagcattagtcctcattcgctgaaccctgttgtttaggtctaatttaagttttacatagagacccatgtatgactgcagcccattggctgcaagaccagggaggaaagtggcaagctgtagaaaatgtttacacgcatggaggggcattgctctagccctcagagcgtccggagcagcagggtacatgggtgggaggttcattcagcacccaccagtcaggtatgttctgagtgaacccacagcagtcgcagaatgagcacctggcagggtgggtttcctaggaataatttattatttttaaaaataggcctaataaagcaataatgttctagacatctgtctaagtaatcagactcaggttccacacacaagcaacaactcgtgggcctcttttctatttcaatgtgctactaagaacccttggatgtaacatactagttagttaatgaattctgtgaattctgtgaagagtaatgtgattgaaaataagtctaaacagctgtaaaagtgaccacaatgacatgaaataaatttaataagtctagatcagcaa

SEQ ID NO: 205084 - DNA, 921 bp, Artificial Sequence
  derived and/or modified sequence
agagtcggcgatctgcacttgcctttccactccgctccccgcgcgggcgctgcccccacctcccgctgcctggataggtttgagatgcccgaaacccggcgccccatttcctgggtccagccagcctcttgaagccgggggacagagtgaggacggaatctcattttcagcttctgccagagccagtagcagttgggaaagaaggctgtgctctttgaagagagtcagccagcctgaaagagcaggatggatcttgatgtggttaacatgtttgtgattgcgggcggcacgctggccatcccaatcctggcatttgtggcttcatttcttctgtggccttcagcactgataagaatctattattggtactggcggaggacattgggcatgcaagtccgctatgttcaccatgaagactatcagttctgttattccttccggggcaggcctgggcacaaaccctccatcctcatgctccacggattctctgcccacaaggatatgtggctcagtgtggtcaagttccttccaaagaacctgcacttggtctgcgtggacatgccaggacatgagggcaccacccgctcctccctggatgacctgtccatagatgggcaagttaagaggatacaccagtttgtagaatgcctgaagctgaacaaaaaacctttccacctggtaggcacctccatgggtggccaggtggctggggtgtatgctgcttactacccatcggatgtctccagcctgtgtctcgtgtgtcctgctggcctgcagtactcaactgacaatcaatttgtacaacggctcaaagaactgcagggctctgccgccgtggagaagattcccttgatcccgtctaccccagaagagatgagtgaaatgcttcagctctgctcctatgtccgcttcaaggtgccc

SEQ ID NO: 205085 - DNA, 2482 bp, Artificial Sequence
  derived and/or modified sequence
ccgggcgctcgggctccgcccccggtacctctgtaggcgatcctgctctcgccgtggctttcgggtgctaggagacagttgccggcgttgggttgtgcgagacgctaactgtaccctccgggtttaacgctgtgaggcagcgcgcggaggaactggggataagcgccccggagcccccaaacagagcgcggccgctgggggacagcgcgcggcgccgggtcggggcggggcggcttttctgtcggaggacgcgaaccggcacgctgcgcctttaaggagtccagctgggctgggcgccggagctgggagcggcgcgggtaggagcccggcggcaggtcccagcccggggctagagaccgagggccggggtccgggcccggcggcgggacccaggcggttgaggctggtcagaatctcattttcagcttctgccagagccagtagcagttgggaaagaaggctgtgctctttgaagagagtcagccagcctgaaagagcaggatggatcttgatgtggttaacatgtttgtgattgcgggcggcacgctggccatcccaatcctggcatttgtggcttcatttcttctgtggccttcagcactgataagaatctattattggtactggcggaggacattgggcatgcaagtccgctatgttcaccatgaagactatcagttctgttattccttccggggcaggcctgggcacaaaccctccatcctcatgctccacggattctctgcccacaaggatatgtggctcagtgtggtcaagttccttccaaagaacctgcacttggtctgcgtggacatgccaggacatgagggcaccacccgctcctccctggatgacctgtccatagatgggcaagttaagaggatacaccagtttgtagaatgcctgaagctgaacaaaaaacctttccacctggtaggcacctccatgggtggccaggtggctggggtgtatgctgcttactacccatcggatgtctccagcctgtgtctcgtgtgtcctgctggcctgcagtactcaactgacaatcaatttgtacaacggctcaaagaactgcagggctctgccgccgtggagaagattcccttgatcccgtctaccccagaagagatgagtgaaatgcttcagctctgctcctatgtccgcttcaaggtgccccagcagatcctgcaaggccttgtcgatgtccgcatccctcataacaacttctaccgaaagttgtttttggaaatcgtcagtgagaagtccagatactctctccatcagaacatggacaagatcaaggttccgacgcagatcatctgggggaaacaagaccaggtgctggatgtgtctggggcagacatgttggccaagtcaattgccaactgccaggtggagcttctggaaaactgtgggcactcagtagtgatggaaagacccaggaagacagccaagctcataatcgactttttagcttctgtgcacaacacagacaacaacaagaagctggactgaggccccgactgcagcctgcattctgcacacagcatctgctcccatcccccaagtctgacgcagccaccactctcagggatcctgccccaaatgcggtcggagcgccagtgaccctgaggaagcccgtcccttatccctggtatccacggttccccagagctttggggaccacgcgaaaacctccaagatatttttcacaaaatagaaactcatatggaacaaaataagaaaccccagccatgaaatctaccatgaagtcttcaagttcatgtcactgagaagcttgtgcaaagcagccaccttggaccataattaaatcaaggacattttctttgagacattccttatagttggagactcaagatatttttgttgcatcaggtgtattcccttgcatgggcagtggcttttataggagcattagtcctcattcgctgaaccctgttgtttaggtctaatttaagttttacatagagacccatgtatgactgcagcccattggctgcaagaccagggaggaaagtggcaagctgtagaaaatgtttacacgcatggaggggcattgctctagccctcagagcgtccggagcagcagggtacatgggtgggaggttcattcagcacccaccagtcaggtatgttctgagtgaacccacagcagtcgcagaatgagcacctggcagggtgggtttcctaggaataatttattatttttaaaaataggcctaataaagcaataatgttctagacatctgtctaagtaatcagactcaggttccacacacaagcaacaactcgtgggcctcttttctatttcaatgtgctactaagaacccttggatgtaacatactagttagttaatgaattctgtgaattctgtgaagagtaatgtgattgaaaataagtctaaacagctgtaaaagtgaccacaatgacatgaaataaatttaataagtctagatcagc

SEQ ID NO: 205086 - DNA, 768 bp, Artificial Sequence
  derived and/or modified sequence
ttccctttccccagcctgccccggctcccgtgcccttgcgccccttccgtgtcgaaacacttgaatcaggatgctgtccagccaggtacccgccggcaacttgcggtcccccgcctacagcgacacaggtttcacggctgccttagaaatgcggattgtgtaacgccggctgcagggcagtgcacgtgcagggtttgcgcccctgagcccacagcgaggccaggagtcagccagcctgaaagagcaggatggatcttgatgtggttaacatgtttgtgattgcgggcggcacgctggccatcccaatcctggcatttgtggcttcatttcttctgtggccttcagcactgataagaatctattattggtactggcggaggacattgggcatgcaagtccgctatgttcaccatgaagactatcagttctgttattccttccggggcaggcctgggcacaaaccctccatcctcatgctccacggattctctgcccacaaggatatgtggctcagtgtggtcaagttccttccaaagaacctgcacttggtctgcgtggacatgccaggacatgagggcaccacccgctcctccctggatgacctgtccatagatgggcaagttaagaggatacaccagtttgtagaatgcctgaagctgaacaaaaaacctttccacctggtaggcacctccatgggtggccaggtggctggggtgtatgctgcttactacccatcggatgtctccagcctgtgtctcgtgtgtcctg

SEQ ID NO: 205087 - DNA, 2387 bp, Artificial Sequence
  derived and/or modified sequence
acctctgtaggcgatcctgctctcgccgtggctttcgggtgctaggagacagttgccggcgttgggttgtgcgagacgctaactgtaccctccgggtttaacgctgtgaggcagcgcgcggaggaactggggataagcgccccggagcccccaaacagagcgcggccgctgggggacagcgcgcggcgccgggtcggggcggggcggcttttctgtcggaggacgcgaaccggcacgctgcgcctttaaggagtccagctgggctgggcgccggagctgggagcggcgcgggtaggagcccggcggcaggtcccagcccggggctagagaccgagggccggggtccgggcccggcggcgggacccaggcggttgaggctggtcaggagtcagccagcctgaaagagcaggatggatcttgatgtggttaacatgtttgtgattgcgggcggcacgctggccatcccaatcctggcatttgtggcttcatttcttctgtggccttcagcactgataagaatctattattggtactggcggaggacattgggcatgcaagtccgctatgttcaccatgaagactatcagttctgttattccttccggggcaggcctgggcacaaaccctccatcctcatgctccacggattctctgcccacaaggatatgtggctcagtgtggtcaagttccttccaaagaacctgcacttggtctgcgtggacatgccaggacatgagggcaccacccgctcctccctggatgacctgtccatagatgggcaagttaagaggatacaccagtttgtagaatgcctgaagctgaacaaaaaacctttccacctggtaggcacctccatgggtggccaggtggctggggtgtatgctgcttactacccatcggatgtctccagcctgtgtctcgtgtgtcctgctggcctgcagtactcaactgacaatcaatttgtacaacggctcaaagaactgcagggctctgccgccgtggagaagattcccttgatcccgtctaccccagaagagatgagtgaaatgcttcagctctgctcctatgtccgcttcaaggtgccccagcagatcctgcaaggccttgtcgatgtccgcatccctcataacaacttctaccgaaagttgtttttggaaatcgtcagtgagaagtccagatactctctccatcagaacatggacaagatcaaggttccgacgcagatcatctgggggaaacaagaccaggtgctggatgtgtctggggcagacgttggccaagtcaattgccaactgccaggtggagcttctggaaaactgtgggcactcagtagtgatggaaagccaggaagacagccaagctcataatcgactttttagcttctgtgcacaacacagacaacaacaagaagctggactgaggccccgactgcagcctgcattctgcacacagcatctgctcccatcccccaagtctgacgcagccaccactctcagggatcctgccccaaatgcggtcggagcgccagtgaccctgaggaagcccgtcccttatccctggtatccacggttccccagagctttggggaccacgcgaaaacctccaagatatttttcacaaaatagaaactcatatggaacaaaataagaaaccccagccatgaaatctaccatgaagtcttcaagttcatgtcactgagaagcttgtgcaaagcagccaccttggaccataattaaatcaaggacattttctttgagacattccttatagttggagactcaagatatttttgttgcatcaggtgtattcccttgcatgggcagtggcttttataggagcattagtcctcattcgctgaaccctgttgtttaggtctaatttaagttttacatagagacccatgtatgactgcagcccattggctgcaagaccagggaggaaagtggcaagctgtagaaaatgtttacacgcatggaggggcattgctctagccctcagagcgtccggagcagcagggtacatgggtgggaggttcattcagcacccaccagtcaggtatgttctgagtgaacccacagcagtcgcagaatgagcacctggcagggtgggtttcctaggaataatttattatttttaaaaataggcctaataaagcaataatgttctagacatctgtctaagtaatcagactcaggttccacacacaagcaacaactcgtgggcctcttttctatttcaatgtgctactaagaacccttggatgtaacatactagttagttaatgaattctgtgaattctgtgaagagtaatgtgattgaaaataagtctaaacagctgtaaaagtgaccacaatgacatgaaataaatttaataagtctagatcagc

SEQ ID NO: 205088 - DNA, 1014 bp, Artificial Sequence
  derived and/or modified sequence
atggaccttgacgttgtgaacatgtttgtgatcgctggcggaaccctggccattcctattctggcgttcgtcgccagttttctcctgtggccctcagccctgattcgaatctattactggtactggcggaggaccctcgggatgcaagtgaggtacgtacatcacgaggattaccaattttgttacagcttcagggggcgccctggacacaagccaagcatcctcatgctccacggtttttctgcccataaggacatgtggctgtctgttgttaagttcctacctaaaaacctccacttggtttgcgtagacatgcccggccacgaggggactacccggtccagcttggatgacctgagcattgacggacaagtcaagagaattcatcagtttgtggaatgcttaaaacttaacaaaaaacctttccatctggtagggacatcgatggggggacaggtagctggcgtgtatgcggcttactacccatccgacgtctcaagtctgtgtctagtatgtcctgcaggcctacagtatagcactgataatcagtttgtgcagcgtctgaaggaactgcagggaagcgccgccgttgaaaagatccctctgattccaagtacacctgaagaaatgagcgagatgcttcagctgtgctcatacgtccgcttcaaggtgccgcagcagatcctgcaggggcttgtagatgttcggatccctcacaacaacttctatcgcaagctttttctggagatcgtctctgaaaaaagtagatactccctccaccaaaacatggacaagattaaggttccgactcagatcatttgggggaagcaggatcaggttctcgacgtgtccggagccgatatgctcgccaagtctattgccaactgccaggtcgaactactggaaaattgcggacattctgtggtcatggagcgcccgagaaaaaccgctaagttaattattgattttttagcttcagtccataacactgataataataaaaagcttgactag

SEQ ID NO: 205089 - DNA, 678 bp, Artificial Sequence
  derived and/or modified sequence
atggatttagacgtggtgaacatgttcgtgatcgccgggggcaccctcgccattcccatattggcctttgttgcatctttcctgctctggcctagtgcactcatccgcatttattattggtactggcggaggacacttggcatgcaggttcggtacgtccatcacgaggattaccagttttgttattccttcaggggacgacccggacacaagccgagtatcctgatgctgcacggattctctgcacacaaggacatgtggttgtccgtggtgaaattcctgccaaagaatcttcacctggtgtgcgtcgacatgcctggtcacgaaggcacgacccgaagctcactggacgatctgtcaatagatggacaggtgaaaaggatacatcagtttgttgagtgcctgaaactcaacaaaaagccatttcatctggtaggaacatctatgggaggccaggtggccggggtgtacgctgcctactatcccagcgatgtctcctcgctctgcctcgtgtgcccagccgggctgcagtacagcactgataaccagttcgtgcagcggcttaaggaactgcagggtagtgcagccgtcgagaagattcccctcatccccagtacacccgaggaaatgtccgaaatgctccagttgtgttcctatgtaaggttcaaagttccctag

SEQ ID NO: 205090 - DNA, 1014 bp, Artificial Sequence
  derived and/or modified sequence
atggatctggatgtggtgaatatgtttgtgatcgcaggtggcacattagcgattcctattctggcatttgtcgcatcctttcttctttggcctagcgcgttgattcgtatttattactggtattggcgtagaacactgggcatgcaagtgaggtacgtgcatcacgaggattaccagttttgctattcttttcgaggtagacccggacataagccatctattctgatgctacacggcttctccgcacacaaagatatgtggctgtcggttgttaagtttctgccaaagaatttacatctggtctgcgtggacatgcccgggcatgaggggactactaggtcgagtctggacgacctgtccattgatgggcaggttaaaaggatccaccagtttgtagagtgcctgaagctaaacaagaagccatttcacttagttggcacttctatgggcggccaggtggcaggagtgtacgcggcctactacccttccgatgtgtcatcactttgtctggtctgccccgctggcctccagtacagcactgataatcagttcgtccagagactgaaagagctgcaaggatctgcggcagtcgagaagatccctctgattcccagcactcccgaggaaatgagtgaaatgctgcagctgtgttcctatgtgaggtttaaagtgccccagcaaattctacaggggctcgttgatgtacgaatccctcataataatttttataggaagctatttttggaaattgtcagtgaaaaatctaggtactctctgcaccagaatatggataagattaaggtaccaactcagatcatttggggtaagcaggaccaggtgctggatgtgagcggagctgatatgttagctaaatccatcgcaaattgtcaagttgaactgttagagaactgtgggcatagcgtggtcatggaacgtccccgaaagacagcaaagcttataatcgatttcttagcgagcgtgcacaacacagacaataacaagaagcttgactag

SEQ ID NO: 205091 - DNA, 522 bp, Artificial Sequence
  derived and/or modified sequence
atggacctggacgttgtaaatatgttcgtcatcgctggtggaactttagccattcctatattggctttcgtggctagcttcctgctatggcccagtgcccttattaggatttattactggtattggcggagaacgctaggcatgcaggtccgatacgtgcaccatgaagactaccagttttgctactccttccgaggaagaccgggccataaaccaagcattttgatgctgcacggcttctcagcccataaggatatgtggttatcagttgttaagttcctgcccaaaaacttacacctggtttgcgtcgatatgcccgggcatgagggcactacccgttcttcactggatgatctgagtatagatgggcaggtgaagcggattcatcagttcgtagaatgcttgaaattaaacaagaaaccttttcacttggtgggtactagcatgggcgggcaagtggccggggtctatgctgcctattatccaagcgacgtgtccagcctctgcctggtttgtccgtag

SEQ ID NO: 205092 - DNA, 957 bp, Artificial Sequence
  derived and/or modified sequence
atggacctggacgttgtcaatatgtttgtgatcgccgggggcactctggcaatccctatccttgcattcgttgcatcctttcttctgtggccatcggctctgattagaatctactactggtattggaggcgcacacttggaatgcaggtgcgctacgtgcaccacgaggattatcaattctgctatagctttagggggagaccggggcataaaccctcaattttaatgctgcatggctttagcgcccataaagatatgtggctttcagtcgtgaagttcctccccaagaacctgcacctggtgtgcgtcgatatgccaggtcatgaaggcacgacgcgctccagccttgatgacctttcaatcgacgggcaggtaaagagaatacaccaattcgtggaatgcctaaaactgaataagaagccttttcatctggtgggtaccagtatgggtggccaggtggcaggagtgtatgctgcgtactacccttcagacgtatcctctctgtgtctggtgtgccccgcagggctccaatacagtacagataatcagttcgtgcagcgcctaaaggagcttcaggggagcgccgccgtcgaaaagattccactcatcccaagcacccccgaagaaatgtccgagatgctccagttgtgttcatacgtccgattcaaggtgccccaacagatactccagggactggtggacgttagaatacctcacaataacttctaccggaagctattcctggagatcgtgtcagaaaagtcccgatatagcttgcaccagaacatggataaaattaaggttccaacccaaatcatttggggcaagcaagaccaagttctggatgtgagcggcgccgacgtaggccaggtgaattgccagctgccgggaggcgccagtggtaagttgtgggccctctcctctgacggtaaaccaggccgacagccctcctcttag

SEQ ID NO: 205093 - DNA, 1014 bp, Artificial Sequence
  derived and/or modified sequence
atggacctggatgtggtgaacatgtttgtgattgctgggggcaccctggccatccccatcctggcctttgtggccagcttcctgctgtggcccagcgccctgatccgcatctactactggtactggaggaggaccctgggcatgcaggtgcgctacgtgcaccacgaggactaccagttctgctacagcttccggggccggcccggccacaagcccagcatcctgatgctgcacggcttcagcgcccacaaggacatgtggctgtctgtggtgaagttcctgcccaagaacctgcacctggtgtgtgtggacatgcctggccacgagggcaccaccaggagcagcctggatgacctgagcattgatggccaggtgaagaggatccaccagtttgtggagtgcctgaagctgaacaagaagcccttccacctggtgggcacctccatgggcggccaggtggccggcgtgtatgctgcctactaccccagtgatgtgagcagcctgtgcctggtgtgcccagctggcctgcagtacagcacagacaaccagtttgtgcagaggctgaaggagctgcagggcagcgctgctgtggagaagatccccctcatccccagcaccccagaggagatgtctgagatgctgcagctgtgcagctatgtgcgcttcaaggtgccccagcagatcctgcagggcctggtggatgtgcgcatcccccacaacaacttctacaggaagctgttcctggagatcgtgtctgagaagagccgctacagcctgcaccagaacatggacaagatcaaggtgcccacccagatcatctggggcaagcaggaccaggtgctggatgtgtctggagctgacatgctggccaagagcatcgccaactgccaggtggagctgctggagaactgtggccacagcgtggtgatggagcggcccaggaagacagccaagctgatcatcgacttcctggcctctgtgcacaacacagacaacaacaagaagctggactag

SEQ ID NO: 205094 - DNA, 678 bp, Artificial Sequence
  derived and/or modified sequence
atggacctggatgtggtgaacatgtttgtgattgctgggggcaccctggccatccccatcctggcctttgtggccagcttcctgctgtggcccagcgccctgatccgcatctactactggtactggaggaggaccctgggcatgcaggtgcgctacgtgcaccacgaggactaccagttctgctacagcttccggggccggcccggccacaagcccagcatcctgatgctgcacggcttcagcgcccacaaggacatgtggctgtctgtggtgaagttcctgcccaagaacctgcacctggtgtgtgtggacatgcctggccacgagggcaccaccaggagcagcctggatgacctgagcattgatggccaggtgaagaggatccaccagtttgtggagtgcctgaagctgaacaagaagcccttccacctggtgggcacctccatgggcggccaggtggccggcgtgtatgctgcctactaccccagtgatgtgagcagcctgtgcctggtgtgcccagctggcctgcagtacagcacagacaaccagtttgtgcagaggctgaaggagctgcagggcagcgctgctgtggagaagatccccctcatccccagcaccccagaggagatgtctgagatgctgcagctgtgcagctatgtgcgcttcaaggtgccctag

SEQ ID NO: 205095 - DNA, 522 bp, Artificial Sequence
  derived and/or modified sequence
atggacctggatgtggtgaacatgtttgtgattgctgggggcaccctggccatccccatcctggcctttgtggccagcttcctgctgtggcccagcgccctgatccgcatctactactggtactggaggaggaccctgggcatgcaggtgcgctacgtgcaccacgaggactaccagttctgctacagcttccggggccggcccggccacaagcccagcatcctgatgctgcacggcttcagcgcccacaaggacatgtggctgtctgtggtgaagttcctgcccaagaacctgcacctggtgtgtgtggacatgcctggccacgagggcaccaccaggagcagcctggatgacctgagcattgatggccaggtgaagaggatccaccagtttgtggagtgcctgaagctgaacaagaagcccttccacctggtgggcacctccatgggcggccaggtggccggcgtgtatgctgcctactaccccagtgatgtgagcagcctgtgcctggtgtgcccctag

SEQ ID NO: 205096 - DNA, 957 bp, Artificial Sequence
  derived and/or modified sequence
atggacctggatgtggtgaacatgtttgtgattgctgggggcaccctggccatccccatcctggcctttgtggccagcttcctgctgtggcccagcgccctgatccgcatctactactggtactggaggaggaccctgggcatgcaggtgcgctacgtgcaccacgaggactaccagttctgctacagcttccggggccggcccggccacaagcccagcatcctgatgctgcacggcttcagcgcccacaaggacatgtggctgtctgtggtgaagttcctgcccaagaacctgcacctggtgtgtgtggacatgcctggccacgagggcaccaccaggagcagcctggatgacctgagcattgatggccaggtgaagaggatccaccagtttgtggagtgcctgaagctgaacaagaagcccttccacctggtgggcacctccatgggcggccaggtggccggcgtgtatgctgcctactaccccagtgatgtgagcagcctgtgcctggtgtgcccagctggcctgcagtacagcacagacaaccagtttgtgcagaggctgaaggagctgcagggcagcgctgctgtggagaagatccccctcatccccagcaccccagaggagatgtctgagatgctgcagctgtgcagctatgtgcgcttcaaggtgccccagcagatcctgcagggcctggtggatgtgcgcatcccccacaacaacttctacaggaagctgttcctggagatcgtgtctgagaagagccgctacagcctgcaccagaacatggacaagatcaaggtgcccacccagatcatctggggcaagcaggaccaggtgctggatgtgtctggagcagatgtgggccaggtgaactgccagctgcccggcggggccagcggcaagctgtgggccctgagcagtgatggcaagccaggccggcagcccagcagctag

SEQ ID NO: 205097 - DNA, 1014 bp, Artificial Sequence
  derived and/or modified sequence
atggacctggacgtggtgaacatgttcgtgatcgccggcggcaccctagccatacccattctcgcctttgtcgcgtccttcctgctgtggccatctgcactcattagaatttactattggtactggcgacgcacactcgggatgcaagtgcggtacgttcaccatgaagattatcagttttgctactcttttcgggggcggccaggtcataagcctagcatcctcatgctccacggattctccgctcataaagatatgtggttaagcgtggttaagttcttaccaaaaaacctgcatttggtctgtgtcgacatgcctggccacgaaggaacaacaagaagtagcctggatgacctgagtatagacggccaagtgaagcggatccatcagttcgtggaatgtctgaagctgaataaaaaaccatttcatctcgtcggaactagcatgggggggcaggtggctggagtctatgcagcatactaccctagtgatgtcagctccctgtgcttggtatgtcccgccggtctgcagtattctacagacaaccaattcgtgcagaggctcaaagagctgcagggcagtgccgccgtcgaaaagatacccctcatacctagcacgcctgaagagatgagtgagatgttgcaactctgtagctatgtacggttcaaggtccctcagcaaatactgcagggtctggtggatgttagaatccctcataataatttctatcggaagctcttcctcgaaatagtctcagaaaaatccaggtacagtctccaccagaatatggacaagattaaggtccccactcagattatttggggcaaacaggaccaggtgcttgatgtgtccggtgccgacatgctggctaaatcaattgctaactgtcaggtagagctcctggagaattgtggacactcagtggtaatggagagaccccgtaaaaccgcaaaattaatcatcgatttccttgctagcgtgcataacactgataacaataaaaagctcgattag

SEQ ID NO: 205098 - DNA, 678 bp, Artificial Sequence
  derived and/or modified sequence
atggacctggacgtggtgaacatgttcgtgatcgccggcggcaccctggccattccgattctggcctttgtcgccagctttctgttgtggccttctgcactgatacgtatatattattggtactggcggcggacattgggcatgcaggtgcgttacgtccatcacgaagactaccagttctgctactcttttagggggcgcccagggcacaaacccagcatccttatgctgcacggattttccgcacataaggacatgtggctatccgtcgtaaaattcctgccaaaaaaccttcacctcgtttgcgtggatatgcccggccatgagggtaccactcgatctagcctcgacgacctgagcatcgacggtcaggtgaagagaatccaccaatttgtggaatgccttaagcttaataaaaaaccgttccacctggtgggaacctcaatgggcgggcaggttgccggagtgtatgccgcatattacccatccgacgtgtcctccctttgtctggtgtgtccggcgggacttcagtactccaccgataaccagttcgtgcagcggttaaaagagcttcaggggagtgcggctgtggagaagatcccccttattcccagcacacctgaggaaatgagtgaaatgctgcagctttgctcctacgtccgcttcaaagtcccatag

SEQ ID NO: 205099 - DNA, 1014 bp, Artificial Sequence
  derived and/or modified sequence
atggacctggacgtggtgaacatgttcgtgatcgccggcggcaccctggctatcccaatcctggcattcgtggccagttttttgctgtggcccagcgcacttatcagaatctattactggtactggagacgcaccctgggaatgcaggtcaggtatgtccaccatgaggattaccagttctgctacagctttcgagggcggccgggccacaaaccttcaatcctaatgctacatgggttctccgctcataaagacatgtggttgagcgtggtaaagttcctccccaagaatcttcacctggtctgtgtggatatgcccggtcacgaggggacaactcggtcaagccttgacgacctttcaatcgacggccaggttaaacgtattcatcagtttgtagagtgtcttaaactgaacaagaaacctttccacctggtgggtacatctatgggcggacaagtcgctggcgtctacgctgcctattatccttcagatgtaagttctttgtgcttagtgtgtcccgccggtcttcaatattccaccgataaccagtttgtgcagcgactgaaggagctgcagggatcagccgccgtggagaagattcctctgattcccagtactcccgaagaaatgtcagagatgcttcagctttgttcgtacgttcgcttcaaagtcccacaacagatcttgcagggactggtcgatgtcagaataccccataataacttctatagaaaactttttctggagattgtctcggagaagagtaggtattccctgcaccaaaacatggataagataaaagtgcccactcagataatctggggcaagcaagaccaggttctggatgtctctggggctgatatgctggctaagtctatcgctaattgccaggtggagctgctggagaattgcggccattctgtcgttatggagcggccacgaaaaacagctaagttaataatcgatttcctggcctctgtgcacaacactgacaataacaagaagctggattag

SEQ ID NO: 205100 - DNA, 522 bp, Artificial Sequence
  derived and/or modified sequence
atggacctggacgtggtgaacatgttcgtgatcgccggcggcaccctcgcaattccaatcctagcttttgtagcttcttttcttctgtggcccagtgccctgatccgtatctattactggtattggaggcgcaccctgggaatgcaagtccgctacgtgcatcatgaagactaccaattttgttattcctttcgcggtcgcccaggccataaacctagtatcctgatgcttcacggcttcagcgcccacaaggatatgtggctttcagtggtgaagttcttgccaaagaacctacatctggtgtgcgtcgatatgccaggacacgaagggacaacaagaagctcccttgatgatctatccattgatggccaggtaaaacgaattcatcaatttgtcgagtgcttgaagctcaacaaaaagccctttcatttagttgggacgtcaatgggtgggcaagtggctggcgtgtacgcggcctactaccctagcgatgtgtcgtctctctgcctggtatgcccatag

SEQ ID NO: 205101 - DNA, 957 bp, Artificial Sequence
  derived and/or modified sequence
atggacctggacgtggtgaacatgttcgtgatcgccggcggcaccttggcgatcccaatacttgccttcgtggctagcttcctgttatggcctagcgccctgatccgcatctattattggtactggcggagaacactgggcatgcaggtgcggtacgtgcaccatgaagactatcagttctgctacagctttcgcggcagacctggccacaaaccatcaatactcatgttgcacggatttagcgctcataaggatatgtggctgagtgtagtcaagttcctcccaaagaacctacacttggtgtgcgtggacatgcctggtcacgaaggtacaacgagatcctccctggacgacttatcaattgacggtcaagtgaaaaggatccaccagtttgtcgagtgtttgaaactgaataagaagccctttcatctcgtgggaacaagtatgggtgggcaggtggcaggggtttacgcagcttactacccgtcagatgtctcctccctgtgcctagtgtgtcctgcaggtctgcagtactcaacggataaccagtttgtccagcgcttgaaggaactccaaggttctgcagccgtggagaaaatacccttgatccccagcacaccagaggagatgtccgagatgttgcagttgtgctcatatgtgcgcttcaaagtgccacagcagatcctccagggtttagttgatgtacgtataccacataataacttttaccgaaagcttttcctggaaatagtctctgagaagtcccgctattctctgcatcaaaacatggataaaattaaggtgcccactcagataatttggggaaaacaggaccaggttctggatgtgagtggtgctgacgttgggcaggttaactgccagctgccaggcggggcctctgggaagctgtgggcactgtcaagcgacggaaaaccaggacggcagcctagcagctag

SEQ ID NO: 205102 - DNA, 1014 bp, Artificial Sequence
  derived and/or modified sequence
atggaccttgatgtggtgaatatgttcgtcatagccggtgggaccctcgccattcccatcttggcctttgtcgcttcctttctcctctggccttccgccttgattcgaatttattactggtattggcgtcggactctaggcatgcaggtgcggtatgttcatcacgaggattaccagttttgttacagttttagagggaggcccggtcataaaccatctatcctgatgctccacggttttagcgcgcataaggacatgtggctgtcagttgttaagtttctgccgaagaacctgcatttggtctgtgtcgacatgcccggtcacgaaggcacaactcggtcttcgctggatgacctgagtattgatggacaggtcaagcgcattcatcagtttgtggagtgcctgaaactgaacaagaagccatttcacctggtgggtacgagtatgggtgggcaggtcgccggtgtgtatgctgcatactacccgtcggacgtgtcttccctgtgcttggtatgtcccgctggcctccaatattcaaccgacaatcagttcgtgcagcggctgaaggaattgcaaggctcagcagcagttgaaaagatacccctgataccttccacccctgaagagatgtcggaaatgctccaactctgtagttacgtgagatttaaagttcctcaacagattttgcaaggcttggtcgatgtccgcattcctcataacaatttctacagaaaattatttctggaaattgtttcagaaaaatccaggtactcactgcaccaaaacatggacaaaatcaaagtcccaactcagatcatttgggggaagcaggatcaagtgttagatgtgtcaggagccgacatgctggcaaagagcatcgctaattgtcaggtcgagctccttgaaaactgcggacattccgtggtgatggagaggccaaggaaaacagccaagttgattattgatttcctcgcttccgtacataacaccgataataacaaaaagctcgactag

SEQ ID NO: 205103 - DNA, 678 bp, Artificial Sequence
  derived and/or modified sequence
atggatctcgatgtcgtgaacatgtttgtgatagccggtgggaccttagccatccccatccttgcgtttgtggcttcgtttctcttgtggccatccgccctgattcgcatctactattggtactggcggagaacccttggcatgcaggtccggtacgtgcatcacgaggattatcaattctgttatagctttcggggtagaccgggtcacaaaccatcaattctgatgctccatggcttctccgcccataaagatatgtggttgagcgtggtgaagtttctccccaagaatctgcatcttgtatgcgtcgatatgcccggtcatgaaggtaccacacgaagctctctggacgaccttagcattgacggccaggtgaagagaatccatcagtttgttgagtgcctcaagctcaacaaaaagcccttccacctggtgggcacctctatgggcggtcaggtcgctggtgtgtacgccgcttactacccaagcgacgtgtcctctctgtgtcttgtctgtcctgccggacttcagtacagtactgataaccaattcgttcagcgtctaaaggaattgcagggctctgccgctgttgagaaaattcccctgatcccttcaacgcccgaggaaatgagcgagatgctgcagctgtgcagctatgtgaggtttaaagtgccttag

SEQ ID NO: 205104 - DNA, 1014 bp, Artificial Sequence
  derived and/or modified sequence
atggacttagatgtggtgaacatgtttgtgattgccggagggacgctcgccattcctatcctggccttcgttgcctctttcctactttggccaagtgccctgattcggatctactactggtactggagacgaacactgggcatgcaggtaagatacgtgcaccacgaagactatcaattttgttattcattccgcggaagaccaggtcataaaccttccattctgatgctgcatgggttctcagctcataaggatatgtggttgtccgttgtgaaattcctgcccaaaaatctgcacctcgtatgcgtggacatgcctggacacgagggaacgacaagaagctcactcgatgatctgtcaatcgacgggcaggtgaagcggatacatcaatttgtcgaatgcctcaagctcaacaagaagccatttcatttggtgggaactagcatgggcggacaagtggctggcgtgtatgcagcgtactaccccagtgatgtgagctcgttgtgcctggtgtgcccggcaggtctccagtactctactgataaccagttcgtgcagagattaaaagaactccagggctccgctgccgttgaaaagattcctttgattccttctactccagaagagatgtcggagatgctgcaactgtgcagttatgttcgttttaaagtgccccaacagattttgcaggggctggttgatgtgagaattcctcacaataatttctaccggaagctgtttcttgaaattgtctccgaaaaaagcagatactcattgcatcagaatatggacaagataaaggttccgacccaaataatttggggcaaacaggaccaggtgcttgatgtatccggggcagatatgctggctaaaagcatcgccaattgccaggtagaacttctggaaaattgtggccatagcgtggtcatggaacgaccaagaaagacagctaagctgatcattgacttcctggcaagcgtccacaatacggacaacaacaaaaagctcgactag

SEQ ID NO: 205105 - DNA, 522 bp, Artificial Sequence
  derived and/or modified sequence
atggatctggatgtggtaaacatgtttgttatcgcaggtggcacacttgcgattcccatcctagctttcgtcgcaagtttcctgctatggcccagcgcactcatcagaatctactactggtattggcgacgcactctcggcatgcaggtgcggtacgtgcatcatgaagactaccagttctgttactcgttcaggggacgaccaggtcacaagccctcaattcttatgcttcatggattctctgcccacaaggatatgtggctcagcgtcgtgaaattcttgcccaaaaatcttcatttggtgtgcgtggatatgccaggtcatgaaggaacaacccggtcatctctcgatgacctaagtatcgatggccaggtcaaacgcattcaccagtttgtagagtgcctcaaacttaacaagaaaccatttcaccttgtggggacgagtatgggtggtcaggtagcgggagtgtacgccgcttactatccctctgacgtctcaagtctgtgcctggtctgtccgtag

SEQ ID NO: 205106 - DNA, 957 bp, Artificial Sequence
  derived and/or modified sequence
atggatctggatgtagtcaatatgtttgttatcgctggcggaacccttgccatacccattctggcgttcgtggctagcttcttgctgtggccgagtgcgctgatccggatctactactggtactggcgcaggactctcggaatgcaagttaggtacgtccatcacgaggactatcaattctgctacagttttaggggcaggccaggacataaaccatccatcctaatgctgcatggattttccgcccacaaggacatgtggctcagtgtggtgaagtttctgcccaagaatctgcacctcgtatgcgtagatatgcctggccacgaaggcactacacgttccagtttggacgatcttagcatcgacgggcaagtcaagagaatacaccagtttgtcgaatgtctgaaactgaataaaaaaccctttcatcttgtgggaactagtatgggcggacaagtcgccggagtgtatgcggcttattacccctctgacgtgtcctctctgtgtcttgtgtgccccgcaggtcttcagtactcaacagacaaccagttcgtgcagcgattgaaggagctccagggcagcgccgctgtcgagaaaatccctctgatccccagcacccccgaagaaatgtctgagatgttacaattgtgctcatacgtccggtttaaggtgccacagcagattttacaggggctggtggacgttcggataccacacaacaacttctaccggaaactctttctggaaattgtgagcgaaaaatcacgatactcattgcaccagaatatggataaaataaaagtgccaacacagatcatctgggggaaacaagaccaggtgttggacgtatctggagccgacgtggggcaagttaactgtcaattgcctggtggggcttcagggaagctttgggccctcagctctgacggtaaaccgggtcgacagccatcgtcctag

SEQ ID NO: 205107 - protein, 345 aa, Artificial Sequence
  derived and/or modified sequence
MKGELLLFSSVIVLLQVVCSCPDKCYCQSSTNFVDCSQQGLAEIPSHLPPQTRTLHLQDNQIHHLPAFAFRSVPWLMTLNLSNNSLSNLAPGAFHGLQHLQVLNLTQNSLLSLESRLFHSLPQLRELDLSSNNISHLPTSLGETWENLTILAVQQNQLQQLDRALLESMPSVRLLLLKDNLWKCNCHLLGLKLWLEKFVYKGGLTDGIICESPDTWKGKDLLRIPHELYQPCPLPAPDPVSSQAQWPGSAHGVVLRPPENHNAGERELLECELKPKPRPANLRHAIATVIITGVVCGIVCLMMLAAAIYGCTYAAITAQYHGGPLAQTNDPGKVEEKERFDSSPA

SEQ ID NO: 205108 - DNA, 1038 bp, Artificial Sequence
  derived and/or modified sequence
atgaagggcgagctgctgctgttcagcagcgtgatcgtgctgctgcaggtggtgtgcagctgccccgacaagtgctactgccagagcagcaccaacttcgtggactgcagccagcagggcctggccgagatccccagccacctgcccccccagaccagaaccctgcacctgcaggacaaccagatccaccacctgcccgccttcgccttcagaagcgtgccctggctgatgaccctgaacctgagcaacaacagcctgagcaacctggcccccggcgccttccacggcctgcagcacctgcaggtgctgaacctgacccagaacagcctgctgagcctggagagcagactgttccacagcctgccccagctgagagagctggacctgagcagcaacaacatcagccacctgcccaccagcctgggcgagacctgggagaacctgaccatcctggccgtgcagcagaaccagctgcagcagctggacagagccctgctggagagcatgcccagcgtgagactgctgctgctgaaggacaacctgtggaagtgcaactgccacctgctgggcctgaagctgtggctggagaagttcgtgtacaagggcggcctgaccgacggcatcatctgcgagagccccgacacctggaagggcaaggacctgctgagaatcccccacgagctgtaccagccctgccccctgcccgcccccgaccccgtgagcagccaggcccagtggcccggcagcgcccacggcgtggtgctgagaccccccgagaaccacaacgccggcgagagagagctgctggagtgcgagctgaagcccaagcccagacccgccaacctgagacacgccatcgccaccgtgatcatcaccggcgtggtgtgcggcatcgtgtgcctgatgatgctggccgccgccatctacggctgcacctacgccgccatcaccgcccagtaccacggcggccccctggcccagaccaacgaccccggcaaggtggaggagaaggagagattcgacagcagccccgcctag

SEQ ID NO: 205109 - DNA, 1038 bp, Artificial Sequence
  derived and/or modified sequence
atgaagggggagctgcttctattctcatccgtaattgtgctcctccaggtcgtgtgtagttgtcccgacaagtgctactgccagtcgagcacaaatttcgtggactgcagccagcagggcttggctgaaataccatcacacttgccacctcagacacgaactctgcacctgcaagacaatcaaattcaccacctgcccgctttcgcattcagatcagttccatggcttatgactcttaatttatccaataattcactgagcaacctagctcctggtgcatttcatggcctacagcatctacaggtgctgaatctgacccaaaacagcctgttaagcctggaaagtcgcctgttccatagtctgccccaactccgggaactggatctgtcttccaataacatcagccatctgcccacatctttgggcgagacgtgggagaatcttacaattctcgccgttcagcagaaccagctccagcagcttgatagagccttgctggagtctatgccatctgtgcggctgctccttcttaaggataacctctggaaatgtaattgccaccttttgggattgaaattgtggctggagaagtttgtgtacaagggcggactaactgacgggataatatgtgagagccctgatacctggaagggaaaggatctcctgcgcattccccacgaattataccaaccttgtcctcttccagctcccgaccctgtgtcatctcaggctcagtggccagggagtgctcacggcgtggtcctccgccctccagagaatcacaacgccggcgagcgagagttactcgaatgtgaattaaagccaaaacccaggccggccaacctgcgccatgcaatcgccaccgtcattataaccggtgtggtgtgcggaatcgtgtgcctgatgatgctggctgccgcgatctatgggtgcacatacgccgccattactgcacagtatcacggggggcccctggcacagaccaatgaccctgggaaagtggaagaaaaggagcgttttgacagcagccccgcttag

SEQ ID NO: 205110 - DNA, 1423 bp, Artificial Sequence
  derived and/or modified sequence
ttgaaagcaacaactgttttctgcattgaagaaaagcaagggcagggttcagaaagactgaatgtaaagctgggctctgagtctgccatgcccttcgtgtgttgctctgcacattaattaaagggtctacgaggtcagcaaggacgcccaaggagactcagtcatgaaaggtgaactgctcctgttttccagtgtgattgtcctgctccaggtggtatgcagctgcccggacaagtgttactgtcagtcatctacaaattttgtagactgcagccagcagggtctggccgaaatcccttcccatttacctcctcagactcgaacgctgcatttacaagataatcagatacaccatcttcctgcttttgcatttaggtcagtgccatggctcatgaccttaaacttgtccaacaattccctttcaaatctggcccctggagctttccatgggcttcagcacttgcaggttttaaatctaacccagaattcactcctttccctggaaagcagacttttccattccctccctcagctgagggagcttgatttgtcatcaaacaacataagccaccttcccacatccttgggagagacttgggagaacctaactatacttgcggttcaacaaaaccagcttcagcagcttgatcgagcgctcctggaatccatgcccagtgtgaggcttttacttctcaaggacaacctctggaaatgcaattgccacttgctcggtcttaaactctggctggagaaatttgtctataaagggggactaacagacggcatcatctgtgaatcaccagacacctggaagggaaaggacctccttaggatccctcatgagctgtaccagccctgccctcttcctgctcctgatccagtgtcctcgcaggctcagtggcccggctctgcccacggtgtggtcctgaggcctcctgagaaccacaacgcgggggagcgagaactcttggagtgcgagctcaaacccaagccaaggccggccaacctgcgtcatgccattgccactgtcatcatcactggcgttgtgtgtgggattgtgtgtctcatgatgttggcagctgccatctatggctgcacctatgcggcaatcacagcccagtaccatgggggacccttggctcaaaccaatgatcctgggaaggtggaagaaaaagagcgatttgacagctcaccagcctgagagcttttgtctcaaataggattggtcattgcaggccagaagatagtgtctgagtagggctgatgtgtttcctgttagtctgattttgcttttgccaaaagacaaaaaaaaaaaaaaaaaaaaaaagaaaaaaaaaagatgtgtctgtaaaaaatatttctggggaggaatttatgttgcgatttttaaaatactataggtaaaataaagatgatacttgtg

SEQ ID NO: 205111 - DNA, 1318 bp, Artificial Sequence
  derived and/or modified sequence
aagcctctgaaatgcaccatgtcggtgcccaggctcattctgctctgccttaagtgtccttcgttctctggaccacagccttcccaagaatgaggacctgttcttgctccctgctggacccctgcctccagcaagatgctgagtacacagacgacccataggtgaactgctcctgttttccagtgtgattgtcctgctccaggtggtatgcagctgcccggacaagtgttactgtcagtcatctacaaattttgtagactgcagccagcagggtctggccgaaatcccttcccatttacctcctcagactcgaacgctgcatttacaagataatcagatacaccatcttcctgcttttgcatttaggtcagtgccatggctcatgaccttaaacttgtccaacaattccctttcaaatctggcccctggagctttccatgggcttcagcacttgcaggttttaaatctaacccagaattcactcctttccctggaaagcagacttttccattccctccctcagctgagggagcttgatttgtcatcaaacaacataagccaccttcccacatccttgggagagacttgggagaacctaactatacttgcggttcaacaaaaccagcttcagcagcttgatcgagcgctcctggaatccatgcccagtgtgaggcttttacttctcaaggacaacctctggaaatgcaattgccacttgctcggtcttaaactctggctggagaaatttgtctataaagggggactaacagacggcatcatctgtgaatcaccagacacctggaagggaaaggacctccttaggatccctcatgagctgtaccagccctgccctcttcctgctcctgatccagtgtcctcgcaggctcagtggcccggctctgcccacggtgtggtcctgaggcctcctgagaaccacaacgcgggggagcgagaactcttggagtgcgagctcaaacccaagccaaggccggccaacctgcgtcatgccattgccactgtcatcatcactggcgttgtgtgtgggattgtgtgtctcatgatgttggcagctgccatctatggctgcacctatgcggcaatcacagcccagtaccatgggggacccttggctcaaaccaatgatcctgggaaggtggaagaaaaagagcgatttgacagctcaccagcctgagagcttttgtctcaaataggattggtcattgcaggccagaagatagtgtctgagtagggctgatgtgtttcctgttagtctgattttgcttttgccaaaagacaaaaaaaaaaaaaaaaaaaaaaa

SEQ ID NO: 205112 - DNA, 1038 bp, Artificial Sequence
  derived and/or modified sequence
atgaagggggagctgctgctcttcagcagcgtcatcgtgctgctgcaggtggtgtgcagctgcccagacaagtgctactgccagagcagcaccaactttgtggactgcagccagcagggcctggccgagatccccagccacctgcccccccagaccaggaccctgcacctgcaggacaaccagatccaccacctgcctgcctttgccttccgctctgtgccctggctgatgaccctgaacctgagcaacaacagcctgagcaacctggcccctggggccttccacggcctgcagcacctgcaggtgctgaacctgacccagaacagcctgctgagcctggagagccgcctcttccacagcctgccccagctgcgggagctggacctgagcagcaacaacatcagccacctgcccaccagcctgggggagacctgggagaacctgaccatcctggccgtgcagcagaaccagctgcagcagctggaccgggccctgctggagagcatgcccagcgtgcggctgctgctgctgaaggacaacctgtggaagtgcaactgccacctgctgggcctgaagctgtggctggagaagtttgtgtacaagggcggcctgacagatggcatcatctgtgagagcccagacacctggaagggcaaggacctgctgcgcatcccccatgagctgtaccagccctgccccctgcctgccccagaccctgtgagcagccaggcccagtggccaggcagcgcccatggagtggtgctgcggcccccagagaaccacaatgctggggagcgggagctgctggagtgtgagctgaagcccaagcccaggcctgccaacctgcggcatgccatcgccaccgtcatcatcaccggggtggtgtgtggcatcgtgtgcctgatgatgctggccgccgccatctacggctgcacctacgccgccatcacagcccagtaccatggaggccccctggcccagaccaatgaccccgggaaggtggaggagaaggagagatttgacagcagccctgcctag

SEQ ID NO: 205113 - DNA, 1038 bp, Artificial Sequence
  derived and/or modified sequence
atgaagggcgagctgctgctgttcagcagcgtgatcgtgctgctgcaggtagtctgcagctgccccgataagtgttactgccagtctagcaccaacttcgtcgactgttcgcagcaaggcctggctgagattccctctcacctgccaccgcagacaagaacactgcacctgcaggataaccagatccatcacttacctgccttcgcgttccgctccgtcccttggttgatgaccttgaacctatccaacaatagtctaagtaacttggcccccggcgccttccacggcttgcagcacctccaggtcctgaatctgactcagaattctctgctgtcgttggagtctcgtctttttcattcgctcccccagctccgtgagcttgacctctcgtctaacaatatttctcacctgcccacctcactgggagagacatgggaaaacctaacgattctcgccgtacaacaaaatcaactgcaacagctggatagggccctgctggaatccatgccaagcgtgaggcttcttttgctaaaggacaatctgtggaagtgtaattgtcacctgcttggccttaagttgtggctggaaaagtttgtctacaaaggaggactcactgacggtatcatttgcgagagtcccgatacctggaagggaaaagatctgctcagaatcccccacgaattgtatcagccctgtccgctgcccgctcctgacccagtctcttctcaggcacaatggcccggtagtgcccatggtgtggtattgcggcctcctgagaaccacaatgcgggagagcgggaactactcgaatgtgaactgaaacctaaacccagacccgctaacttgaggcatgctatcgccactgtcattataaccggggtggtgtgtggaatagtgtgcctaatgatgctggccgctgcgatttatgggtgtacctacgcagctataactgcccaataccacggaggacccctggcacagacaaacgatccaggcaaggtggaagagaaagagaggtttgactccagtccagcatag

SEQ ID NO: 205114 - DNA, 1038 bp, Artificial Sequence
  derived and/or modified sequence
atgaagggtgagcttcttctcttctcctctgtcatagtgcttctgcaggtggtgtgctcgtgtccagacaagtgctattgccagagcagtactaattttgttgattgttcccagcagggactcgccgagattccgtctcatctgcccccacaaacccgcacgctgcatctccaagataaccaaatccatcatctcccggcttttgctttccggagtgtgccatggctaatgacactgaacctgtccaacaattctttgtcgaacctggcacccggagctttccacggactgcaacacctacaggtgttgaacctgacacaaaattccctgctgtctctggaatcacggctcttccatagcctaccgcaactccgggaactggacctgtcttccaataatatttcacatctccccacaagccttggtgaaacatgggagaaccttactattctggcagtgcagcaaaatcagttgcaacagctcgacagagccctgttggagtctatgccttcagtgcgattacttctgctgaaagataacctttggaaatgtaattgtcatctgctggggttgaagctttggttggagaaattcgtttacaagggagggctgactgatggaatcatttgcgagtccccagacacttggaaggggaaagatctgctgcgcatccctcacgaattgtaccagccttgtcccctacccgctccggaccccgtgtcatcgcaggcccagtggccaggcagcgcgcacggagtggtcctaagaccccctgagaaccataacgctggagagcgcgaactgcttgaatgcgagctgaagcccaaaccgaggcccgctaacctgcggcatgctattgcaactgtcataatcaccggagtggtgtgcggcattgtatgcctaatgatgcttgccgctgccatctacggctgcacctacgctgcaattaccgcgcagtatcatggcggacccctggcgcagacaaacgatcctggcaaggtggaggaaaaggaacgctttgacagctctcctgcctag

SEQ ID NO: 205115 - protein, 808 aa, Artificial Sequence
  derived and/or modified sequence
MWFFARDPVRDFPFELIPEPPEGGLPGPWALHRGRKKATGSPVSIFVYDVKPGAEEQTQVAKAAFKRFKTLRHPNILAYIDGLETEKCLHVVTEAVTPLGIYLKARVEAGGLKELEISWGLHQIVKALSFLVNDCSLIHNNVCMAAVFVDRAGEWKLGGLDYMYSAQGNGGGPPRKGIPELEQYDPPELADSSGRVVREKWSADMWRLGCLIWEVFNGPLPRAAALRNPGKIPKTLVPHYCELVGANPKVRPNPARFLQNCRAPGGFMSNRFVETNLFLEEIQIKEPAEKQKFFQELSKSLDAFPEDFCRHKVLPQLLTAFEFGNAGAVVLTPLFKVGKFLSAEEYQQKIIPVVVKMFSSTDRAMRIRLLQQMEQFIQYLDEPTVNTQIFPHVVHGFLDTNPAIREQTVKSMLLLAPKLNEANLNVELMKHFARLQAKDEQGPIRCNTTVCLGKIGSYLSASTRHRVLTSAFSRATRDPFAPSRVAGVLGFAATHNLYSMNDCAQKILPVLCGLTVDPEKSVRDQAFKAIRSFLSKLESVSEDPTQLEEVEKDVHAASSPGMGGAAASWAGWAVTGVSSLTSKLIRSHPTTAPTETNIPQRPTPEGVPAPAPTPVPATPTTSGHWETQEEDKDTAEDSSTADRWDDEDWGSLEQEAESVLAQQDDWSTGGQVSRASQVSNSDHKSSKSPESDWSSWEAEGSWEQGWQEPSSQEPPPDGTRLASEYNWGGPESSDKGDPFATLSARPSTQPRPDSWGEDNWEGLETDSRQVKAELARKKREERRREMEAKRAERKVAKGPMKLGARKLD

SEQ ID NO: 205116 - protein, 787 aa, Artificial Sequence
  derived and/or modified sequence
MWFFARDPVRDFPFELIPEPPEGGLPGPWALHRGRKKATGSPVSIFVYDVKPGAEEQTQVAKAAFKRFKTLRHPNILAYIDGLETEKCLHVVTEAVTPLGIYLKARVEAGGLKELEISWGLHQIVKALSFLVNDCSLIHNNVCMAAVFVDRAGEWKLGGLDYMYSAQGNGGGPPRKGIPELEQYDPPELADSSGRVVREKWSADMWRLGCLIWEVFNGPLPRAAALRNPGKIPKTLVPHYCELVGANPKVRPNPARFLQNCRAPGGFMSNRFVETNLFLEEIQIKEPAEKQKFFQELSKSLDAFPEDFCRHKVLPQLLTAFEFGNAGAVVLTPLFKVGKFLSAEEYQQKIIPVVVKMFSSTDRAMRIRLLQQMEQFIQYLDEPTVNTQIFPHVVHGFLDTNPAIREQTVKSMLLLAPKLNEANLNVELMKHFARLQAKDEQGPIRCNTTVCLGKIGSYLSASTRHRVLTSAFSRATRDPFAPSRVAGVLGFAATHNLYSMNDCAQKILPVLCGLTVDPEKSVRDQAFKAIRSFLSKLESVSEDPTQLEEVEKDVHAASSPGMGGAAASWAGWAVTGVSSLTSKLIRSHPTTAPTETNIPQRPTPEGVPAPAPTPVPATPTTSGHWETQEEDKDTAEDSSTADRWDDEDWGSLEQEAESVLAQQDDWSTGGQVSRASQSPTGAAGKLRAPGNRAGRSQAPRSHLLTVHGWPASITGVAQSPATRATPSLPCLHVPAPSRGQTLGVRTTGRASRLTVDRSRLSWPGRSARSGGGRWRPNAPRGRWPRAP

SEQ ID NO: 205117 - DNA, 2427 bp, Artificial Sequence
  derived and/or modified sequence
atgtggtttttcgcccgggaccccgtgcgggacttcccctttgagttgatccctgagcccccagaaggaggcctgcccggtccctgggccctgcatcgcggcaggaagaaggctacgggctctccagtctccatttttgtgtatgatgtgaaacccggggccgaggagcaaacccaggtggccaaggccgcttttaagcgcttcaagacactgcggcacccgaatatacttgcatatattgacggtctggaaactgagaaatgcttacacgtagttaccgaggcggtaacccccctcggaatatatctgaaggcccgcgtagaggccggaggtctgaaagagctcgagatatcttggggactgcatcagatcgttaaggccctgagttttctagtcaatgactgttctctgatccataacaacgtatgcatggcagctgtgttcgtagatagggccggggaatggaagctgggcggtctcgactacatgtactctgctcagggtaatggagggggacccccaagaaagggaattccagagctagagcagtatgatccaccggagctcgcggactctagcggtagggtggtacgcgagaagtggagtgcagatatgtggagattaggttgccttatctgggaggtcttcaacggccccctgcccagagcagcggcccttcggaacccgggtaagatcccgaagaccctggtcccccactattgtgaactagtgggtgctaatccgaaagtccgacccaaccccgctcgattcctgcaaaactgccgggccccaggcggctttatgagcaaccggtttgtcgagacaaacctcttcctcgaggaaatccaaattaaggaacctgctgaaaaacaaaagttctttcaggaactgagcaagtcactggatgctttccctgaagacttctgccgccacaaggttctccctcagctgctgactgcattcgagtttggaaatgccggcgcagtagtgctcacgccactgttcaaagttggaaagttcctttccgccgaagaatatcagcaaaagatcattccggtggtggtcaagatgttctcctctacagatcgggccatgcggattcgtctcctgcagcagatggagcaatttatccagtatcttgacgagccaacggtgaatacgcagatctttccgcatgtggtgcacgggtttctcgacactaatccagcgataagagagcaaaccgttaagtctatgttacttctcgcaccaaagctgaatgaagctaatctgaatgtggagttgatgaaacattttgcccgcctgcaggcgaaagacgaacaagggcccatcagatgtaataccacggtttgcttaggcaagatcggatcctatcttagtgcatccacgcgacaccgcgtgctgacttccgctttttcccgcgctaccagggacccctttgcccctagccgtgtcgccggggtgctgggctttgcagctacccacaatctgtattccatgaatgattgcgctcaaaagatcctacccgtgttgtgcgggctgacagtggaccctgaaaaatccgttcgagatcaagccttcaaggccatcaggtcgtttttatcaaaactggagtccgtgtccgaggacccaacccaactagaggaggtggaaaaggatgtgcatgccgcatcatcccccgggatgggaggggcagcagcctcctgggccgggtgggcagtgaccggggtatcctctctgacaagtaaattgatcaggagtcaccccacaacagcccccaccgaaacaaatatcccccagcgccccactccagagggagtgcctgctcccgcccccacacctgtgccggcaaccccaaccacttcagggcattgggaaactcaggaagaggacaaggacaccgcggaagatagctctaccgccgaccgatgggacgatgaagactggggctccctggaacaggaggccgaaagcgtgctggcccagcaggatgattggagtaccggcggccaggtcagtagggcttcccaggtctcaaattcagatcataaatcttcgaagtcgcctgagagtgattggagttcttgggaagctgagggttcttgggagcaaggctggcaggagccgtcatctcaggaacctccgccagatggaacacggctggctagcgagtacaactgggggggtccagaatcatcagacaaaggcgatccattcgcaaccctgagcgctcggccaagcacacaaccccgccccgacagctggggggaggataattgggagggtcttgagaccgacagtagacaggtaaaggcagagcttgcaagaaagaagcgcgaagaacgcaggagggaaatggaggcaaagagggccgagcgcaaagtagccaagggccccatgaagttgggggcccgcaaactggattag

SEQ ID NO: 205118 - DNA, 2427 bp, Artificial Sequence
  derived and/or modified sequence
atgtggttctttgcccgggaccctgtgcgggacttcccctttgagctgatccctgagcccccagagggcggcctgcccggcccctgggccctgcaccggggcaggaagaaggccaccggcagccctgtgtccatctttgtgtatgatgtgaagccaggagctgaggagcagacccaggtggccaaggccgccttcaagcgcttcaagaccctgcggcaccccaacatcctggcctacattgatggcctggagacagagaagtgcctgcacgtggtgacagaagctgtgacccccctgggcatctacctgaaggcccgggtggaggccggcggcctgaaggagctggagatctcctggggcctgcaccagatcgtgaaggccctgtccttcctggtgaatgactgcagcctcatccacaacaacgtgtgcatggctgctgtgtttgtggaccgggccggggagtggaagctgggcggcctggactacatgtacagcgcccagggcaatggaggcggcccccccaggaagggcatccctgagctggagcagtatgaccccccagagctggccgacagcagcggccgggtggtgcgggagaagtggagcgctgacatgtggaggctgggctgcctgatctgggaggtgttcaacggccccctgcccagggctgctgccctgagaaatcctgggaagatccccaagaccctggtgccccactactgtgagctggtgggcgccaaccccaaggtgcggcccaacccagcccgcttcctgcagaactgccgggcccctgggggcttcatgagcaacagatttgtggagaccaacctcttcctggaggagatccagatcaaggagcctgctgagaagcagaagttcttccaggagctgagcaagagcctggatgccttccctgaggacttctgccgccacaaggtgctgccccagctgctgacagcctttgaatttggaaatgctggagctgtggtgctgacccccctcttcaaggtgggcaagttcctgtctgctgaggagtaccagcagaagatcatccctgtggtggtgaagatgttcagcagcacagaccgggccatgaggatccggctgctgcagcagatggagcagttcatccagtacctggatgagcccaccgtgaacacccagatcttcccccacgtggtgcacggcttcctggacaccaacccagccatccgggagcagacagtgaagtccatgctgctgctggcccccaagctgaatgaggccaacctgaatgtggagctgatgaagcactttgcccggctgcaggccaaggatgagcagggccccatccgctgcaacaccaccgtgtgcctgggcaagattggcagctacctgagcgccagcaccaggcaccgggtgctgaccagcgccttcagccgggccacccgggacccctttgcccccagccgggtggccggcgtgctgggctttgctgccacccacaacctgtacagcatgaatgactgtgcccagaagatcctgcctgtgctgtgtggcctgactgtggaccctgagaagtctgtgcgggaccaggccttcaaggccatccgctccttcctgagcaagctggagagcgtgtctgaggaccccacccagctggaggaggtggagaaggatgtgcacgccgccagcagccctggcatgggcggggccgccgcctcctgggccggctgggccgtgactggagtgagcagcctgaccagcaagctgatccgcagccaccccaccacagcccccacagagaccaacatcccccagaggcccaccccagagggcgtgcctgccccagcccccacccctgtgcctgccacccccaccaccagcggccactgggagacccaggaggaggacaaggacacagctgaggacagcagcacagctgaccgctgggatgatgaggactggggcagcctggagcaggaggccgagagcgtgctggcccagcaggatgactggagcactggaggccaggtgtcccgggccagccaggtgagcaacagcgaccacaagagcagcaagagccctgagagtgactggagctcctgggaggccgagggctcctgggagcagggctggcaggagcccagcagccaggagcccccaccagatggcacccggctggccagcgagtacaactggggcggccctgagagcagtgacaagggggacccctttgccaccctgagcgcccggcccagcacccagcccaggccagacagctggggcgaggacaactgggagggcctggagacagacagccggcaggtgaaggccgagctggccaggaagaagcgggaggagaggagaagagagatggaggccaagagagctgagaggaaggtggccaagggccccatgaagctgggcgccaggaagctggactag

SEQ ID NO: 205119 - DNA, 2427 bp, Artificial Sequence
  derived and/or modified sequence
atgtggttcttcgcccgggaccccgtgcgggacttccccttcgagctcatcccagagccgcctgagggcggtctgcctggaccttgggctctccaccgcgggcgtaaaaaagccactggcagtccggtcagcattttcgtttacgacgtcaagcctggggcggaggagcaaacccaagtggcaaaggccgcgtttaagaggttcaagacattgaggcaccccaacattctcgcttatattgacggtcttgagactgagaaatgccttcacgtcgtcaccgaggccgtcacaccgttgggtatatatctcaaagcccgggtggaagccggcggcttgaaggagctcgagatctcctggggccttcaccaaattgtgaaagcgctgtctttcctcgtgaacgactgttccctgattcacaacaatgtctgtatggccgccgttttcgtggacagggccggggagtggaagctgggcggcttggactacatgtacagcgctcagggtaatgggggcggccccccacgaaaggggattcctgaactggaacagtatgacccccccgagctcgcggatagctccggcagagttgttcgggaaaagtggagtgccgatatgtggaggctgggatgtctcatttgggaggtgtttaacggtcctctgccgcgcgctgctgctcttcgcaatcctggcaagattcctaagacactggtccctcattattgcgagctggtgggagcgaaccccaaggtgagacctaatccggcccgtttcctccaaaattgcagggctcccggtggattcatgtcaaataggttcgtagaaaccaacctgttcttagaggaaatacaaatcaaagaacccgccgagaaacagaagttcttccaggagctgtccaagtctctggacgcgttccctgaagatttttgccggcataaagttctaccccagctgctcacagcatttgagttcggaaacgctggagcagtggtgcttacccccttgtttaaagtgggcaagtttttgtccgcagaagaataccagcagaaaatcatccccgtggtggtgaaaatgttcagttcaacggacagagcaatgagaatccggttgctacagcaaatggaacagttcatccagtatctggatgaacctactgtgaacactcagatctttccccacgtggtccacggattcttggacaccaatcctgccattagggagcagaccgtgaagtcaatgcttttgttggcccctaaactcaacgaggccaacctgaacgtcgagctcatgaagcacttcgcacggttacaagcaaaagatgaacaagggcctatccggtgcaatacaactgtgtgtttgggcaagatcggttcgtacttatcagccagtactcgtcaccgggtattgactagcgcattctctcgggcaactcgcgatcccttcgctccatcccgagtggccggggttctggggtttgcagccacccacaatctgtactccatgaatgattgcgcccagaaaatcctgcccgtgctatgtgggctcacggtggaccctgagaagtctgtgcgtgaccaggcattcaaagctattaggtccttcctcagcaaactggagagcgtgtctgaggaccctacccagctggaggaagttgagaaggacgtgcacgccgcctcctcccctggaatgggaggggcggccgcttcttgggcggggtgggctgtgaccggggtaagcagcctgacctccaagctaatcaggagccatcctacgacggctcctacagagacaaacatcccccagagaccaacgccagaaggcgtcccagccccagcccccactccagtgcccgccacacctacaaccagcggtcattgggaaactcaagaagaggacaaagatacggcagaggacagctcaaccgcagacagatgggacgacgaggactgggggtcactggaacaggaggctgaaagcgtcctcgcccagcaagatgactggtccacagggggacaagtctcacgtgcctcacaggtgtcgaatagcgatcataaatccagtaaatcccctgagtcagactggtctagttgggaagcggaaggaagttgggagcagggatggcaggaaccatccagccaggagccacccccagacggtacacgcctggcatctgagtacaattggggaggccccgaatcgtccgataaaggtgatcctttcgctactctgtctgctagacctagcacacagccaagacctgacagttggggcgaagacaattgggagggactcgagaccgacagtcgacaagtgaaagctgaactggcaaggaagaaaagggaagaacgccggcgggagatggaggcaaaacgtgccgaaagaaaggtcgccaagggcccaatgaagttaggagcacgaaaacttgactag

SEQ ID NO: 205120 - DNA, 2427 bp, Artificial Sequence
  derived and/or modified sequence
atgtggtttttcgctagggaccctgtacgagacttcccctttgagctgattcccgagcctccggagggcggtctcccaggaccatgggctctgcaccgcggaagaaagaaagctactgggagccctgtgtcaatctttgtgtatgacgttaagcccggagccgaagaacagacacaggtcgctaaggcagccttcaaaaggttcaagaccttgcggcatcctaacatactggcctacattgatgggctggaaaccgagaaatgtttgcatgtagtgaccgaggcggtcacgcccttaggaatctacttgaaggctcgtgtagaggcaggagggctgaaagaactggaaatttcttggggccttcaccagattgtgaaggcgctttcttttttggtaaatgattgtagtttaattcacaacaacgtgtgcatggctgccgtgtttgttgatcgggcaggcgaatggaagctcggagggctggattatatgtattcagcgcaggggaacgggggaggcccaccacgcaaggggatccccgagctggagcaatatgacccccctgaattggccgacagttccggccgagtggtcagggagaagtggagcgccgatatgtggagactgggatgcctcatttgggaggtattcaatgggccactgccgagggcggcagcactgagaaaccccggaaaaataccaaagactctggtgccccattactgtgaactggtgggcgctaaccctaaggtgaggcccaatccagcccgattcctgcaaaactgtagagcacccggaggatttatgagcaaccgctttgtggaaacaaatttgttcctcgaagagatccagattaaggagcctgctgaaaaacagaagttttttcaggaactttcaaaaagtctcgacgcatttcctgaagatttttgccggcacaaggtgctcccccagctgctgacagctttcgagtttggaaacgctggcgctgtagtcctaacccctttattcaaagttgggaagtttctctcagccgaagagtatcaacagaaaatcatcccagtcgtagtgaagatgtttagttcaacagaccgcgcaatgagaattcgattgctgcagcagatggagcagttcatccagtatctcgacgagcctactgtgaatactcagatctttccacacgtggtgcacgggttcctggacacaaacccagccatcagggagcagacagtgaaatctatgctgctgctggctccgaagttaaacgaggcaaatctgaacgttgagctgatgaagcacttcgctcggctccaggctaaagatgagcaggggccaataagatgtaacaccactgtgtgcctggggaaaattggctcttacctttctgcctctacccgtcatcgcgtccttacctccgcttttagcagggctacaagagatcctttcgctccttctagagtggcaggggtcctgggtttcgccgctactcacaacctgtactcaatgaatgattgcgcacaaaaaatccttccggttctgtgtggcctgactgtagacccagaaaagagcgtgcgcgaccaagcatttaaagcaattcgcagctttctgtcaaagttagagtctgtttcggaggatcccacacaactagaagaagtggaaaaagatgtacatgctgcatcatcaccaggaatgggcggtgcggctgcgtcctgggcgggttgggctgttacaggtgtgtccagtttgaccagcaaactcattcgctctcaccccactacggctcccacagaaaccaacatcccccagcggccaacccccgaaggcgtgcctgctcccgcacccacccctgtccccgctacccccactacaagcggacactgggaaactcaggaagaggacaaagatacagcagaagactcgagcacagctgatagatgggatgacgaggattggggctcactggaacaagaagcagagtcagtgctcgcccaacaagatgactggagcaccgggggtcaagtgagccgggctagccaggtgtctaatagcgaccataaatcctccaagtcacctgagtcagactggtcttcctgggaggctgagggttcttgggagcaggggtggcaggaaccttcttcccaagaacccccaccggacggtacgcgtttggccagtgagtacaactgggggggtcccgaaagtagcgacaagggggacccgttcgctacactgtcagcaagaccaagtacccagcccagaccagatagttggggcgaagataattgggaaggcctggagaccgattctcgacaggtcaaagcggagttggcacgcaagaaacgggaggagcggaggagggagatggaggcaaaaagagccgagcggaaagtggccaaaggacctatgaagcttggtgccagaaaactggactag

SEQ ID NO: 205121 - DNA, 2642 bp, Artificial Sequence
  derived and/or modified sequence
ctctccgccccgccccggctcgggcggccggaggacccggagctaaggcgcccgaacccgcggcggcggtggggacgatgtggttctttgcccgggacccggtccgggactttccgttcgagctcatcccggagcccccagagggcggcctgcccgggccctgggccctgcaccgcggccgcaagaaggccacaggcagccccgtgtccatcttcgtctatgatgtgaagcctggcgcggaagagcagacccaggtggccaaagctgccttcaagcgcttcaaaactctacggcaccccaacatcctggcttacatcgatggactggagacagaaaaatgcctccacgtcgtgacagaggctgtgaccccgttgggaatatacctcaaggcgagagtggaggctggtggcctgaaggagctggagatctcctgggggctacaccagatcgtgaaagccctcagcttcctggtcaacgactgcagcctcatccacaacaatgtctgcatggccgccgtgttcgtggaccgagctggcgagtggaagcttgggggcctggactacatgtattcggcccagggcaacggtgggggacctccccgcaaggggatccccgagcttgagcagtatgaccccccggagttggctgacagcagtggcagagtggtcagagagaagtggtcagcagacatgtggcgcttgggctgcctcatttgggaagtcttcaatgggcccctacctcgggcagcagccctacgcaaccctgggaagatccccaaaacgctggtgccccattactgtgagctggtgggagcaaaccccaaggtgcgtcccaacccagcccgcttcctgcagaactgccgggcacctggtggcttcatgagcaaccgctttgtagaaaccaacctcttcctggaggagattcagatcaaagagccagccgagaagcaaaaattcttccaggagctgagcaagagcctggacgcattccctgaggatttctgtcggcacaaggtgctgccccagctgctgaccgccttcgagttcggcaatgctggggccgttgtcctcacgcccctcttcaaggtgggcaagttcctgagcgctgaggagtatcagcagaagatcatccctgtggtggtcaagatgttctcatccactgaccgggccatgcgcatccgcctcctgcagcagatggagcagttcatccagtaccttgacgagccaacagtcaacacccagatcttcccccacgtcgtacatggcttcctggacaccaaccctgccatccgggagcagacggtcaagtccatgctgctcctggccccaaagctgaacgaggccaacctcaatgtggagctgatgaagcactttgcacggctacaggccaaggatgaacagggccccatccgctgcaacaccacagtctgcctgggcaaaatcggctcctacctcagtgctagcaccagacacagggtccttacctctgccttcagccgagccactagggacccgtttgcaccgtcccgggttgcgggtgtcctgggctttgctgccacccacaacctctactcaatgaacgactgtgcccagaagatcctgcctgtgctctgcggtctcactgtagatcctgagaaatccgtgcgagaccaggccttcaaggccattcggagcttcctgtccaaattggagtctgtgtcggaggacccgacccagctggaggaagtggagaaggatgtccatgcagcctccagccctggcatgggaggagccgcagctagctgggcaggctgggccgtgaccggggtctcctcactcacctccaagctgatccgttcgcacccaaccactgccccaacagaaaccaacattccccaaagacccacgcctgaaggagttcctgccccagcccccacccctgttcctgccacccctacaacctcaggccactgggagacgcaggaggaggacaaggacacagcagaggacagcagcactgctgacagatgggacgacgaagactggggcagcctggagcaggaggccgagtctgtgctggcccagcaggacgactggagcaccgggggccaagtgagccgtgctagtcaggtcagcaactccgaccacaaatcctccaaatccccagagtccgactggagcagctgggaagctgagggctcctgggaacagggctggcaggagccaagctcccaggagccacctcctgacggtacacggctggccagcgagtataactggggtggcccagagtccagcgacaagggcgaccccttcgctaccctgtctgcacgtcccagcacccagccgaggccagactcttggggtgaggacaactgggagggcctcgagactgacagtcgacaggtcaaggctgagctggcccggaagaagcgcgaggagcggcggcgggagatggaggccaaacgcgccgagaggaaggtggccaagggccccatgaagctgggagcccggaagctggactgaaccgtggcggtggcccttcccggctgcggagagcccgccccacagatgtatttattgtacaaaccatgtgagcccggccggcccagccaggccatctcacgtgtacataatcagagccacaataaattctatttcaca

SEQ ID NO: 205122 - DNA, 2427 bp, Artificial Sequence
  derived and/or modified sequence
atgtggttcttcgccagagaccccgtgagagacttccccttcgagctgatccccgagccccccgagggcggcctgcccggcccctgggccctgcacagaggcagaaagaaggccaccggcagccccgtgagcatcttcgtgtacgacgtgaagcccggcgccgaggagcagacccaggtggccaaggccgccttcaagagattcaagaccctgagacaccccaacatcctggcctacatcgacggcctggagaccgagaagtgcctgcacgtggtgaccgaggccgtgacccccctgggcatctacctgaaggccagagtggaggccggcggcctgaaggagctggagatcagctggggcctgcaccagatcgtgaaggccctgagcttcctggtgaacgactgcagcctgatccacaacaacgtgtgcatggccgccgtgttcgtggacagagccggcgagtggaagctgggcggcctggactacatgtacagcgcccagggcaacggcggcggcccccccagaaagggcatccccgagctggagcagtacgacccccccgagctggccgacagcagcggcagagtggtgagagagaagtggagcgccgacatgtggagactgggctgcctgatctgggaggtgttcaacggccccctgcccagagccgccgccctgagaaaccccggcaagatccccaagaccctggtgccccactactgcgagctggtgggcgccaaccccaaggtgagacccaaccccgccagattcctgcagaactgcagagcccccggcggcttcatgagcaacagattcgtggagaccaacctgttcctggaggagatccagatcaaggagcccgccgagaagcagaagttcttccaggagctgagcaagagcctggacgccttccccgaggacttctgcagacacaaggtgctgccccagctgctgaccgccttcgagttcggcaacgccggcgccgtggtgctgacccccctgttcaaggtgggcaagttcctgagcgccgaggagtaccagcagaagatcatccccgtggtggtgaagatgttcagcagcaccgacagagccatgagaatcagactgctgcagcagatggagcagttcatccagtacctggacgagcccaccgtgaacacccagatcttcccccacgtggtgcacggcttcctggacaccaaccccgccatcagagagcagaccgtgaagagcatgctgctgctggcccccaagctgaacgaggccaacctgaacgtggagctgatgaagcacttcgccagactgcaggccaaggacgagcagggccccatcagatgcaacaccaccgtgtgcctgggcaagatcggcagctacctgagcgccagcaccagacacagagtgctgaccagcgccttcagcagagccaccagagaccccttcgcccccagcagagtggccggcgtgctgggcttcgccgccacccacaacctgtacagcatgaacgactgcgcccagaagatcctgcccgtgctgtgcggcctgaccgtggaccccgagaagagcgtgagagaccaggccttcaaggccatcagaagcttcctgagcaagctggagagcgtgagcgaggaccccacccagctggaggaggtggagaaggacgtgcacgccgccagcagccccggcatgggcggcgccgccgccagctgggccggctgggccgtgaccggcgtgagcagcctgaccagcaagctgatcagaagccaccccaccaccgcccccaccgagaccaacatcccccagagacccacccccgagggcgtgcccgcccccgcccccacccccgtgcccgccacccccaccaccagcggccactgggagacccaggaggaggacaaggacaccgccgaggacagcagcaccgccgacagatgggacgacgaggactggggcagcctggagcaggaggccgagagcgtgctggcccagcaggacgactggagcaccggcggccaggtgagcagagccagccaggtgagcaacagcgaccacaagagcagcaagagccccgagagcgactggagcagctgggaggccgagggcagctgggagcagggctggcaggagcccagcagccaggagcccccccccgacggcaccagactggccagcgagtacaactggggcggccccgagagcagcgacaagggcgaccccttcgccaccctgagcgccagacccagcacccagcccagacccgacagctggggcgaggacaactgggagggcctggagaccgacagcagacaggtgaaggccgagctggccagaaagaagagagaggagagaagaagagagatggaggccaagagagccgagagaaaggtggccaagggccccatgaagctgggcgccagaaagctggactag

SEQ ID NO: 205123 - protein, 375 aa, Artificial Sequence
  derived and/or modified sequence
MAALRDAEIQKDVQTYYGQVLKRSADLQTNGCVTTARPVPKHIREALQNVHEEVALRYYGCGLVIPEHLENCWILDLGSGSGRDCYVLSQLVGEKGHVTGIDMTKGQVEVAEKYLDYHMEKYGFQASNVTFIHGYIEKLGEAGIKNESHDIVVSNCVINLVPDKQQVLQEAYRVLKHGGELYFSDVYTSLELPEEIRTHKVLWGECLGGALYWKELAVLAQKIGFCPPRLVTANLITIQNKELERVIGDCRFVSATFRLFKHSKTGPTKRCQVIYNGGITGHEKELMFDANFTFKEGEIVEVDEETAAILKNSRFAQDFLIRPIGEKLPTSGGCSALELKDIITDPFKLAEESDSMKSRCVPDAAGGCCGTKKSC

SEQ ID NO: 205124 - DNA, 1128 bp, Artificial Sequence
  derived and/or modified sequence
atggctgccctcagagatgctgaaattcaaaaagatgttcagacctactacgggcaggttctgaagaggagcgccgacctccaaacgaatgggtgcgtcacaacggcaagacctgtgcccaaacacattagagaggcattgcagaacgttcacgaagaggttgccctgagatattacggttgtgggctcgtgattcccgagcacctggaaaactgctggatcctggatctcggcagtggaagtggacgggactgctatgtgctgtcacaactagtgggtgagaagggacacgttacaggaattgacatgacaaaggggcaggttgaagtcgcagaaaaatatctcgactaccacatggagaaatacggattccaggcttcaaatgtcactttcatccacggctacatagagaagctgggagaggcaggcatcaagaatgagtcgcatgatatcgtggtgagcaattgcgtgataaatctcgtgcctgataaacagcaggtgttacaggaggcttaccgggtcctcaaacatgggggggaactgtacttctcagacgtttatacttccctggaactacccgaggaaattagaacacacaaggtgctttggggcgaatgcttgggaggggccctctattggaaggaattggctgtcctggcacagaagattggcttctgtcctccacgattagtaaccgccaacctaatcacaattcagaataaagagctggagcgtgttattggagattgcagatttgtgagtgccaccttccgtctcttcaagcactccaaaacaggacccacaaagagatgccaagtaatttataatgggggcattaccggccacgagaaggagttgatgttcgatgccaatttcacgttcaaggagggcgaaattgtggaagtagatgaggaaaccgccgcaatactgaagaatagtaggtttgcgcaggactttctgatcaggccaattggggagaaactgccaacctctggcgggtgttccgcattggagctgaaggatatcataacagatccgtttaagttagccgaagaatccgactccatgaagagtaggtgcgtacctgatgccgcaggcgggtgttgcgggacaaaaaaatcatgctag

SEQ ID NO: 205125 - DNA, 1128 bp, Artificial Sequence
  derived and/or modified sequence
atggccgccctgagagatgctgagatccagaaggatgtgcagacctactacggccaggtgctgaagaggtctgctgacctgcagaccaacggctgtgtgaccacagcccggcctgtgcccaagcacatccgggaggccctgcagaatgtgcatgaggaggtggccctgcgctactacggctgcggcctggtgattcctgagcacctggagaactgctggatcctggacctgggcagcggcagcggccgggactgctacgtgctgagccagctggtgggggagaagggccacgtgactggaattgacatgaccaagggccaggtggaggtggccgagaagtacctggactaccacatggagaagtatggcttccaggccagcaatgtgaccttcatccacggctacatcgagaagctgggggaggccggcatcaagaatgaaagccatgacatcgtggtgagcaactgtgtgatcaacctggtgcctgacaagcagcaggtgctgcaggaggcctacagagtgctgaagcatggaggagagctgtacttcagtgatgtgtacaccagcctggagctgcctgaggagatccgcacccacaaggtgctgtggggagaatgtctgggcggggccctgtactggaaggagctggccgtgctggcccagaagattggcttctgccccccccggctggtgacagccaacctgatcaccatccagaacaaggagctggagcgggtgattggagactgccgctttgtgtctgccaccttccgcctcttcaagcacagcaagacaggccccaccaagcgctgccaggtgatctacaacggcggcatcaccggccacgagaaggagctgatgtttgatgccaacttcaccttcaaggagggggagatcgtggaggtggatgaggagacagctgccatcctgaagaacagcagatttgcccaggacttcctgatccggcccatcggggagaagctgcccaccagcggcggctgcagcgccctggagctgaaggacatcatcacagaccccttcaagctggccgaggagagtgacagcatgaagagccgctgtgtgcctgatgctgctgggggctgctgcggcaccaagaagagctgctag

SEQ ID NO: 205126 - DNA, 1128 bp, Artificial Sequence
  derived and/or modified sequence
atggccgccctgcgggacgccgagatccagaaggacgtgcagacctattatgggcaggtgctcaagagaagcgccgacctgcagaccaacggatgtgtaactacagcccgtccagttccgaaacacattcgtgaggccctccagaacgtgcacgaggaagtcgccctccgctactatggctgcggccttgtgattccagaacatctggaaaactgctggatactggacctgggctcgggcagtggaagggattgttacgtgctgtcccagctagtgggcgagaaaggtcacgtgaccggaattgatatgacgaaagggcaggtggaggtcgcagaaaaatacctggattatcatatggaaaaatatggctttcaggcgagcaatgtgacctttatccatgggtatattgagaaacttggagaggccggtatcaaaaacgaatctcatgacatcgttgtgtctaattgcgtgataaacctggttcccgacaagcaacaggtcctgcaagaagcctatagagtcttgaagcacgggggggaactctatttcagcgatgtgtatacgagcctggaactccccgaggagattagaacccataaagtgttatggggggagtgcctgggcggggcactgtactggaaagaattggcagtacttgcacagaaaattggattttgtccgccgcgcctggtcacggcgaatctgattactatacagaataaagagctggagcgagtcatcggcgactgtcggttcgtcagtgccacttttagactgttcaagcactcaaaaactggtccgaccaaaaggtgtcaagtgatctacaatggcggcattaccgggcatgaaaaagagctgatgttcgatgctaactttactttcaaggaaggggagatcgtggaagtcgatgaggagaccgctgcgatcctcaagaattcgaggttcgcccaggatttccttattaggccaatcggcgaaaagctgccaacgtccggtggatgcagcgccctcgagctgaaggacatcatcacggacccatttaagctggccgaggagagtgacagcatgaagtccagatgtgtccccgatgccgccggcgggtgttgcggtaccaagaaaagctgctag

SEQ ID NO: 205127 - DNA, 1128 bp, Artificial Sequence
  derived and/or modified sequence
atggcagccctcagggatgccgagattcagaaggatgtgcagacctactatggtcaggtgctcaaacggtctgccgacctgcagactaatggctgtgtgactactgcacggccagtccctaagcacattcgggaagcactgcagaacgtccatgaagaagtcgctctgagatactacggatgcggtctcgttattccagaacatctcgaaaactgctggatcctcgatctgggatctggatccggaagagactgttatgtcctttctcagctggtgggagagaagggccacgtgaccggcatagatatgactaaggggcaggtcgaggtggccgagaagtacctagattaccatatggagaaatacggctttcaggcgtccaatgtcaccttcatccacggctacattgaaaagcttggggaggcgggtatcaaaaatgaaagccatgatatcgtggtctctaattgcgttattaatttagtgcccgataagcagcaggtactccaagaagcataccgggtgctgaagcacgggggtgagctgtacttttctgacgtgtatacgtccctggaacttccggaggagatccggacacacaaagtcctgtggggcgaatgccttgggggagccctgtactggaaggagctggctgtgctggcccagaagatcggattttgtccaccacggcttgtgacagccaaccttattaccatccaaaacaaggaattagaaagggttatcggggactgccgattcgtttctgctacatttagactcttcaagcattcaaaaaccgggcctactaagagatgtcaggttatctacaatgggggtatcacggggcatgaaaaagagttgatgttcgacgcgaattttaccttcaaggaaggagagatcgttgaggtggatgaagaaaccgccgcaatcctcaagaatagtaggttcgcccaggatttcctcatccgacctataggtgagaagcttcctacatccggcggatgttctgctttggagctgaaggatattattactgaccctttcaagctggccgaggaatccgacagcatgaaaagcagatgtgtccctgacgctgcagggggatgctgtggaaccaaaaaatcatgctag

SEQ ID NO: 205128 - DNA, 2404 bp, Artificial Sequence
  derived and/or modified sequence
gagacagtgagtgcgcgccctgagtcgcaggccgaggagacagtgagtgcgcgccctgagtcgcaggccgaggagacatggctgcacttcgtgacgctgagatacagaaggacgtgcagacctactacgggcaggtgctgaagagatcggcagacctccagaccaacggctgtgtcaccacagccaggccggtccccaagcacatccgggaagccttgcaaaatgtacacgaagaagtagccctaagatattatggctgtggtctggtgatccctgagcatctagaaaactgctggattttggatctgggtagtggaagtggcagagattgctatgtacttagccagctggttggtgaaaaaggacacgtgactggaatagacatgaccaaaggccaggtggaagtggctgaaaagtatcttgactatcacatggaaaaatatggcttccaggcatctaatgtgacttttattcatggctacattgagaagttgggagaggctggaatcaagaatgagagccatgatattgttgtatcaaactgtgttattaaccttgtgcctgataaacaacaagtgcttcaggaggcatatcgggtgctgaagcatggtggggagttatatttcagtgacgtctatacgagccttgaactgccagaagaaatcaggacacacaaagttttatggggtgagtgtctgggtggtgctttatactggaaggaacttgctgtccttgctcaaaaaattgggttctgccctccacgtttggtcactgccaatctcattacaattcaaaacaaggaactggaaagagttatcggtgactgtcgttttgtttctgcaacatttcgcctcttcaaacactctaagacaggaccaaccaagagatgccaagttatttacaatggaggaattacaggacatgaaaaagaactaatgtttgatgccaattttacatttaaggaaggtgaaattgttgaagtggatgaagaaacagcagctatcttgaagaattcaagatttgctcaagattttctgatcagaccaattggagagaagttgccaacatctggaggctgttctgctttggagttaaaggatataatcacagatccatttaagcttgcagaagagtctgacagtatgaagtccagatgtgtccctgatgctgctggaggctgctgtggcacaaagaaaagctgctaaatctatagccaaccaggggaccacagtagtgggcaagagtgatctgcatgttttttaacctgcttttccccatagcacagaccataagaaacaacaaatggggccgggcacagtggctcatgcctataatcccagcactttgggaggccgaggcaggcagatcacctgaggtcaggagtttgataccagcctggccaacatggtgaaatcctgtctctaccaaaaatacaaaaaaaattagctgggcatggtggtgcacacctatagtctcagctactcgggaggctgaggcaggagaattgcttgaacccaggaagtagaggctgcagtgagtaagcatcacgccactgtactccagcctgggcaacagagcaagactctgtctcaaaagcaaaaaaaaaaaaaaaaaaagaaagaaagaaaaagaaaacaacaaatggcagagagccaccatattccaaatcactgaaaaaaataaatgaattatttttatttatttatttatttttttgagatggagtctcggtctgttgcccaggctgaagtgcagtggccccatctcaactcactgcaagctccacctcctgggttcacgccattctcctgcctcagactcccaagtagctgggactacaggcacctaccaccatgcccagctaattttttgtatttttagtagagacggggtttcaccatgttagccaggatggtcttgatctcctgacctcgtgatccgcccgcctcggcctcccaaagtgctgggattacaagcatgagccactgcgcccggccataaatgaattatttttaagaggcattgattaaagattcacagcaaatcactagttaagcagattttttttctatttcctacttcaaagttctggtgccacatagtggtcagaaatggaacagagaagctgtcttaagccttgttcaagaagcaggaaaggcatcagaagaagtaacagttggcagagggtctcaggaaaaacatcttccttctgatcttttgcatagcaccttttggaattttcatcatgtttgcttattaaacaaagctcctactgccatcatactaatcatgcaaaaagattgccaaatcatgtttggtaggaggacttttgaggtagcttttgaacaaatgtttttttcttttttctttttttttgcaataaagaaaacaaattaatcataaa

SEQ ID NO: 205129 - DNA, 1128 bp, Artificial Sequence
  derived and/or modified sequence
atggccgccctgagagacgccgagatccagaaggacgtgcagacctactacggccaggtgctgaagagaagcgccgacctgcagaccaacggctgcgtgaccaccgccagacccgtgcccaagcacatcagagaggccctgcagaacgtgcacgaggaggtggccctgagatactacggctgcggcctggtgatccccgagcacctggagaactgctggatcctggacctgggcagcggcagcggcagagactgctacgtgctgagccagctggtgggcgagaagggccacgtgaccggcatcgacatgaccaagggccaggtggaggtggccgagaagtacctggactaccacatggagaagtacggcttccaggccagcaacgtgaccttcatccacggctacatcgagaagctgggcgaggccggcatcaagaacgagagccacgacatcgtggtgagcaactgcgtgatcaacctggtgcccgacaagcagcaggtgctgcaggaggcctacagagtgctgaagcacggcggcgagctgtacttcagcgacgtgtacaccagcctggagctgcccgaggagatcagaacccacaaggtgctgtggggcgagtgcctgggcggcgccctgtactggaaggagctggccgtgctggcccagaagatcggcttctgcccccccagactggtgaccgccaacctgatcaccatccagaacaaggagctggagagagtgatcggcgactgcagattcgtgagcgccaccttcagactgttcaagcacagcaagaccggccccaccaagagatgccaggtgatctacaacggcggcatcaccggccacgagaaggagctgatgttcgacgccaacttcaccttcaaggagggcgagatcgtggaggtggacgaggagaccgccgccatcctgaagaacagcagattcgcccaggacttcctgatcagacccatcggcgagaagctgcccaccagcggcggctgcagcgccctggagctgaaggacatcatcaccgaccccttcaagctggccgaggagagcgacagcatgaagagcagatgcgtgcccgacgccgccggcggctgctgcggcaccaagaagagctgctag

SEQ ID NO: 205130 - protein, 644 aa, Artificial Sequence
  derived and/or modified sequence
MRPSGDEDRARRRRRRRRRRDLLLSQLCFLASVALLLWSLSSLREQKELDLMDLVGEDRKWMMARKLMQVNDTLTSEDAGLRNSKNCTEPALHEFPNDIFTNEDRRQGAVVLHVLCAIYMFYALAIVCDDFFVPSLEKICERLHLSEDVAGATFMAAGSSAPELFTSVIGVFITKGDVGVGTIVGSAVFNILCIIGVCGLFAGQVVALSSWCLLRDSIYYTLSVIALIVFIYDEKVSWWESLVLVLMYLIYIVIMKYNACIHQCFERRTKGAGNMVNGLANNAEIDDSSNCDATVVLLKKANFHRKASVIMVDELLSAYPHQLSFSEAGLRIMITSHFPPKTRLSMASRMLINERQRLINSRAYTNGESEVAIKIPIKHTVENGTGPSSAPDRGVNGTRRDDVVAEAGNETENENEDNENDEEEEEDEDDDEGPYTPFDTPSGKLETVKWAFTWPLSFVLYFTVPNCNKPRWEKWFMVTFASSTLWIAAFSYMMVWMVTIIGYTLGIPDVIMGITFLAAGTSVPDCMASLIVARQGMGDMAVSNSIGSNVFDILIGLGLPWALQTLAVDYGSYIRLNSRGLIYSVGLLLASVFVTVFGVHLNKWQLDKKLGCGCLLLYGVFLCFSIMTEFNVFTFVNLPMCGDH

SEQ ID NO: 205131 - DNA, 1935 bp, Artificial Sequence
  derived and/or modified sequence
atgcggcctagtggtgatgaagatagggctagaagaagacggcgccgaagacgtagacgtgatctgttgttgagtcagttgtgcttcctagcgagtgtcgccctgctcttatggtcactgagctccttgcgcgaacagaaagagctggatctgatggatctcgttggcgaggaccggaagtggatgatggcaaggaaactgatgcaagtcaatgatactctgacctctgaggatgcaggactacgaaactctaagaactgcactgagcccgcacttcacgaatttcccaatgacatttttaccaacgaagatcgccgtcagggagccgtcgtgttacacgtactgtgtgccatctacatgttttacgcccttgccatagtatgtgacgatttctttgtcccttccctggagaagatatgcgagcgcctgcacctcagcgaagatgttgccggagccacgtttatggcagcgggtagcagtgcaccggagctgttcacttctgtcataggggtattcatcactaagggagatgtgggggtgggaacaatcgttggaagcgctgtcttcaacatcctctgtattatcggggtatgcggcctcttcgcaggacaggtggtggcactctcgtcctggtgtcttcttcgggattcaatctattacactttaagcgttatagctttgatagtcttcatttacgacgaaaaggtgtcctggtgggagtctcttgtgttagtgctcatgtatcttatttacattgttataatgaagtacaatgcctgtattcatcagtgcttcgaacgacgcactaaaggggcaggtaacatggttaacggtctcgctaataatgctgagatcgatgacagcagtaactgtgacgctaccgttgttctgcttaaaaaggccaacttccatcgcaaagcctcagttatcatggtcgatgaattattgtcagcctacccccaccagctgagtttctctgaggccggtctgaggatcatgataacttctcatttcccacctaaaacccgactctcaatggcttcccgcatgctcatcaacgaaaggcaacggctgatcaatagcagggcctacacaaatggggagagcgaggtggccatcaaaatcccgatcaaacacaccgtcgaaaacggtaccggacctagctcagcccctgaccggggcgtgaacggcaccaggcgggacgatgtagttgcagaggccgggaatgagacagaaaacgaaaatgaagataacgaaaatgacgaagaggaagaagaagatgaagacgacgacgaggggccttatacgcctttcgacacacccagcggaaagcttgagacagtaaagtgggccttcacttggcctctgagttttgttctctattttacggtccctaactgcaataagcctagatgggagaaatggtttatggtcaccttcgctagcagtactctttggatagcagcattctcttatatgatggtgtggatggttacgattatcggctacaccctgggcattcccgacgtcattatgggcattacctttctcgcggccggaacctcggtgccggattgcatggcttctctgatcgtagcacgtcagggtatgggggatatggctgtatccaactccatcggatctaacgtgtttgatattctgatcggcctggggctaccatgggctctgcagactctagcagtcgattatggttcgtatattcgcctgaacagcagaggactgatttacagcgtgggcttgctcttggcatcggttttcgttacagtttttggcgtacatctgaataagtggcagctggataagaagctgggctgtggttgtctgctgttatacggagtgtttctgtgcttctcgattatgacggagttcaatgttttcacctttgttaatctgcctatgtgcggggaccactag

SEQ ID NO: 205132 - DNA, 1935 bp, Artificial Sequence
  derived and/or modified sequence
atgaggcccagcggagatgaagatcgggccaggagaagaagaagaagaagaagaagaagagacctgctgctgagccagctgtgcttcctggcctctgtggccctgctgctgtggagcctgagcagcctgcgggagcagaaggagctggacctgatggacctggtgggggaggacaggaagtggatgatggccaggaagctgatgcaggtgaatgacaccctgaccagtgaagatgctggcctgaggaacagcaagaactgcacagagcccgccctgcacgagttccccaatgacatcttcaccaatgaagatcggcggcagggcgctgtggtgctgcacgtgctgtgtgccatctacatgttctacgccctggccatcgtgtgtgatgacttctttgtgcccagcctggagaagatctgtgagcggctgcacctgtctgaagatgtggccggggccaccttcatggctgctggcagcagcgcccctgagctgttcacctctgtgattggagtcttcatcaccaagggagatgtgggcgtgggcaccatcgtgggcagcgctgtgttcaacatcctgtgcatcattggagtgtgtggcctgtttgctggccaggtggtggccctgagctcctggtgcctgctgcgggacagcatctactacaccctgtctgtgattgccctgattgtgttcatctatgatgagaaggtgtcctggtgggagagcctggtgctggtgctgatgtacctgatctacatcgtcatcatgaagtacaatgcctgcatccaccagtgctttgaaagaaggaccaagggggccggcaacatggtgaatggcctggccaacaatgctgagattgatgacagcagcaactgtgatgccaccgtggtgctgctgaagaaggccaacttccacaggaaggccagcgtcatcatggtggatgagctgctgagcgcctacccccaccagctgtccttcagcgaggccggcctgcgcatcatgatcaccagccacttcccccccaagacccggctgtccatggccagcaggatgctgatcaatgaaaggcagaggctcatcaacagccgggcctacaccaacggggagagcgaggtggccatcaagatccccatcaagcacacagtggagaatggaacaggccccagcagcgccccagaccggggcgtgaatggcaccaggagagatgatgtggtggccgaggccggaaatgaaacagaaaatgaaaatgaagataatgaaaatgatgaggaggaggaggaggatgaagatgatgatgagggcccctacaccccatttgacacccccagcggcaagctggagaccgtgaagtgggccttcacctggcccctgagctttgtgctgtacttcaccgtgcccaactgcaacaagccccgctgggagaagtggttcatggtgacctttgccagcagcaccctgtggattgctgccttctcctacatgatggtgtggatggtgaccatcatcggctacaccctgggcatcccagatgtgatcatgggcatcaccttcctggccgccggcacctctgtgcctgactgcatggccagcctgattgtggcccggcagggcatgggagacatggctgtgagcaacagcatcggcagcaatgtgtttgacatcctgattggcctgggcctgccctgggccctgcagaccctggccgtggactatggcagctacatccggctgaacagccggggcctcatctacagcgtgggcctgctgctggcctctgtgtttgtgacagtgtttggagtgcacctgaacaagtggcagctggacaagaagctgggctgcggctgcctgctgctgtatggagtcttcctgtgcttcagcatcatgacagagttcaacgtgttcacctttgtgaacctgcccatgtgtggggaccactag

SEQ ID NO: 205133 - DNA, 1935 bp, Artificial Sequence
  derived and/or modified sequence
atgcggcccagcggcgacgaggaccgggcccggcggcggcggcggaggagacgccgtcgcgacctgctgttgtcccagctgtgttttctagcctcagtggctctgttactgtggagtttgtcgagtctgcgtgagcaaaaggagctcgacctaatggatctggtgggcgaagataggaaatggatgatggctcgtaagctcatgcaggttaatgacacattgacaagtgaagacgctgggctgaggaatagcaaaaactgcaccgaacccgcgctccacgaatttccaaatgatattttcacaaatgaagacagaaggcagggggccgtcgttctgcacgtgctctgcgcaatctacatgttctacgccctggcgattgtgtgcgacgacttcttcgtgcctagcctcgaaaagatttgcgagagactgcacctttccgaggacgtcgcaggggccacgtttatggccgccggctcttctgctcctgaactttttacatcagtaattggcgttttcattaccaagggcgacgtaggcgtggggaccattgttggatcagccgtcttcaatatactctgtatcataggcgtgtgtggcctcttcgcaggtcaggtcgtggctctatccagctggtgccttctgcgggattctatctattacacattatcagtgattgctttaattgtgttcatctacgacgaaaaggtctcatggtgggagagccttgttttggtactgatgtatctgatttatatcgttattatgaaatacaatgcttgcattcaccaatgcttcgagagacgcaccaagggcgctggcaatatggttaatggtcttgccaacaacgcagagattgacgactcttccaactgcgacgccacagtggtcctattgaagaaggccaactttcacaggaaggcctcagtcatcatggtggacgagcttctgagtgcataccctcaccaacttagtttttccgaagctgggctgaggatcatgattacctctcactttccaccaaaaacccggttgagcatggcttctcggatgttaattaatgagcgccagcgcctgataaatagccgagcttatacaaacggcgagtctgaagtggctataaagattcctataaaacataccgtagagaacggaactgggcccagcagtgcacctgatagaggggtgaacggtacccggagggacgatgtcgttgccgaagcaggaaacgagactgagaatgaaaatgaagataacgaaaatgacgaggaagaggaagaggatgaagacgacgacgagggtccatacacaccatttgacacccctagcggtaaactggagactgttaaatgggctttcacatggcctctgtccttcgtactgtacttcaccgtgcctaattgtaacaagcctaggtgggagaagtggttcatggtgactttcgccagtagtacactttggatagcagcattttcctatatgatggtgtggatggtaaccataataggctacacactcggaataccggacgttatcatgggcattacattcctggccgccggcacgagtgttcctgattgtatggctagtcttattgttgccaggcaggggatgggcgacatggcggtgagtaacagcattgggtctaatgtgttcgacatactcattggattaggccttccatgggcattacagactctcgccgtggattacgggtcatacattcgcctaaattctagagggttgatctactcagtggggcttctgcttgcctctgtcttcgtcaccgtgttcggtgtccatttaaacaaatggcagttggataaaaagctgggttgtggctgcctcctgctctacggcgtgtttctctgcttcagcatcatgactgagtttaacgtctttacctttgtcaacttgcccatgtgcggcgaccattag

SEQ ID NO: 205134 - DNA, 1935 bp, Artificial Sequence
  derived and/or modified sequence
atgcggccaagcggggatgaagacagagccaggcggcgacggaggcgaagaaggaggcgcgaccttttgctcagtcagctttgctttctggccagtgtggctcttctgctgtggtccctgtccagtctgcgcgagcagaaagaacttgacctgatggatctagtcggggaagaccgcaagtggatgatggcacgcaaacttatgcaggtgaatgacacccttacctctgaagatgccggtctgcgcaacagcaaaaactgcacagagcccgcactgcacgaattccccaatgatatttttaccaacgaagaccgcaggcagggggcagtcgtcctgcatgtgctgtgtgcgatttacatgttctatgctctagcgatcgtgtgtgacgatttcttcgtgcccagtttggagaaaatctgcgagaggttgcacctatcggaggatgtagcaggcgctactttcatggccgctggaagctccgcccctgaactctttacatctgtaatcggtgtgttcatcacaaaaggcgacgtgggagtgggtaccatcgtcggctctgctgtcttcaacatactgtgtatcattggcgtctgcggtttgttcgcgggacaggtcgtagcgctgtcatcgtggtgccttcttagagatagcatctattacaccctgtcggtaatcgccttgatcgtgttcatttacgacgagaaagtgtcctggtgggagtctttggttttggtgctgatgtacttgatctatattgtgattatgaagtataacgcatgtatacatcagtgcttcgagaggcgtaccaaaggagccggtaacatggtgaatggcctggcaaataacgccgagatcgacgatagcagcaattgtgatgccactgtcgttctactcaaaaaagcaaactttcataggaaagcctccgtcatcatggtggatgaactcttaagcgcatatcctcaccaattatcattctccgaagcagggctaaggatcatgattacctcccacttcccaccaaaaacaaggctgtcgatggcctcacgcatgctgatcaatgagagacagcgcctgatcaattcacgggcatacacaaatggtgagtccgaggtcgccatcaagattcccatcaagcatacagtcgagaatggaacaggaccgtctagtgccccagaccggggagtgaatgggaccaggcgggacgatgtagtcgcagaagccggtaacgaaaccgagaatgaaaacgaagacaacgaaaatgacgaggaggaggaggaggacgaggacgatgacgaggggccttacaccccgtttgacacgcctagtggcaagctggagaccgtcaaatgggcttttacatggcccctaagtttcgtcctatactttaccgtgccaaactgcaacaaacctcgctgggaaaagtggttcatggtcacttttgcctccagtaccctatggattgccgcattctcatacatgatggtatggatggttaccatcatcggatataccttaggaattcccgatgtgatcatgggaatcacatttttggctgcaggcacaagcgtgccagattgtatggccagtcttattgtggctcgacaagggatgggcgacatggccgtgagcaattccatagggtcgaacgtcttcgatatactgatcggccttggattgccttgggcgctccaaacactggccgtggattacggttcatacattcgactcaatagtcgtggcctgatttatagtgtgggactgttacttgccagcgtcttcgtcaccgtctttggggtgcacctcaacaagtggcagctcgataaaaaactggggtgtggctgcctcttactatacggggttttcctttgtttcagcatcatgacggagttcaacgttttcacatttgttaacttgcccatgtgcggcgaccattag

SEQ ID NO: 205135 - DNA, 3893 bp, Artificial Sequence
  derived and/or modified sequence
gcgacgaggagggcgacgacgaggagacgggcagcggcgaggaggaggaagaggaggcggaggcggcggccgggtgggagcgcagcgaggacgcgcggctgctgcgcgcagggctgcctcctgccgctgtccccgccgcggccgcccgcgacaggagcggccgccgcccgccgaggccgccgcccggccgcccgaggatgcggccgtccggcgacgaggaccgcgcgcgtcgccgccgccgccgccgccgccggagggaccttctgctgagccagctctgcttcctggcctcggtggcgctgctgctctggtcgctgtcgagcctgcgagagcagaaggagcttgacctcatggacctcgtaggggaagacagaaagtggatgatggcgaggaagctgatgcaggtgaacgacactctgacttccgaagatgccggactccggaacagcaagaactgcaccgaaccagccctgcatgaattccccaatgacatcttcacaaacgaggatagaagacaaggtgcggtggtcctccatgtgctctgtgccatatacatgttctatgcgctggccattgtgtgtgatgacttcttcgtcccttccttggaaaagatctgtgagcgcctgcacctcagtgaagatgtggctggggccacattcatggcagcgggaagttcggccccagagctgttcacatcggtcataggggtcttcatcaccaaaggcgatgtgggagttggcaccatcgtgggctcagcggtattcaacatcctgtgcatcattggtgtctgtgggctctttgctgggcaggttgtggctctttcctcctggtgcctgctgagggattctatttactacacgctgtctgtgatcgcgctcatcgtgtttatttatgatgaaaaagtttcctggtgggagtctttagtccttgtgctgatgtatcttatctacattgtcatcatgaaatataacgcttgcatacatcagtgctttgagaggaggacaaaaggtgccgggaacatggtcaacggattggccaacaatgctgaaattgatgacagcagcaactgcgacgcaactgtggtgctacttaagaaagcaaatttccaccgcaaagcatcagtgatcatggtagacgagctgctgtcagcctacccacaccagctttccttctctgaggctggccttcgaatcatgataaccagccactttccccccaagacccggctctccatggccagtcgcatgttgatcaatgagagacaaagattgataaacagcagggcttataccaacggggaatctgaggtggccatcaaaatcccaattaagcacaccgtggagaatgggacagggcccagcagtgccccagacaggggcgtgaatgggacacggagggacgatgttgtggctgaggctggcaacgaaacagagaatgaaaatgaggacaatgagaatgatgaggaggaagaggaggacgaggatgatgatgaaggaccgtacacaccattcgacaccccctcgggtaaactggaaacagtgaaatgggcgttcacctggccgctgagtttcgtcttatacttcactgtacccaactgcaacaagccgcgctgggagaaatggttcatggtgacgtttgcttcctccacgctgtggatcgcagccttctcctacatgatggtgtggatggtcacaatcattggttacaccctggggattcctgacgtcatcatggggatcaccttcctggctgctgggaccagcgtgcctgactgcatggccagcctcattgtggccagacaagggatgggggacatggctgtgtccaactccattgggagcaacgtgtttgacatcctgattggcctcggtctcccctgggctctgcagaccctggctgtggattacggatcctacatccggctgaatagcagggggctgatctactccgtaggcttgctcctggcctctgtttttgtcacggtgttcggcgtccacctgaacaagtggcagctggacaagaagctgggctgtgggtgcctcctcctgtatggtgtgttcctgtgcttctccatcatgactgagttcaacgtgttcacctttgtgaacctgcccatgtgcggggaccactgagccgccgggtgcccacagaggctcagctccttcttttctgtgcaatacgagacccggccgcaccccgagtcacacaggcccccggggccacggcgttcgtctctcctgtgctgtcctcaggcctccgctcctgttttggtggcccaggctctcccctgacccatcctcgctcccccacctccttgggtcatgcccacccaccctttcctgcctcctccgtgtgaagacatccaacatccacgtgacttttccagctccatttttgaacagtgactgagattctagaaaaactggctgctaactggcctgagccaggcaacactgattccaatccctcctccttttttaagttatttgatggaagactcacctaatttgtgacctgagactgttgaagaaatagagaggagggggcccgttgattacagagagcatttgggattttgtttggtttggagatgatgcctaggttactgggtttggggggattgttttcttttgggggccttccccttttactccttttcttccagagatcaagagcttctcttgcatcttcttccactgggctctggattaatcaattacccaaaggctgcacctgccgtgttgtctgggcttgcatcccagatgtgttggagtatgcatggatgtagtgctttttagaggagccactgggcaaggccaccaagaacaaatgcatgacattttatagccaaggacgcctcgctaaagtcttatgggcgtcccctggggttgggggggcacaaggttttggaggaagaagacaacttccctcattccatcatcaccatctctttctcactaggttctttctagttttcaagcaatagttctagcctgccttggacaagggggccccagttaaacaaactacccatccatgagctgccaggcagtcaaaaacagaagcttccccgacttgtgagtccctgagatgtgctcttgttgtttggcatttggggtgacagggagtgacccagaggccaccactgcttttcatgcaggagttacagacactggtttcttggaaaatggagagaagcgcactttgcacagacgtcgtcaattaagtcccaatttgccacttggtattgagtacactggaccctgaccactggctcttgggcaaacgtccttcctcacggggcgcctccgccaagccggcccagctgcacccctcccttcctggagggatggccagggaaggagaaaacagagaactgacacctttgaaaccacagaatgtgttacatgcagactcgctcaagggcataagttattgtgaacgtttttgccaatcactgctcaacagccctgctagattttgtatgatgctgaattattatgcagactaattccacccagttgagacacaccatgcttgttcacttgtatttattgaaactgtggattcttgcccgtgctgtcccttgtatttactttaagcactgatcacttatcattcattcggtatggttttccctgtcccttgtacacattctggtatgaatttgtaaaaataacctgctacaaattggttgaatgtttctgtctgtggtgcgaaccagcattaacggatggggcacgtgcccaactgaggaacaggagaagaaatcaccaatttgggctctcagagctaagacacacttattgattctgttgcacattttgcactggtttatggcgattgttttcttggacggatagtgtaaaataaacttctctgttctctatcct

SEQ ID NO: 205136 - DNA, 1935 bp, Artificial Sequence
  derived and/or modified sequence
atgagacccagcggcgacgaggacagagccagaagaagaagaagaagaagaagaagaagagacctgctgctgagccagctgtgcttcctggccagcgtggccctgctgctgtggagcctgagcagcctgagagagcagaaggagctggacctgatggacctggtgggcgaggacagaaagtggatgatggccagaaagctgatgcaggtgaacgacaccctgaccagcgaggacgccggcctgagaaacagcaagaactgcaccgagcccgccctgcacgagttccccaacgacatcttcaccaacgaggacagaagacagggcgccgtggtgctgcacgtgctgtgcgccatctacatgttctacgccctggccatcgtgtgcgacgacttcttcgtgcccagcctggagaagatctgcgagagactgcacctgagcgaggacgtggccggcgccaccttcatggccgccggcagcagcgcccccgagctgttcaccagcgtgatcggcgtgttcatcaccaagggcgacgtgggcgtgggcaccatcgtgggcagcgccgtgttcaacatcctgtgcatcatcggcgtgtgcggcctgttcgccggccaggtggtggccctgagcagctggtgcctgctgagagacagcatctactacaccctgagcgtgatcgccctgatcgtgttcatctacgacgagaaggtgagctggtgggagagcctggtgctggtgctgatgtacctgatctacatcgtgatcatgaagtacaacgcctgcatccaccagtgcttcgagagaagaaccaagggcgccggcaacatggtgaacggcctggccaacaacgccgagatcgacgacagcagcaactgcgacgccaccgtggtgctgctgaagaaggccaacttccacagaaaggccagcgtgatcatggtggacgagctgctgagcgcctacccccaccagctgagcttcagcgaggccggcctgagaatcatgatcaccagccacttcccccccaagaccagactgagcatggccagcagaatgctgatcaacgagagacagagactgatcaacagcagagcctacaccaacggcgagagcgaggtggccatcaagatccccatcaagcacaccgtggagaacggcaccggccccagcagcgcccccgacagaggcgtgaacggcaccagaagagacgacgtggtggccgaggccggcaacgagaccgagaacgagaacgaggacaacgagaacgacgaggaggaggaggaggacgaggacgacgacgagggcccctacacccccttcgacacccccagcggcaagctggagaccgtgaagtgggccttcacctggcccctgagcttcgtgctgtacttcaccgtgcccaactgcaacaagcccagatgggagaagtggttcatggtgaccttcgccagcagcaccctgtggatcgccgccttcagctacatgatggtgtggatggtgaccatcatcggctacaccctgggcatccccgacgtgatcatgggcatcaccttcctggccgccggcaccagcgtgcccgactgcatggccagcctgatcgtggccagacagggcatgggcgacatggccgtgagcaacagcatcggcagcaacgtgttcgacatcctgatcggcctgggcctgccctgggccctgcagaccctggccgtggactacggcagctacatcagactgaacagcagaggcctgatctacagcgtgggcctgctgctggccagcgtgttcgtgaccgtgttcggcgtgcacctgaacaagtggcagctggacaagaagctgggctgcggctgcctgctgctgtacggcgtgttcctgtgcttcagcatcatgaccgagttcaacgtgttcaccttcgtgaacctgcccatgtgcggcgaccactag

SEQ ID NO: 205137 - protein, 2617 aa, Artificial Sequence
  derived and/or modified sequence
MLTDSGGGGTSFEEDLDSVAPRSAPAGASEPPPPGGVGLGIRTVRLFGEAGPASGVGSSGGGGSGSGTGGGDAALDFKLAAAVLRTGGGGGASGSDEDEVSEVESFILDQEDLDNPVLKTTSEIFLSSTAEGADLRTVDPETQARLEALLEAAGIGKLSTADGKAFADPEVLRRLTSSVSCALDEAAAALTRMKAENSHNAGQVDTRSLAEACSDGDVNAVRKLLDEGRSVNEHTEEGESLLCLACSAGYYELAQVLLAMHANVEDRGNKGDITPLMAASSGGYLDIVKLLLLHDADVNSQSATGNTALTYACAGGFVDIVKVLLNEGANIEDHNENGHTPLMEAASAGHVEVARVLLDHGAGINTHSNEFKESALTLACYKGHLDMVRFLLEAGADQEHKTDEMHTALMEACMDGHVEVARLLLDSGAQVNMPADSFESPLTLAACGGHVELAALLIERGANLEEVNDEGYTPLMEAAREGHEEMVALLLAQGANINAQTEETQETALTLACCGGFSEVADFLIKAGADIELGCSTPLMEASQEGHLELVKYLLASGANVHATTATGDTALTYACENGHTDVADVLLQAGADLEHESEGGRTPLMKAARAGHLCTVQFLISKGANVNRATANNDHTVVSLACAGGHLAVVELLLAHGADPTHRLKDGSTMLIEAAKGGHTNVVSYLLDYPNNVLSVPTTDVSQLPPPSQDQSQVPRVPTHTLAMVVPPQEPDRTSQENSPALLGVQKGTSKQKSSSLQVADQDLLPSFHPYQPLECIVEETEGKLNELGQRISAIEKAQLKSLELIQGEPLNKDKIEELKKNREEQVQKKKKILKELQKVERQLQMKTQQQFTKEYLETKGQKDTVSLHQQCSHRGVFPEGEGDGSLPEDHFSELPQVDTILFKDNDVDDEQQSPPSAEQIDFVPVQPLSSPQCNFSSDLGSNGTNSLELQKVSGNQQIVGQPQIAITGHDQGLLVQEPDGLMVATPAQTLTDTLDDLIAAVSTRVPTGSNSSSQTTECLTPESCSQTTSNVASQSMPPVYPSVDIDAHTESNHDTALTLACAGGHEELVSVLIARDAKIEHRDKKGFTPLILAATAGHVGVVEILLDKGGDIEAQSERTKDTPLSLACSGGRQEVVDLLLARGANKEHRNVSDYTPLSLAASGGYVNIIKILLNAGAEINSRTGSKLGISPLMLAAMNGHVPAVKLLLDMGSDINAQIETNRNTALTLACFQGRAEVVSLLLDRKANVEHRAKTGLTPLMEAASGGYAEVGRVLLDKGADVNAPPVPSSRDTALTIAADKGHYKFCELLIHRGAHIDVRNKKGNTPLWLASNGGHFDVVQLLVQAGADVDAADNRKITPLMSAFRKGHVKVVQYLVKEVNQFPSDIECMRYIATITDKELLKKCHQCVETIVKAKDQQAAEANKNASILLKELDLEKSREESRKQALAAKREKRKEKRKKKKEEQKRKQEEDEENKPKENSELPEDEDEEENDEDVEQEVPIEPPSATTTTTIGISATSATFTNVFGKKRANVVTTPSTNRKNKKNKTKETPPTAHLILPEQHMSLAQQKADKNKINGEPRGGGAGGNSDSDNLDSTDCNSESSSGGKSQELNFVMDVNSSKYPSLLLHSQEEKTSTATSKTQTRLEGEVTPNSLSTSYKTVSLPLSSPNIKLNLTSPKRGQKREEGWKEVVRRSKKLSVPASVVSRIMGRGGCNITAIQDVTGAHIDVDKQKDKNGERMITIRGGTESTRYAVQLINALIQDPAKELEDLIPKNHIRTPASTKSIHANFSSGVGTTAASSKNAFPLGAPTLVTSQATTLSTFQPANKLNKNVPTNVRSSFPVSLPLAYPHPHFALLAAQTMQQIRHPRLPMAQFGGTFSPSPNTWGPFPVRPVNPGNTNSSPKHNNTSRLPNQNGTVLPSESAGLATASCPITVSSVVAASQQLCVTNTRTPSSVRKQLFACVPKTSPPATVISSVTSTCSSLPSVSSAPITSGQAPTTFLPASTSQAQLSSQKMESFSAVPPTKEKVSTQDQPMANLCTPSSTANSCSSSASNTPGAPETHPSSSPTPTSSNTQEEAQPSSVSDLSPMSMPFASNSEPAPLTLTSPRMVAADNQDTSNLPQLAVPAPRVSHRMQPRGSFYSMVPNATIHQDPQSIFVTNPVTLTPPQGPPAAVQLSSAVNIMNGSQMHINPANKSLPPTFGPATLFNHFSSLFDSSQVPANQGWGDGPLSSRVATDASFTVQSAFLGNSVLGHLENMHPDNSKAPGFRPPSQRVSTSPVGLPSIDPSGSSPSSSSAPLASFSGIPGTRVFLQGPAPVGTPSFNRQHFSPHPWTSASNSSTSAPPTLGQPKGVSASQDRKIPPPIGTERLARIRQGGSVAQAPAGTSFVAPVGHSGIWSFGVNAVSEGLSGWSQSVMGNHPMHQQLSDPSTFSQHQPMERDDSGMVAPSNIFHQPMASGFVDFSKGLPISMYGGTIIPSHPQLADVPGGPLFNGLHNPDPAWNPMIKVIQNSTECTDAQQASLLPSVPALKGEIPSPQLTRPKKRIGRPMVASPNQRHQDHLRPKVPAGVQELTHCPDTPLLPPSDSRGHNSSNSPSLQAGGAEGAGDRGRDTR

SEQ ID NO: 205138 - protein, 1486 aa, Artificial Sequence
  derived and/or modified sequence
PRVGRHRLRLRVRTMLTDSGGGGTSFEEDLDSVAPRSAPAGASEPPPPGGVGLGIRTVRLFGEAGPASGVGSSGGGGSGSGTGGGDAALDFKLAAAVLRTGGGGGASGSDEDEVSEVESFILDQEDLDNPVLKTTSEIFLSSTAEGADLRTVDPETQARLEALLEAAGIGKLSTADGKAFADPEVLRRLTSSVSCALDEAAAALTRMKAENSHNAGQVDTRSLAEACSDGDVNAVRKLLDEGRSVNEHTEEGESLLCLACSAGYYELAQVLLAMHANVEDRGNKGDITPLMAASSGGYLDIVKLLLLHDADVNSQSATGNTALTYACAGGFVDIVKVLLNEGANIEDHNENGHTPLMEAASAGHVEVARVLLDHGAGINTHSNEFKESALTLACYKGHLDMVRFLLEAGADQEHKTDEMHTALMEACMDGHVEVARLLLDSGAQVNMPADSFESPLTLAACGGHVELAALLIERGANLEEVNDEGYTPLMEAAREGHEEMVALLLAQGANINAQTEETQETALTLACCGGFSEVADFLIKAGADIELGCSTPLMEASQEGHLELVKYLLASGANVHATTATGDTALTYACENGHTDVADVLLQAGADLDKQEDMKTILEGIDPAKHQEHESEGGRTPLMKAARAGHLCTVQFLISKGANVNRATANNDHTVVSLACAGGHLAVVELLLAHGADPTHRLKDGSTMLIEAAKGGHTNVVSYLLDYPNNVLSVPTTDVSQLPPPSQDQSQVPRVPTHTLAMVVPPQEPDRTSQENSPALLGVQKGTSKQKSSSLQVADQDLLPSFHPYQPLECIVEETEGKLNELGQRISAIEKAQLKSLELIQGEPLNKDKIEELKKNREEQVQKKKKILKELQKVERQLQMKTQQQFTKEYLETKGQKDTVSLHQQCSHRGVFPEGEGDGSLPEDHFSELPQVDTILFKDNDVDDEQQSPPSAEQIDFVPVQPLSSPQCNFSSDLGSNGTNSLELQKVSGNQQIVGQPQIAITGHDQGLLVQEPDGLMVATPAQTLTDTLDDLIAAVSTRVPTGSNSSSQTTECLTPESCSQTTSNVASQSMPPVYPSVDIDAHTESNHDTALTLACAGGHEELVSVLIARDAKIEHRDKKGFTPLILAATAGHVGVVEILLDKGGDIEAQSERTKDTPLSLACSGGRQEVVDLLLARGANKEHRNVSDYTPLSLAASGGYVNIIKILLNAGAEINSRTGSKLGISPLMLAAMNGHVPAVKLLLDMGSDINAQIETNRNTALTLACFQGRAEVVSLLLDRKANVEHRAKTGLTPLMEAASGGYAEVGRVLLDKGADVNAPPVPSSRDTALTIAADKGHYKFCELLIHRGAHIDVRNKKGNTPLWLASNGGHFDVVQLLVQAGADVDAADNRKITPLMSAFRKGHVKVVQYLVKEVNQFPSDIECMRYIATITDKELLKKCHQCVETIVKAKDQQAAEANKNASILLKELDLEKSREESRKQALAAKR

SEQ ID NO: 205139 - protein, 620 aa, Artificial Sequence
  derived and/or modified sequence
MSLAQQKADKNKINGEPRGGGAGGNSDSDNLDSTDCNSESSSGGKSQELNFVMDVNSSKYPSLLLHSQEEKTSTATSKTQTRLEGEVTPNSLSTSYKTVSLPLSSPNIKLNLTSPKRGQKREEGWKEVVRRSKKLSVPASVVSRIMGRGGCNITAIQDVTGAHIDVDKQKDKNGERMITIRGGTESTRYAVQLINALIQDPAKELEDLIPKNHIRTPASTKSIHANFSSGVGTTAASSKNAFPLGAPTLVTSQATTLSTFQPANKLNKNVPTNVRSSFPVSLPLAYPHPHFALLAAQTMQQIRHPRLPMAQFGGTFSPSPNTWGPFPVRPVNPGNTNSSPKHNNTSRLPNQNGTVLPSESAGLATASCPITVSSVVAASQQLCVTNTRTPSSVRKQLFACVPKTSPPATVISSVTSTCSSLPSVSSAPITSGQAPTTFLPASTSQAQLSSQKMESFSAVPPTKEKVSTQDQPMANLCTPSSTANSCSSSASNTPGAPETHPSSSPTPTSSNTQEEAQPSSVSDLSPMSMPFASNSEPAPLTLTSPRMVAADNQDTSNLPQLAVPAPRVSHRMQPRGSFYSMVPNATIHQDPQSIFVTNPVTLWEAEASGLHEVRSLRQAW

SEQ ID NO: 205140 - protein, 866 aa, Artificial Sequence
  derived and/or modified sequence
MDVNSSKYPSLLLHSQEEKTSTATSKTQTRLEGEVTPNSLSTSYKTVSLPLSSPNIKLNLTSPKRGQKREEGWKEVVRRSKKLSVPASVVSRIMGRGGCNITAIQDVTGAHIDVDKQKDKNGERMITIRGGTESTRYAVQLINALIQDPAKELEDLIPKNHIRTPASTKSIHANFSSGVGTTAASSKNAFPLGAPTLVTSQATTLSTFQPANKLNKNVPTNVRSSFPVSLPLAYPHPHFALLAAQTMQQIRHPRLPMAQFGGTFSPSPNTWGPFPVRPVNPGNTNSSPKHNNTSRLPNQNGTVLPSESAGLATASCPITVSSVVAASQQLCVTNTRTPSSVRKQLFACVPKTSPPATVISSVTSTCSSLPSVSSAPITSGQAPTTFLPASTSQAQLSSQKMESFSAVPPTKEKVSTQDQPMANLCTPSSTANSCSSSASNTPGAPETHPSSSPTPTSSNTQEEAQPSSVSDLSPMSMPFASNSEPAPLTLTSPRMVAADNQDTSNLPQLAVPAPRVSHRMQPRGSFYSMVPNATIHQDPQSIFVTNPVTLTPPQGPPAAVQLSSAVNIMNGSQMHINPANKSLPPTFGPATLFNHFSSLFDSSQVPANQGWGDGPLSSRVATDASFTVQSAFLGNSVLGHLENMHPDNSKAPGFRPPSQRVSTSPVATSAPPTLGQPKGVSASQDRKIPPPIGTERLARIRQGGSVAQAPAGTSFVAPVGHSGIWSFGVNAVSEGLSGWSQSVMGNHPMHQQLSDPSTFSQHQPMERDDSGMVAPSNIFHQPMASGFVDFSKGLPISMYGGTIIPSHPQLADVPGGPLFNGLHNPDPAWNPMIKVIQNSTECTDAQQIWPGTWAPHIGNMHLKYVN

SEQ ID NO: 205141 - DNA, 7854 bp, Artificial Sequence
  derived and/or modified sequence
atgctgaccgacagcggcggcggcggcaccagcttcgaggaggacctggacagcgtggcccccagaagcgcccccgccggcgccagcgagccccccccccccggcggcgtgggcctgggcatcagaaccgtgagactgttcggcgaggccggccccgccagcggcgtgggcagcagcggcggcggcggcagcggcagcggcaccggcggcggcgacgccgccctggacttcaagctggccgccgccgtgctgagaaccggcggcggcggcggcgccagcggcagcgacgaggacgaggtgagcgaggtggagagcttcatcctggaccaggaggacctggacaaccccgtgctgaagaccaccagcgagatcttcctgagcagcaccgccgagggcgccgacctgagaaccgtggaccccgagacccaggccagactggaggccctgctggaggccgccggcatcggcaagctgagcaccgccgacggcaaggccttcgccgaccccgaggtgctgagaagactgaccagcagcgtgagctgcgccctggacgaggccgccgccgccctgaccagaatgaaggccgagaacagccacaacgccggccaggtggacaccagaagcctggccgaggcctgcagcgacggcgacgtgaacgccgtgagaaagctgctggacgagggcagaagcgtgaacgagcacaccgaggagggcgagagcctgctgtgcctggcctgcagcgccggctactacgagctggcccaggtgctgctggccatgcacgccaacgtggaggacagaggcaacaagggcgacatcacccccctgatggccgccagcagcggcggctacctggacatcgtgaagctgctgctgctgcacgacgccgacgtgaacagccagagcgccaccggcaacaccgccctgacctacgcctgcgccggcggcttcgtggacatcgtgaaggtgctgctgaacgagggcgccaacatcgaggaccacaacgagaacggccacacccccctgatggaggccgccagcgccggccacgtggaggtggccagagtgctgctggaccacggcgccggcatcaacacccacagcaacgagttcaaggagagcgccctgaccctggcctgctacaagggccacctggacatggtgagattcctgctggaggccggcgccgaccaggagcacaagaccgacgagatgcacaccgccctgatggaggcctgcatggacggccacgtggaggtggccagactgctgctggacagcggcgcccaggtgaacatgcccgccgacagcttcgagagccccctgaccctggccgcctgcggcggccacgtggagctggccgccctgctgatcgagagaggcgccaacctggaggaggtgaacgacgagggctacacccccctgatggaggccgccagagagggccacgaggagatggtggccctgctgctggcccagggcgccaacatcaacgcccagaccgaggagacccaggagaccgccctgaccctggcctgctgcggcggcttcagcgaggtggccgacttcctgatcaaggccggcgccgacatcgagctgggctgcagcacccccctgatggaggccagccaggagggccacctggagctggtgaagtacctgctggccagcggcgccaacgtgcacgccaccaccgccaccggcgacaccgccctgacctacgcctgcgagaacggccacaccgacgtggccgacgtgctgctgcaggccggcgccgacctggagcacgagagcgagggcggcagaacccccctgatgaaggccgccagagccggccacctgtgcaccgtgcagttcctgatcagcaagggcgccaacgtgaacagagccaccgccaacaacgaccacaccgtggtgagcctggcctgcgccggcggccacctggccgtggtggagctgctgctggcccacggcgccgaccccacccacagactgaaggacggcagcaccatgctgatcgaggccgccaagggcggccacaccaacgtggtgagctacctgctggactaccccaacaacgtgctgagcgtgcccaccaccgacgtgagccagctgcccccccccagccaggaccagagccaggtgcccagagtgcccacccacaccctggccatggtggtgcccccccaggagcccgacagaaccagccaggagaacagccccgccctgctgggcgtgcagaagggcaccagcaagcagaagagcagcagcctgcaggtggccgaccaggacctgctgcccagcttccacccctaccagcccctggagtgcatcgtggaggagaccgagggcaagctgaacgagctgggccagagaatcagcgccatcgagaaggcccagctgaagagcctggagctgatccagggcgagcccctgaacaaggacaagatcgaggagctgaagaagaacagagaggagcaggtgcagaagaagaagaagatcctgaaggagctgcagaaggtggagagacagctgcagatgaagacccagcagcagttcaccaaggagtacctggagaccaagggccagaaggacaccgtgagcctgcaccagcagtgcagccacagaggcgtgttccccgagggcgagggcgacggcagcctgcccgaggaccacttcagcgagctgccccaggtggacaccatcctgttcaaggacaacgacgtggacgacgagcagcagagcccccccagcgccgagcagatcgacttcgtgcccgtgcagcccctgagcagcccccagtgcaacttcagcagcgacctgggcagcaacggcaccaacagcctggagctgcagaaggtgagcggcaaccagcagatcgtgggccagccccagatcgccatcaccggccacgaccagggcctgctggtgcaggagcccgacggcctgatggtggccacccccgcccagaccctgaccgacaccctggacgacctgatcgccgccgtgagcaccagagtgcccaccggcagcaacagcagcagccagaccaccgagtgcctgacccccgagagctgcagccagaccaccagcaacgtggccagccagagcatgccccccgtgtaccccagcgtggacatcgacgcccacaccgagagcaaccacgacaccgccctgaccctggcctgcgccggcggccacgaggagctggtgagcgtgctgatcgccagagacgccaagatcgagcacagagacaagaagggcttcacccccctgatcctggccgccaccgccggccacgtgggcgtggtggagatcctgctggacaagggcggcgacatcgaggcccagagcgagagaaccaaggacacccccctgagcctggcctgcagcggcggcagacaggaggtggtggacctgctgctggccagaggcgccaacaaggagcacagaaacgtgagcgactacacccccctgagcctggccgccagcggcggctacgtgaacatcatcaagatcctgctgaacgccggcgccgagatcaacagcagaaccggcagcaagctgggcatcagccccctgatgctggccgccatgaacggccacgtgcccgccgtgaagctgctgctggacatgggcagcgacatcaacgcccagatcgagaccaacagaaacaccgccctgaccctggcctgcttccagggcagagccgaggtggtgagcctgctgctggacagaaaggccaacgtggagcacagagccaagaccggcctgacccccctgatggaggccgccagcggcggctacgccgaggtgggcagagtgctgctggacaagggcgccgacgtgaacgccccccccgtgcccagcagcagagacaccgccctgaccatcgccgccgacaagggccactacaagttctgcgagctgctgatccacagaggcgcccacatcgacgtgagaaacaagaagggcaacacccccctgtggctggccagcaacggcggccacttcgacgtggtgcagctgctggtgcaggccggcgccgacgtggacgccgccgacaacagaaagatcacccccctgatgagcgccttcagaaagggccacgtgaaggtggtgcagtacctggtgaaggaggtgaaccagttccccagcgacatcgagtgcatgagatacatcgccaccatcaccgacaaggagctgctgaagaagtgccaccagtgcgtggagaccatcgtgaaggccaaggaccagcaggccgccgaggccaacaagaacgccagcatcctgctgaaggagctggacctggagaagagcagagaggagagcagaaagcaggccctggccgccaagagagagaagagaaaggagaagagaaagaagaagaaggaggagcagaagagaaagcaggaggaggacgaggagaacaagcccaaggagaacagcgagctgcccgaggacgaggacgaggaggagaacgacgaggacgtggagcaggaggtgcccatcgagccccccagcgccaccaccaccaccaccatcggcatcagcgccaccagcgccaccttcaccaacgtgttcggcaagaagagagccaacgtggtgaccacccccagcaccaacagaaagaacaagaagaacaagaccaaggagaccccccccaccgcccacctgatcctgcccgagcagcacatgagcctggcccagcagaaggccgacaagaacaagatcaacggcgagcccagaggcggcggcgccggcggcaacagcgacagcgacaacctggacagcaccgactgcaacagcgagagcagcagcggcggcaagagccaggagctgaacttcgtgatggacgtgaacagcagcaagtaccccagcctgctgctgcacagccaggaggagaagaccagcaccgccaccagcaagacccagaccagactggagggcgaggtgacccccaacagcctgagcaccagctacaagaccgtgagcctgcccctgagcagccccaacatcaagctgaacctgaccagccccaagagaggccagaagagagaggagggctggaaggaggtggtgagaagaagcaagaagctgagcgtgcccgccagcgtggtgagcagaatcatgggcagaggcggctgcaacatcaccgccatccaggacgtgaccggcgcccacatcgacgtggacaagcagaaggacaagaacggcgagagaatgatcaccatcagaggcggcaccgagagcaccagatacgccgtgcagctgatcaacgccctgatccaggaccccgccaaggagctggaggacctgatccccaagaaccacatcagaacccccgccagcaccaagagcatccacgccaacttcagcagcggcgtgggcaccaccgccgccagcagcaagaacgccttccccctgggcgcccccaccctggtgaccagccaggccaccaccctgagcaccttccagcccgccaacaagctgaacaagaacgtgcccaccaacgtgagaagcagcttccccgtgagcctgcccctggcctacccccacccccacttcgccctgctggccgcccagaccatgcagcagatcagacaccccagactgcccatggcccagttcggcggcaccttcagccccagccccaacacctggggccccttccccgtgagacccgtgaaccccggcaacaccaacagcagccccaagcacaacaacaccagcagactgcccaaccagaacggcaccgtgctgcccagcgagagcgccggcctggccaccgccagctgccccatcaccgtgagcagcgtggtggccgccagccagcagctgtgcgtgaccaacaccagaacccccagcagcgtgagaaagcagctgttcgcctgcgtgcccaagaccagcccccccgccaccgtgatcagcagcgtgaccagcacctgcagcagcctgcccagcgtgagcagcgcccccatcaccagcggccaggcccccaccaccttcctgcccgccagcaccagccaggcccagctgagcagccagaagatggagagcttcagcgccgtgccccccaccaaggagaaggtgagcacccaggaccagcccatggccaacctgtgcacccccagcagcaccgccaacagctgcagcagcagcgccagcaacacccccggcgcccccgagacccaccccagcagcagccccacccccaccagcagcaacacccaggaggaggcccagcccagcagcgtgagcgacctgagccccatgagcatgcccttcgccagcaacagcgagcccgcccccctgaccctgaccagccccagaatggtggccgccgacaaccaggacaccagcaacctgccccagctggccgtgcccgcccccagagtgagccacagaatgcagcccagaggcagcttctacagcatggtgcccaacgccaccatccaccaggacccccagagcatcttcgtgaccaaccccgtgaccctgacccccccccagggcccccccgccgccgtgcagctgagcagcgccgtgaacatcatgaacggcagccagatgcacatcaaccccgccaacaagagcctgccccccaccttcggccccgccaccctgttcaaccacttcagcagcctgttcgacagcagccaggtgcccgccaaccagggctggggcgacggccccctgagcagcagagtggccaccgacgccagcttcaccgtgcagagcgccttcctgggcaacagcgtgctgggccacctggagaacatgcaccccgacaacagcaaggcccccggcttcagaccccccagccagagagtgagcaccagccccgtgggcctgcccagcatcgaccccagcggcagcagccccagcagcagcagcgcccccctggccagcttcagcggcatccccggcaccagagtgttcctgcagggccccgcccccgtgggcacccccagcttcaacagacagcacttcagcccccacccctggaccagcgccagcaacagcagcaccagcgccccccccaccctgggccagcccaagggcgtgagcgccagccaggacagaaagatccccccccccatcggcaccgagagactggccagaatcagacagggcggcagcgtggcccaggcccccgccggcaccagcttcgtggcccccgtgggccacagcggcatctggagcttcggcgtgaacgccgtgagcgagggcctgagcggctggagccagagcgtgatgggcaaccaccccatgcaccagcagctgagcgaccccagcaccttcagccagcaccagcccatggagagagacgacagcggcatggtggcccccagcaacatcttccaccagcccatggccagcggcttcgtggacttcagcaagggcctgcccatcagcatgtacggcggcaccatcatccccagccacccccagctggccgacgtgcccggcggccccctgttcaacggcctgcacaaccccgaccccgcctggaaccccatgatcaaggtgatccagaacagcaccgagtgcaccgacgcccagcaggccagcctgctgcccagcgtgcccgccctgaagggcgagatccccagcccccagctgaccagacccaagaagagaatcggcagacccatggtggccagccccaaccagagacaccaggaccacctgagacccaaggtgcccgccggcgtgcaggagctgacccactgccccgacacccccctgctgccccccagcgacagcagaggccacaacagcagcaacagccccagcctgcaggccggcggcgccgagggcgccggcgacagaggcagagacaccagatag

SEQ ID NO: 205142 - DNA, 7854 bp, Artificial Sequence
  derived and/or modified sequence
atgttgaccgactccggaggaggcggcacttcattcgaggaggatctggactccgtggctccacgtagcgctccagccggtgccagcgagccaccccctcctggtggtgtggggctggggatccgaacagtgcggctgtttggcgaggcagggcctgcttccggtgtggggtctagtggaggaggtggaagcggttccgggaccggcggaggagatgcagctcttgactttaagttagcagctgctgttttgagaacaggtggcgggggcggagcttccggctctgatgaggacgaggtatccgaagtcgaatcattcatccttgaccaagaggacttggataatccagttctgaagacgacaagtgaaatcttcctctctagcaccgccgagggtgccgacctacgaaccgttgatcccgaaacacaggcacggttggaggctctgttggaggcagccggcattggtaaattaagcacagcagatgggaaagccttcgccgaccccgaggtgctgcggcggctgacgtcgtcagtaagctgtgccttggacgaagccgctgctgcccttacacggatgaaggcagagaactcccataacgccgggcaggtagatacacgcagcctggctgaagcctgctccgatggcgacgtcaatgccgtccgcaagctgttggatgaaggccggagcgtgaatgaacacactgaggagggtgagtctctgctgtgtctagcctgttctgcgggctactatgaactcgcccaggtgctgcttgctatgcacgccaatgtagaagaccgtgggaataaaggtgatatcaccccgctgatggccgccagttcaggcggttacctggacattgtgaagctcttgctgctccacgatgcggacgtgaactcccagtctgccaccggcaacacagctctgacctatgcctgtgccgggggcttcgtggatatcgtgaaagtactcctgaacgaaggagccaatatcgaagatcataacgagaacggtcacacaccgctgatggaggctgcctcagcgggccacgtcgaggtcgcacgggtgctcctggaccatggggcggggattaacacccactccaatgaatttaaggagtcagccttgaccctcgcctgttataaaggtcatctcgacatggtacgttttctgctggaggcgggtgccgatcaggagcataaaaccgacgagatgcatacggcccttatggaagcatgcatggacggacatgtggaagtagcacgcttactgctcgactctggcgcacaagtgaatatgccggcagacagtttcgagtctccccttacacttgccgcgtgcggaggccatgtggagttggccgcgttgctgatcgagagaggagcgaatcttgaggaagtaaatgacgagggctatacaccattgatggaagccgccagggagggccacgaggaaatggtggccctgctcctggcgcagggcgccaatataaatgctcagacagaagagacccaggagacagctctcaccctggcttgttgcggggggtttagtgaggtggcagacttcctgatcaaagctggagctgacatcgagttggggtgctccacaccattaatggaagcaagccaagagggccatctggaactggtgaaatatcttctggcatccggcgcaaatgtgcacgctacaacagctacgggggacacagccttgacgtatgcgtgcgagaatggccatactgatgtggctgatgttctcctgcaggcgggagctgatttagaacatgaatcagaagggggaagaactccgttgatgaaagccgcgcgggccggtcacctgtgcacagtgcagttcctgataagtaaaggtgctaatgtgaacagagccaccgctaacaacgaccacacagtggtgtcacttgcctgcgcagggggacacttggctgtcgtagagttgcttctggctcacggtgcagaccctacacaccgcctgaaagatggatccactatgttgatcgaggccgcaaaggggggtcatacaaacgtggtgtcgtacctcctagattaccccaataatgttctgtcggtcccaacaactgacgtttctcagctcccccccccatcccaggaccaatcccaggttcctagggtgccaactcatacactggccatggtcgttcctcctcaagagcccgaccggacaagtcaggaaaacagccctgctcttctcggggtccaaaaaggcacctccaagcagaaatccagtagcctacaagtggctgaccaggacctgctgcccagttttcacccataccaaccgctggagtgcattgttgaagagacagaaggcaagctaaatgaactgggacagaggatctctgctatagagaaggctcaattaaagagcctggagcttatccaaggcgaacccctaaataaggataagatcgaggagctgaagaagaatcgcgaagagcaggtacagaaaaaaaaaaagatcctaaaggagctgcagaaagtggagcggcaattgcagatgaagacccaacagcagttcacgaaagagtatctagagactaaaggtcagaaggacacggtttctctgcatcagcaatgttcccaccgcggagtgtttcctgagggggagggagatgggagcctgccagaagaccatttttcagagctgccacaggtcgataccattttatttaaggacaacgatgtggatgacgagcagcagagcccccctagcgctgagcagatcgatttcgtgcccgtgcagcccctatcctccccacagtgcaacttcagctcagatctggggtcaaatggaactaatagcctggagttacagaaagtcagtggaaaccagcagatagttggacagcctcagatcgctataacgggtcacgatcagggcctgctagttcaggagccagacggcctgatggtggctaccccagctcagaccctaaccgacactctggatgacttgatcgccgctgtgagcacgcgggttccaaccggcagcaattcatcatcacagaccacggagtgcttaactccggagagttgcagccaaactaccagtaacgtggcgtctcagtctatgccccccgtctacccttccgtcgatattgacgcccacacggagagtaatcacgatacagccctgactttagcctgcgccggagggcatgaggagttggtgtccgttctcatagccagagacgctaagatcgagcacagggacaagaaaggctttacccctctcattcttgccgctactgctgggcatgtgggtgtcgtagagatactccttgataaggggggggatattgaagctcagtccgagaggaccaaagacacacctctgtctctggcctgttcaggaggaagacaggaagtggtagacttgctgctggcccgaggagctaacaaagagcataggaacgtatctgattatactccattatctctggctgcgtcaggtgggtatgtgaacataattaagattctgttgaacgccggcgctgagatcaattccagaacgggatctaagcttgggattagcccactgatgctggccgcaatgaacggtcatgtgccagccgtcaagctgctcttggatatgggaagcgatattaacgcgcaaatcgagaccaaccgaaacacggcgcttacactggcttgttttcagggacgggcagaagtcgtgagcctcctcctggaccggaaagcgaacgtcgaacaccgcgctaagacgggtctgacccctctgatggaagcagcttcaggaggatacgccgaggtgggccgggtcttactcgacaaaggcgccgatgtgaatgccccaccggtccctagttctcgcgacacggcccttaccatagcggcggataagggtcactacaaattttgtgaacttctgatccatagaggggcacatattgatgtgcgaaacaagaagggcaataccccactctggctggccagcaacggaggccatttcgatgtcgtacagttactggtgcaagctggcgcagatgtcgacgccgctgataaccggaagattacacctctgatgagtgcctttcgaaaaggacacgttaaggttgtgcaatacctggtgaaggaagtcaaccagttcccctctgatattgagtgcatgaggtacatcgccaccatcaccgacaaggagcttttgaagaagtgccatcaatgtgtcgagaccattgtcaaagcaaaagaccagcaggcagccgaggccaataaaaacgcttctattctgctcaaagaactggacctggagaaatcacgtgaagagagccgaaagcaggcactggctgctaagagggagaagaggaaagaaaagcgcaaaaagaaaaaagaagaacagaaaagaaaacaggaagaggatgaggaaaacaaacccaaagagaattctgagctgccggaggacgaggacgaggaagagaacgatgaggatgtagagcaagaagtgccaatagagcctccatctgctacaacaaccaccaccattggtatcagtgcaacttctgcaacctttacaaacgtgttcggaaaaaagagagcaaacgttgtgaccactccttcaaccaaccgaaagaataaaaagaataaaaccaaggaaaccccacctactgcccatttaatccttcctgagcagcatatgagtcttgctcagcagaaggctgacaagaacaaaataaatggagaaccaagaggcgggggtgcaggcggaaattccgacagcgacaatctagattctaccgattgtaattccgagagttcctcaggtggtaaatctcaggaattaaattttgtcatggatgtaaacagctcgaaatatccaagcctgctgcttcattcccaggaggagaagactagcacagcaacctcaaaaacacaaactagacttgagggcgaagtcacgcccaattcgctctctaccagttataaaactgtcagcctgcctctgagttctcctaatattaagcttaacctgacgtctcctaagaggggccagaaacgtgaggaaggatggaaagaagtcgtgagaaggtctaaaaagctctctgtcccagcctccgtggtctcccggatcatggggaggggcggctgtaacatcacagccatccaagatgtgacgggtgcccacattgatgttgacaagcagaaggataaaaatggagaaaggatgatcacgattcgcggaggtacggagtccacaaggtatgcagtacagttaataaatgccttaatacaggacccagctaaagaactggaggacttgatccccaaaaatcatatccggacccccgcctcaacaaagtctatccacgcaaatttttcctccggggtgggcaccacggctgcttcaagcaaaaatgccttccctctcggggcaccaacattggtgacttcccaggcaacaacactgagtacctttcagccagccaacaaacttaacaagaacgttcctacaaacgtccgatcttctttcccggtgtctctcccactggcctacccgcacccccactttgcgcttctcgcagcacagacgatgcagcaaatcagacatcctcggttgccgatggctcagttcggcggaaccttttccccgagcccaaacacctggggcccctttcccgtgaggccggtgaacccagggaataccaatagctctcccaagcacaataatacgagtagactgccgaatcaaaatggtaccgttcttccaagcgaaagcgccggcctagccactgcttcctgtccaattactgtgtctagcgtggtggctgcctctcagcaactatgtgttacgaatacccggaccccttcctctgttaggaagcagctttttgcatgcgttcccaaaacatctccaccagctacggtcatctcttcagtgacttcgacttgctccagtcttccctcagtctcatccgcgcctatcacgtccggacaggctcccactacctttctgccagcctccacgtcccaggctcagttgtcatcccagaaaatggagtctttctcagccgtgccaccaaccaaagagaaggtttccacacaggatcagccaatggccaatttgtgtacgccatcttctacagcaaattcatgctcttcaagcgcgtccaatacacccggcgccccagaaacgcatcccagtagtagtcccacaccgacctcatctaatactcaggaggaggcccaacccagttccgtcagcgacctgtctcctatgtcaatgccctttgcttcaaatagtgagccggcgcctctcacgcttaccagtccacggatggtggccgctgacaatcaggatacctctaatcttcctcaactggctgtaccagccccacgggtgagtcacaggatgcagcctagagggtcattctattcaatggtgccaaatgccactattcaccaggatccccagagcatatttgtcaccaatccagtgacactcaccccacctcagggtcctcctgccgcagtgcaattaagttccgcagtgaatataatgaacggttcgcaaatgcatatcaaccctgcaaataaatctctcccccccacattcggccctgcgacactttttaaccacttctcctctctattcgattccagtcaggtcccagcgaatcaggggtggggggatgggcccctgtcttcccgggtcgctacagatgcgagtttcaccgttcaatcagcctttctcggaaattctgtcctgggccacctcgagaatatgcatcccgacaatagcaaggccccgggcttcaggcctccctctcagcgcgtctcaacatctcccgttggcctcccctcgatcgacccttctggctcctctccttcgagttccagtgctccactagcctctttctcaggtatcccgggcaccagggtgttccttcagggccccgctccagtcggcacaccttcttttaaccgtcaacatttttccccccatccttggactagcgcttcgaactcttccactagcgctcccccaactttaggacaacctaaaggagtgagcgccagccaggacagaaaaattccgccaccgatcggcacggagagactggctagaatccgccaggggggatctgttgcacaggccccagcgggaacctcctttgttgcgccggttggccatagtggaatttggtcttttggcgtgaacgctgtgtccgaaggcctgtctgggtggagccagtccgtcatgggtaaccaccccatgcaccagcagttgtcagatccatctaccttttctcaacatcagccaatggagcgagacgattcaggtatggtggctccttcgaatattttccatcagccaatggccagcggcttcgtggacttctctaagggcttacctatcagtatgtatggcggcacgatcatcccctctcacccccaactagccgacgttcctggggggccactatttaatgggttgcacaaccctgaccctgcgtggaatcccatgattaaggtgatccagaactccaccgagtgcacagatgcccaacaggcaagtctgctcccctcagtcccggccctgaaaggcgaaatcccctcccctcaacttaccaggccaaagaagcggatcgggagaccaatggtcgcaagccccaaccagcggcatcaagatcacctacgccccaaagtgcctgctggggttcaggaactgacgcactgcccagatactccactcctacccccatcagactcccgcgggcataactcaagtaatagcccctctctgcaagccggtggagccgaaggcgctggagaccggggtagggatacccggtag

SEQ ID NO: 205143 - DNA, 7854 bp, Artificial Sequence
  derived and/or modified sequence
atgctgacagattctgggggcggcggcaccagctttgaggaggacctggacagcgtggcccccaggtctgccccagctggggccagcgagcccccacctcctgggggcgtgggcctgggcatcagaacagtgcggctgtttggagaggccggccctgccagcggcgtgggcagcagcggcggcggcggcagcggcagcggcaccggcggcggagatgctgccctggacttcaagctggccgctgctgtgctgaggactggaggcggcggcggggccagcggcagtgatgaagatgaggtgtctgaggtggagagcttcatcctggaccaggaggacctggacaaccctgtgctgaagaccaccagcgagatcttcctgagcagcacagctgagggcgctgacctgaggacagtggaccctgagacccaggcccggctggaggccctgctggaggccgccggcatcggcaagctgagcacagcagatggcaaggcctttgctgaccctgaggtgctgcggcggctgaccagctctgtgtcctgtgccctggatgaggccgccgccgccctgaccaggatgaaggccgagaacagccacaatgccggccaggtggacaccaggagcctggccgaggcctgcagtgatggagatgtgaatgctgtgaggaagctgctggatgagggccgctctgtgaatgagcacacagaggagggggagagcctgctgtgcctggcctgcagcgctggctactatgagctggcccaggtgctgctggccatgcacgccaacgtggaggaccggggcaacaagggggacatcacccccctgatggccgccagcagcggcggctacctggacatcgtgaagctgctgctgctgcatgatgctgatgtgaacagccagagcgccaccggcaacacagccctgacctacgcctgtgccggcggctttgtggacatcgtgaaggtgctgctgaatgaaggagccaacatcgaggaccacaatgaaaatggccacacccccctgatggaggccgccagcgctggccacgtggaggtggcccgggtgctgctggaccacggggccggcatcaacacccacagcaatgagttcaaggagagcgccctgaccctggcctgctacaagggccacctggacatggtgcgcttcctgctggaggccggggctgaccaggagcacaagacagatgagatgcacacagccctgatggaggcctgcatggatggccacgtggaggtggcccggctgctgctggacagcggggcccaggtgaacatgcctgctgacagctttgagagccccctgaccctggccgcctgtggcggccacgtggagctggccgccctgctgattgaaagaggagccaacctggaggaggtgaatgatgagggctacacccccctgatggaggccgcccgggagggccacgaggagatggtggccctgctgctggcccagggcgccaacatcaatgcccagacagaggagacccaggagacagccctgaccctggcctgctgcggcggcttcagcgaggtggccgacttcctgatcaaggccggggctgacatcgagctgggctgcagcacccccctgatggaggccagccaggagggccacctggagctggtgaagtacctgctggccagcggggccaacgtgcacgccaccacagccactggagacacagccctgacctacgcctgtgaaaatggccacacagatgtggctgatgtgctgctgcaggccggggctgacctggagcacgagagcgagggcggccgcacccccctgatgaaggccgcccgggccggccacctgtgcaccgtgcagttcctgatcagcaaaggagccaacgtgaacagagccacagccaacaatgaccacacagtggtgtccctggcctgtgccggcggccacctggccgtggtggagctgctgctggcccatggagctgaccccacccaccggctgaaggatggcagcaccatgctgattgaagctgccaagggcggccacaccaacgtggtgtcctacctgctggactaccccaacaacgtgctgtctgtgcccaccacagatgtgtcccagctgcccccacccagccaggaccagagccaggtgccccgggtgcccacccacaccctggccatggtggtgcccccccaggagccagacaggaccagccaggagaacagccctgccctgctgggcgtgcagaagggcaccagcaagcagaagagcagcagcctgcaggtggccgaccaggacctgctgcccagcttccacccctaccagcccctggagtgcatcgtggaggagacagagggcaagctgaatgagctgggccagaggatcagcgccatcgagaaggcccagctgaagagcctggagctgatccagggcgagcccctgaacaaggacaagattgaggagctgaagaagaaccgggaggagcaggtgcagaagaagaagaagatcctgaaggagctgcagaaggtggagcggcagctgcagatgaagacccagcagcagttcaccaaggagtacctggagaccaagggccagaaggacacagtgtccctgcaccagcagtgcagccacagaggagtcttccctgagggggagggagatggcagcctgcctgaggaccacttcagcgagctgccccaggtggacaccatcctcttcaaggacaatgatgtggatgatgagcagcagagcccccccagcgctgagcagattgactttgtgcctgtgcagcccctgagcagcccccagtgcaacttcagcagtgacctgggcagcaatggcaccaacagcctggagctgcagaaggtgtctggcaaccagcagatcgtgggccagccccagatcgccatcactggacatgaccagggcctgctggtgcaggagccagatggcctgatggtggccaccccagcccagaccctgacagacaccctggatgacctgattgctgctgtgtccaccagggtgcccaccggcagcaacagcagcagccagaccacagaatgtctgaccccagagagctgcagccagaccaccagcaatgtggccagccagagcatgcctcctgtgtaccccagcgtggacattgatgcccacacagagagcaaccacgacacagccctgaccctggcctgtgccggcggccacgaggagctggtgtctgtgctgattgccagagatgccaagattgagcaccgggacaagaagggcttcacccccctcatcctggccgccacagctggccacgtgggcgtggtggagatcctgctggacaagggcggggacatcgaggcccagagcgagaggaccaaggacacccccctgagcctggcctgcagcggcggccggcaggaggtggtggacctgctgctggcccggggggccaacaaggagcacagaaatgtgtctgactacacccccctgagcctggccgccagcggcggctacgtgaacatcatcaagatcctgctgaatgctggagctgagatcaacagcaggacaggcagcaagctgggcatcagccccctgatgctggccgccatgaatggccacgtgcctgctgtgaagctgctgctggacatgggcagtgacatcaatgcccagatcgagaccaacagaaacacagccctgaccctggcctgcttccagggccgggcagaggtggtgtccctgctgctggacaggaaggccaacgtggagcaccgggccaagacaggcctgacccccctgatggaggccgccagcggcggctacgccgaggtgggccgggtgctgctggacaagggagcagatgtgaatgcccctcctgtgcccagcagccgggacacagccctgaccatcgctgctgacaagggccactacaagttctgtgagctgctgatccacagaggagcccacattgatgtgaggaacaagaagggcaacacccccctgtggctggccagcaatggaggccactttgatgtggtgcagctgctggtgcaggccggggctgatgtggatgctgctgacaacaggaagatcacccccctgatgtctgccttcaggaagggccacgtgaaggtggtgcagtacctggtgaaggaggtgaaccagttccccagcgacatcgagtgcatgagatacatcgccaccatcacagacaaggagctgctgaagaagtgccaccagtgtgtggagaccatcgtgaaggccaaggaccagcaggccgctgaggccaacaagaatgccagcatcctgctgaaggagctggacctggagaagagccgggaggagagcaggaagcaggccctggccgccaagcgggagaagaggaaggagaagaggaagaagaagaaggaggagcagaagaggaagcaggaggaggatgaggagaacaagcccaaggaaaattctgagctgcctgaagatgaagatgaggaggagaatgatgaagatgtggagcaggaggtgcccatcgagccccccagcgccaccaccaccaccaccatcggcatcagcgccaccagcgccaccttcaccaacgtgtttgggaagaagagggccaacgtggtgaccacccccagcaccaacaggaagaacaagaagaacaagaccaaggagaccccacccacagcccacctgatcctgcctgagcagcacatgagcctggcccagcagaaggctgacaagaacaagatcaatggagagccccggggcggcggggccggcggcaacagcgacagcgacaacctggacagcacagactgcaacagcgagagcagcagcggcggcaagagccaggagctgaactttgtgatggatgtgaacagcagcaagtaccccagcctgctgctgcacagccaggaggagaagaccagcacagccaccagcaagacccagacccggctggagggggaggtgacccccaacagcctgagcaccagctacaagacagtgtccctgcccctgagcagccccaacatcaagctgaacctgaccagccccaagaggggccagaagcgggaggagggctggaaggaggtggtgagaagaagcaagaagctgtctgtgcctgcctctgtggtgagccgcatcatgggccggggcggctgcaacatcacagccatccaggatgtgactggagcccacattgatgtggacaagcagaaggacaagaatggagagaggatgatcaccatccggggcggcacagagagcaccaggtatgctgtgcagctgatcaatgccctgatccaggaccctgccaaggagctggaggacctgatccccaagaaccacatccgcaccccagccagcaccaagagcatccacgccaacttcagcagcggcgtgggcaccacagctgccagcagcaagaatgccttccccctgggcgcccccaccctggtgaccagccaggccaccaccctgagcaccttccagcctgccaacaagctgaacaagaatgtgcccaccaacgtgcgcagcagcttccctgtgtccctgcccctggcctacccccacccccactttgccctgctggccgcccagaccatgcagcagatccgccacccccggctgcccatggcccagtttggaggcaccttcagccccagccccaacacctggggccccttccctgtgcggcctgtgaaccctggcaacaccaacagcagccccaagcacaacaacaccagccggctgcccaaccagaatggaacagtgctgcccagcgagagcgctggcctggccacagccagctgccccatcaccgtgtcctctgtggtggccgccagccagcagctgtgtgtgaccaacaccaggacccccagctctgtgaggaagcagctgtttgcctgtgtgcccaagaccagccccccagccaccgtcatcagctctgtgaccagcacctgcagcagcctgcccagcgtgtcctctgcccccatcaccagcggccaggcccccaccaccttcctgcctgccagcaccagccaggcccagctgagcagccagaagatggagagcttctctgctgtgccccccaccaaggagaaggtgtccacccaggaccagcccatggccaacctgtgcacccccagcagcacagccaacagctgcagcagcagcgccagcaacacccctggggcccctgagacccaccccagcagcagccccacccccaccagcagcaacacccaggaggaggcccagcccagctctgtgtctgacctgagccccatgtccatgccctttgccagcaacagcgagcccgcccccctgaccctgaccagccccaggatggtggccgctgacaaccaggacaccagcaacctgccccagctggccgtgcctgccccccgggtgagccacaggatgcagccccggggcagcttctacagcatggtgcccaatgccaccatccaccaggacccccagagcatctttgtgaccaaccctgtgaccctgaccccaccccagggccccccagctgctgtgcagctgagcagcgctgtgaacatcatgaatggcagccagatgcacatcaacccagccaacaagagcctgccccccaccttcggccctgccaccctcttcaaccacttcagcagcctgtttgacagcagccaggtgcctgccaaccagggctggggagatggccccctgagcagccgggtggccacagatgccagcttcaccgtgcagagcgccttcctgggcaacagcgtgctgggccacctggagaacatgcacccagacaacagcaaggcccctggcttccggccccccagccagagggtgtccaccagccctgtgggcctgcccagcattgaccccagcggcagcagccccagcagcagcagcgcccccctggccagcttcagcggcatccctggcaccagggtcttcctgcagggccctgcccctgtgggcacccccagcttcaaccggcagcacttcagcccccacccctggaccagcgccagcaacagcagcaccagcgccccacccaccctgggccagcccaagggcgtgtctgccagccaggacaggaagatccccccacccatcggcacagagcggctggcccgcatccggcagggcggctctgtggcccaggccccagctggcaccagctttgtggcccctgtgggccacagcggcatctggagctttggagtgaatgctgtgtctgagggcctgagcggctggagccagagcgtgatgggcaaccaccccatgcaccagcagctgagtgaccccagcaccttcagccagcaccagcccatggagagagatgacagcggcatggtggcccccagcaacatcttccaccagcccatggccagcggctttgtggacttcagcaagggcctgcccatctccatgtatggaggcaccatcatccccagccacccccagctggctgatgtgcctgggggccccctcttcaacggcctgcacaacccagaccctgcctggaaccccatgatcaaggtgatccagaacagcacagaatgtacagatgcccagcaggccagcctgctgcccagcgtgcctgccctgaagggggagatccccagcccccagctgacccggcccaagaagagaattggccggcccatggtggccagccccaaccagaggcaccaggaccacctgcggcccaaggtgcctgctggggtgcaggagctgacccactgcccagacacccccctgctgccccccagcgacagccggggccacaacagcagcaacagccccagcctgcaggccggcggcgctgagggcgctggggaccggggccgggacaccaggtag

SEQ ID NO: 205144 - DNA, 7854 bp, Artificial Sequence
  derived and/or modified sequence
atgctgaccgacagcggcggcggcggcaccagcttcgaggaggaccttgactcggttgccccccggagcgcaccagcgggggcaagtgagcctccaccccctgggggagtcggtctcgggatccggaccgtacggctgtttggcgaggcaggaccagctagtggcgtggggtcctcaggaggcggcgggtcaggtagcggcacaggggggggagacgctgctttggatttcaaactggccgctgctgtgctaaggacaggcggcggcggcggggcaagcgggtccgacgaggacgaagtcagtgaggtggagagcttcatccttgaccaggaggatctggacaatccagttttaaaaacgacttcggagatctttctcagcagcacagctgaaggggctgatcttcggacagtagatcccgagacacaggccaggctcgaagcgcttctggaagcagccggaatcggcaaactgtcgacagctgatgggaaggccttcgcagatcccgaagtgttacgccgcctgactagctctgtttcttgtgcgctggacgaagccgcggccgcactgactaggatgaaggccgagaactcccataatgccggacaggtggacacacgctccctggccgaagcatgctcggatggggatgtgaacgccgtgcggaagctcctcgacgagggccggtctgtcaacgaacacaccgaggaaggggaatcactcctttgcctggcttgcagtgctgggtactacgaactggctcaggtgctgctggcaatgcatgccaatgtcgaagaccgcggcaacaaaggcgacatcacaccgctgatggcagcgtccagcgggggatacttagacattgtcaaactgcttcttttacatgacgcagacgtgaacagtcagagcgcgacgggaaatactgctttgacctacgcttgtgccggaggtttcgttgacatcgtcaaggttctactcaatgagggcgccaacattgaggatcataatgagaatggccataccccacttatggaagccgcctcagccggtcatgttgaggtggcaagagtactgttagaccatggcgccggaattaacacccactctaatgaatttaaagaaagcgcactgacactggcctgctacaagggtcacctggacatggtgcggtttctgttggaagccggcgccgatcaagaacacaaaacagacgagatgcataccgctctaatggaggcttgcatggacggacacgtggaggttgccaggcttttactggacagtggggcacaggtcaacatgcctgccgactcctttgaaagccccctgacactcgctgcctgcggcgggcatgtcgaactggccgccttgctgattgagcgcggagccaatttagaagaagtgaacgacgaaggttacaccccgcttatggaagctgctagagagggacatgaggaaatggttgccttattgcttgcgcagggtgctaacataaatgctcagacagaggaaacccaggagacagcgctcactctcgcttgttgtgggggtttctcggaagtggcagactttcttattaaagctggcgccgacatcgagcttggctgcagtacacccctgatggaagctagtcaggaaggtcatctcgagctggtgaagtacctcctggccagtggagctaacgtgcacgcaaccacagctacgggagatacggccctcacctacgcctgcgaaaacggccacaccgatgtggctgatgtcctcctacaggcgggcgctgacctggaacacgaaagcgaagggggacgaaccccgctcatgaaagctgcccgagcaggccatctgtgcacagtgcagtttttgatctccaaaggggcaaatgtgaatagggccacagcaaacaacgatcacaccgtggttagcctcgcctgtgcgggaggtcacttggctgtggtggaattgttgctagcacatggggccgatccaacccatcgccttaaggacggaagcacaatgctcattgaggccgccaaaggaggccacaccaatgttgtgagttacctcctggattatcccaacaatgtgctaagcgtgcctactactgatgtgtcccagttacctccaccctcgcaggaccaatcacaggtcccacgagttcccacacatacgctggccatggtggtcccgccgcaagagccggacaggaccagtcaggaaaatagcccagccttgcttggcgttcagaaaggaacatcaaaacagaagagttcaagtctccaggtggccgatcaagacttgttaccttctttccacccttaccagcccctcgaatgcatcgtagaggagacggagggtaagctgaatgaactgggtcagcgaatttctgcgatcgaaaaagcacagctgaaatcattagagttgattcagggcgagcccctgaacaaggacaagattgaggaactgaagaagaatagggaggaacaggtacagaaaaagaaaaagatcctgaaggagttacagaaagtggaaagacaattgcagatgaagacgcagcagcaattcactaaggagtacctggaaacaaagggccaaaaggatacagtttcactgcaccagcaatgctctcaccgcggcgtcttcccggagggagagggcgatgggagcctacctgaggaccatttctccgagcttcctcaggtggatacaatactgtttaaagataacgacgtggacgacgaacaacagagcccacccagcgcagagcagattgactttgtgcccgtgcagcctctctcctctcctcaatgcaacttttccagtgatctggggtcaaatggcacaaacagccttgagctgcagaaggtctcgggcaaccaacagatagttgggcagcctcagattgcaattactggtcatgatcaagggttgcttgttcaggaaccagatggcctcatggtggcaactcccgcccagacactcacggacactctagacgatttgatagccgccgtgtccactagagtaccaaccggaagcaattcaagttcacaaacaactgaatgtttgacacccgagtcctgctcacagaccacctcaaatgtggcatcacagtctatgccccccgtctacccaagcgtggatatcgatgctcataccgaaagcaaccatgacactgccctgacattggcttgcgccggcggtcacgaggaactggtgtcagttctgattgcccgtgacgctaaaatcgagcaccgagacaagaaggggtttacacctctcatactggccgctactgcaggacacgttggggttgtcgagatccttctagacaaagggggggatattgaggcacaatcagagcgaactaaggatacacctctctcccttgcatgtagcggtgggcggcaagaagtggtggacctcctgctcgccagaggcgccaataaggaacatagaaacgtatcagattataccccacttagtctggcagcctccggtggatatgttaacattatcaagatactgttgaacgctggagcagaaatcaattccaggaccggctcaaagctcggcatatcccccttaatgctcgcagccatgaatgggcacgtgccagcagtgaagctgttgttggatatgggtagtgatattaacgcacagatcgagaccaataggaatactgcgctgactttggcttgcttccagggtagagctgaggtggtcagcctcctgcttgatcgcaaagctaacgtggagcatagagccaaaaccggtctgacaccgttgatggaagctgcctcaggaggctacgctgaagtagggcgtgtgttgctcgataaaggggctgacgtcaacgcacccccggtaccttctagccgggacactgccctcactatcgcagcggacaaagggcattacaagttctgtgaactgcttattcatcgtggggctcatatagacgtcaggaataaaaaaggcaatacccccttatggttggcctctaatggagggcattttgacgtcgtgcaactgctggtgcaggcaggagccgacgtcgacgccgccgataacaggaagattacacctttgatgtcggccttccgcaagggccacgtcaaggtggtgcaatacctcgtcaaggaagtgaatcagttcccatccgatatcgagtgtatgagatacattgccaccatcactgataaagaattactgaaaaagtgccatcagtgtgtggagacgatagtaaaagccaaagaccagcaggccgccgaggctaacaagaacgcatccattctgctcaaggaactagacctggagaaatcccgagaggagtcacgtaagcaggcactcgctgccaaacgagaaaagaggaaagaaaaacggaagaaaaaaaaagaggaacagaagaggaagcaggaggaagacgaggagaataagccaaaggagaattccgaactgccagaagatgaggacgaagaagaaaatgatgaagacgtcgagcaggaggttcccatcgaacccccctcagccaccacaactactaccatcggcattagcgcgacgtctgcaacttttacaaacgttttcggtaagaagagggctaacgtggttacaaccccttccaccaataggaagaacaaaaaaaataaaacaaaggagaccccacccaccgctcacttgatccttccggagcagcatatgtctttggcgcagcagaaagctgataagaacaagattaacggggagcctcgagggggcggagccggtggcaactcggacagcgacaatctggacagtacagactgtaatagcgaatcttcatcagggggtaaatctcaggaacttaatttcgttatggatgtcaattcttccaaataccctagccttctgcttcatagccaggaagagaaaacttcaacggcgaccagcaagacgcagacgcgccttgaaggagaggtgaccccaaactcactttccacctcttataagacagtatctctgcccctctctagtcctaatatcaaactgaatcttacttctccgaaacgtgggcagaagagagaagaggggtggaaagaagtcgtcaggcggagtaagaagcttagcgtaccggcttctgtagtctcccgcattatggggcgtggagggtgtaatatcacagccattcaggatgtcacaggagcccacattgatgtggataaacagaaagacaagaatggagagaggatgatcactatcagagggggcacagagtccacaaggtacgccgttcagttaataaatgctttaattcaagacccggcaaaggaattggaagacctgattccaaaaaaccacatcaggacacctgccagtacaaagtctatacacgccaatttcagtagcggggtgggcaccactgccgccagctctaagaatgccttcccgctgggtgctcccactctggtgacgtctcaagccacgacactgagtacgttccagccagcaaacaagctgaacaaaaacgtccccacaaacgttcgctcgtcattccctgtgagcctgcctctggcctaccctcacccccactttgctctcctcgcagctcagacaatgcagcagatcagacacccgaggttgccaatggctcaattcggggggactttttcccccagtcccaatacctgggggccatttccagtgagaccagtcaatccaggaaatactaactcttcaccaaaacataacaacacttctcggttgcctaaccagaacgggacggtgctcccctctgaaagcgctgggctcgctacagcgagctgccctataacagtttcgagcgtcgttgccgcctcccagcagctctgtgtgaccaatacacgtaccccctcctctgtccggaaacagctcttcgcctgcgtaccgaagacgagccctcctgcgacagtcatttctagtgtgacctctacttgttctagcctgccatctgtgtcttccgcccccatcacctccgggcaggcccctaccacgttcctgccagcttccacgtcccaggcgcaactgtcgtctcagaaaatggagagttttagtgcagtgcctcctactaaagagaaggtgagcacccaggatcaaccaatggccaacctttgtaccccaagttctactgccaactcttgctctagcagtgccagcaatacccccggcgcacccgaaacacatccgtcttcaagtccaaccccgacaagcagtaatacacaggaggaggcccagccctcctctgtttcagacctgagccccatgagcatgccattcgcttctaattccgaaccagcccctctgacgctaacttctcccagaatggtggccgccgataaccaggatacaagcaatttaccacagctggctgtgccagcacctcgggtttcacaccgaatgcagcctagggggtctttttattcaatggtccctaacgcaacaattcatcaggatcctcagagcattttcgtgaccaaccctgttacactgactcctccacagggtccccctgctgctgtgcagttgtcttccgcagtaaatataatgaacggttcacaaatgcacattaaccctgccaataaaagccttcctccaaccttcggacctgccaccttgttcaatcacttctccagcctgtttgactcatcccaggtgcccgccaaccagggctggggggacgggcccctgagtagtcgggtggcgactgacgcatcctttacagttcagtccgctttcctggggaacagcgttctcggacatttagagaacatgcacccagacaactcaaaggccccagggtttcggccccccagccaacgcgtgtctacctcacccgtgggcctgccgtccatcgacccaagcggctccagtccgagtagcagcagcgcaccgcttgccagtttcagtgggatccctggaactagggtgtttctgcagggccctgcacccgtgggtacgccttcatttaatcggcagcacttcagcccgcatccttggacctccgctagcaacagcagcacctctgccccccccaccctggggcaacccaagggggtgagtgcgtcacaggatcgcaaaatccctccacctattgggaccgaaagacttgctagaatcaggcaggggggttccgtcgcacaggcacccgccggcacaagttttgtcgcacctgttggccattcaggaatctggagttttggcgtgaacgcggtgagcgaggggttgtctgggtggtcccaatccgtgatgggtaaccatccaatgcaccagcagctgtccgatccctcaactttttcgcagcaccagcccatggagagggatgatagcggtatggtagcccccagcaacatctttcaccagccaatggcctcaggattcgtggacttcagcaagggactgccgatctccatgtacggaggaaccataatccccagtcacccacagttggcagacgtccctggcgggcccctgtttaatggtctacataatcccgatccagcctggaatcccatgatcaaggtgatacaaaacagcaccgagtgtaccgatgcacagcaggccagtttgctgccttctgtgcctgccctgaagggcgaaattccctcaccccagctaaccaggccaaaaaagcgtatcggcagaccaatggtggcaagccccaaccagagacaccaggaccacctgagaccaaaggttcctgccggggtccaggagcttactcactgtcccgacactcctctgcttccaccatccgactcccgggggcacaacagcagcaactcacccagtctgcaggctggcggcgccgaaggagccggcgaccgtgggagagacacgcggtag

SEQ ID NO: 205145 - DNA, 7853 bp, Artificial Sequence
  derived and/or modified sequence
atgctgaccgatagtggcggtggtggtaccagtttcgaggaggacctggattcagtagctccacgctctgcccctgccggtgcatcagagccacctccccctggcggtgtgggattgggaatccggactgttcgattatttggcgaggctggaccggcatccggggtcggctcctctggtgggggaggctcaggaagcggaaccgggggaggagatgcagccctcgatttcaagctggccgctgcggtcttacggaccggcggaggaggtggtgcaagcggaagcgacgaagacgaggtctccgaggtcgaatcttttatccttgatcaggaagatctcgacaatcctgtgctcaagactacttccgaaatctttctgtcctccacagccgagggagccgacctgagaacagtagatcccgagacccaggcacgtctagaggctctgttagaagcagctggaattggcaagttgtccacggccgatggaaaggcctttgccgatcccgaggtgctgaggcgcctgacgagcagcgtatcctgcgccctcgacgaggcagcagcagcactgactcgcatgaaagctgagaactctcacaatgccggacaggtcgacactcgctcgctcgcagaggcctgtagtgacggtgatgtgaatgccgttcgcaagctgctggatgagggcaggagtgtgaatgagcacactgaggagggagagtctttactttgcctcgcctgctcagcaggctactacgagctagctcaggtgttgctcgccatgcacgcaaatgtggaggacagagggaataagggtgacatcactccgctgatggctgcctcaagcgggggatatctggatatagtgaagctgctcctgctgcacgatgccgatgtcaatagtcagagcgccaccggaaatactgccctcacctatgcatgtgcaggcggattcgttgatattgtcaaggtcctgttaaatgaaggtgccaatatcgaggatcataatgaaaatggacacactccactgatggaagccgctagtgccggacatgtagaagtggctcgtgtgctcttagaccatggcgctggcataaacactcattcgaacgaatttaaggaatcagccctgacattggcctgttacaaagggcatttggatatggtccgtttccttttagaggccggagcagatcaggagcataaaaccgacgagatgcacacggccctgatggaagcctgcatggacgggcacgtcgaggtggccaggcttctccttgactcaggagctcaggtgaacatgcccgctgatagttttgagtcgcctctcactctggcagcatgtggcggtcatgttgaactggctgctctgcttatagagagaggtgctaatcttgaggaagtgaatgacgaaggctatacgccgctgatggaggccgctcgggaagggcatgaggaaatggtcgccctacttctggcccagggcgctaacataaatgcgcagactgaggaaactcaagagaccgccctcactctggcatgctgtggcggattctcggaagtggccgatttcttgattaaggcaggcgcagatattgaactagggtgttccactccactgatggaggccagccaagagggacacctggagttagtcaagtaccttctggcatccggcgcaaatgttcatgccaccaccgccactggcgataccgcgctgacgtacgcctgtgaaaacgggcacactgatgtcgccgatgtgttgctgcaggcaggagccgacctcgaacacgagagtgaaggaggtcgcacccctctcatgaaagcggctcgtgcagggcacctgtgtaccgtgcaatttctaatcagcaagggtgccaatgtaaacagggccacggccaataacgaccataccgtcgtcagcctggcgtgtgccggaggccatctcgcagtcgtcgaacttctgctagcacatggggcagatccaactcacaggctgaaagacgggtctaccatgctgatcgaagccgcaaaagggggtcatacaaatgtggtgagctatcttctggactaccccaacaacgtgttgtccgtcccaaccactgatgtgagccagttgcctccaccttcacaggaccagtctcaggttccaagggtacccacccatactttggcaatggtggtgccaccccaggagcctgaccgtacatcccaggaaaattcaccggcactactgggggtccagaaggggacctcaaagcagaaatcctctagtctgcaggtagcggatcaggatcttctgccttccttccacccttaccagccgcttgagtgtattgtggaggaaactgaaggtaaactgaacgaactaggtcagaggatctccgccatagagaaggcgcagctaaagtctctggaattgattcagggtgaaccattaaataaggataagatcgaggagctcaagaagaatagagaagagcaggtccaaaaaaagaagaaaatcctgaaggagttacagaaagtcgagcgacagttacaaatgaagactcagcagcaatttaccaaggagtatctcgagaccaaaggccagaaggataccgtcagcctgcaccagcagtgttcacatcgcggagtgttcccagagggcgagggagacggatctctgcctgaggaccatttttccgagctgcctcaggtcgacacgatcctgtttaaagacaacgatgtggacgatgagcaacagagtccacccagcgcggagcagatcgattttgtgccggtacagcccctttccagcccacagtgcaacttcagctccgatttaggatccaacggcaccaatagccttgaactgcagaaggtgtcaggcaaccaacagatagtggggcaaccacagatagcgattacaggccacgaccaggggctgctggtccaggaaccagacgggttaatggtagctacaccagcacagactttaacagacactctggatgatttaatagcagcagtgagtacaagggtgcctacaggatcaaactcctctagtcagacgacagaatgccttacacccgaaagctgttcccagacaactagtaatgtggcctcccagagcatgccaccggtttacccaagcgttgacattgacgctcatacggagtcgaatcacgatacagccctgacacttgcctgcgccggagggcacgaagagctagtctcagtgctgattgctagagatgccaagattgaacaccgggataaaaagggcttcacacctctgatattggccgcaacggcgggacacgtgggggttgttgagatcctgttggataaaggcggagatatcgaggcccagagtgagcgcacaaaggataccccattgagcctggcttgcagcggtgggagacaagaggttgttgatctgttgctcgccaggggggcaaacaaagagcaccgaaatgtgagcgattacacccccctgagtctcgctgcttccgggggatatgtgaacatcataaagattttactgaacgccggagccgagattaattctcggacaggcagtaagttagggatatcaccactcatgctggctgccatgaacggccatgtgccagcagtaaagctgctcctggatatgggctctgacataaatgcccaaattgaaacaaacagaaacacagccctcaccttagcctgtttccaggggagggctgaagtggtgagcctgttgttggataggaaagctaatgtggaacatagagcaaaaaccggcctaaccccccttatggaggctgcatccgggggatatgctgaggtgggacgagtccttctcgacaagggtgctgatgttaatgcgccaccggtaccttcatccagggataccgctctcaccattgcagctgacaaaggacattataaattctgcgagctcctgatacacagaggcgcacacatagatgtcaggaacaaaaaaggcaatactcccctctggctagccagcaacgggggtcatttcgatgtggttcagttgctggtgcaggcgggtgctgatgtagatgcggcagataatagaaagatcaccccgctcatgagtgcctttcgcaaggggcacgtgaaggtcgttcagtatctcgtcaaagaggtgaaccagtttcccagcgacatcgaatgtatgcgttatattgctaccattactgataaagagttgctgaagaaatgtcaccagtgtgttgagactattgtcaaagcaaaggaccaacaagccgctgaggccaataagaacgcatccatcttattgaaagaattggatttggagaagtcacgcgaagagtcgcgtaagcaagcccttgccgcaaaaagggaaaagagaaaggagaagaggaaaaaaaagaaggaggaacaaaaaagaaagcaggaggaagatgaggagaataaacctaaagaaaacagcgaactccctgaggacgaggatgaggaggagaacgatgaggatgtggaacaggaagtgcctatcgaaccgccatccgccaccaccacaactacgatcgggatcagtgccactagcgcgaccttcaccaatgtatttgggaagaaaagggccaacgtggtgactacaccttccacaaacagaaagaacaaaaaaaataaaactaaggagacccccccaaccgcccacttaatcctcccagaacagcatatgtcactcgctcagcagaaagccgataagaataaaatcaatggagagcctagaggcggtggtgctggcggaaactcagacagcgataatctggacagcactgattgcaattccgagagttcttctggtggaaaatcccaggagctgaattttgtcatggatgtgaactccagcaaataccctagcctgctcctacatagtcaggaggagaagactagtaccgccaccagtaagacacaaacgcgactcgagggggaggtgactcctaacagtctaagtaccagctacaagaccgtgtctttgcccctaagcagcccaaatatcaagctcaatctgacatctcccaagcggggacagaagcgcgaagaaggttggaaggaggtagtgcgtcgttctaaaaagttgagcgtccccgcttccgtggtgtcacggattatgggcagggggggatgcaacatcacggccattcaggatgtcacaggagcccatatcgacgtggacaaacaaaaagacaagaatggtgagagaatgatcacaattcgtggcggaacggagtccaccaggtacgcagtccaactcataaatgctctgatacaagatccagcgaaggaactcgaagatctgattcctaagaatcacattcggacgcctgctagcactaagtctatccatgccaatttctcctccggagtgggcacaaccgcagcgagctctaaaaacgcttttccattgggcgcacccaccctggtgactagccaggccacaacgctctctacgtttcaacctgccaacaagctgaataaaaacgtgcctaccaatgtcagatcttccttccctgttagtttaccgttggcgtacccacacccccacttcgcactgcttgctgcacaaacaatgcaacaaatccggcacccacgtttgcctatggctcagtttgggggtactttcagcccctcccccaatacatgggggcctttcccagtgaggcccgtgaaccccggaaacacaaactcgagtccaaaacacaacaatactagccgcctgcccaatcagaacgggacagtcttaccctcggaaagtgctggtctggctacagcctcttgcccaattacagtatccagcgtagttgctgcttctcaacagttgtgcgtgacaaacacccgaacgccgagttccgtgcgaaaacagctgttcgcttgcgtgcccaagacctcaccacctgctacagtcatttcctcagtgacatctacctgttcctctctgccgagcgtctcaagcgcacccatcaccagcggacaggcaccaacaacctttttacctgcgagcacatcacaggcacagctctctagccaaaaaatggagtcttttagtgcggttccgcctactaaggaaaaagttagtacccaagatcaacccatggccaacctgtgcactcctagttccactgccaattcgtgttcaagtagcgcatcaaataccccgggtgctcccgaaacacatccaagtagctctcctactccaaccagcagcaacacacaagaggaggctcagccgagtagcgtttctgacttatctcccatgtccatgcctttcgcatcaaacagcgaacccgctcctttaacactgacatccccaagaatggtggccgcagacaaccaagacacatctaacctgccacaactcgctgtgcccgctccacgggtctcccatcgcatgcagccacgaggttcattctacagtatggttccaaatgcaactatacaccaggacccccagtctatattcgtgaccaatccagttacactgacccctcctcagggaccccctgccgctgtccagttatctagtgctgtcaatattatgaatggtagccagatgcatatcaatcctgccaacaaaagtttacccccaacgtttggtccagcaaccctattcaatcacttctcttccctgttcgattcttcacaggttcccgcaaaccagggatggggggatggcccattaagttccagggtggctactgacgcatcattcaccgttcagtcagcctttctcggaaactctgtgctggggcatctggaaaacatgcatccagacaattccaaggccccaggctttcgccctccctcccagcgggtgtccactagcccagttggtcttccctctattgatccttccggaagttcgccgtctagcagcagcgctcccctggcaagcttctctgggataccgggaacacgggtcttcctgcaggggccagcaccagtgggaacaccttcatttaatcggcagcatttctcacctcacccatggacttctgcttctaacagctcaacctccgcacctccgaccctcggccagcccaagggagtttctgcctctcaggatcgaaagattccccctcctattggcaccgaaagactcgcacgcattcggcaggggggttccgtcgcccaagcccctgcgggaacctccttcgtggcccctgtcggacactccgggatctggtctttcggtgtgaacgccgtctcagaggggctgagcggttggtcccagtctgtgatgggcaatcatcccatgcatcagcaattgtcagatcccagtaccttctcccagcatcagcccatggagagagatgactctggaatggtcgctccatcaaacatctttcatcagcctatggcatcgggattcgtggacttcagtaaggggctccctattagtatgtatggcggaacaatcatccccagccatcctcagctggctgacgtccccggaggtcccctgtttaatggccttcataaccccgatccagcttggaatccgatgatcaaggtgattcagaactcaacagaatgtaccgatgcccagcaggccagcctcctgcctagtgttcccgctttaaaaggagagataccatctccacagttgacccggcctaaaaagagaattggcagaccaatggttgcaagtcctaatcaacgacatcaggaccaccttcgtcctaaggtacctgctggggttcaagagctcacccactgcccagatacacccctgctccctccatctgactctagaggtcacaactcatccaatagcccatcattacaggctggaggtgccgaaggggctggagacagaggtcgagatactcgata

SEQ ID NO: 205146 - DNA, 8246 bp, Artificial Sequence
  derived and/or modified sequence
gatcagcggcggcggtgaccgcgagtgggtcggcaccgtctccggctccgggtgcgaacaatgctgactgatagcggaggcggcggcacctcctttgaggaggacctggactctgtggctccgcgatccgccccagctggggcctcggagccgcctccgccgggaggggtcggtctggggatccgcaccgtgaggctctttggggaggccgggccagcgtcgggagtcggcagcagcggcggcggcggcagcggcagcggtacgggcggaggggacgcggcgctggatttcaagttggcggctgccgtgctgaggaccgggggtggaggtggtgcctctggcagtgacgaggacgaagtgtccgaggttgaatcatttattttggaccaagaagatctggataacccagtgcttaaaacaacatcagagatattcttatcaagtactgcagaaggagcagacttacgcactgtggatccagagacacaggcacgactagaagcattgctagaagcagcaggaattggcaaattgtcaactgctgatggtaaagcttttgcagatcctgaggtactccggagactgacatcctcagttagttgtgcactggatgaagctgctgctgcactgacacggatgaaagcagaaaacagccacaatgcaggacaagtggacactcgcagtctagcagaagcttgttcagatggggatgttaatgctgttcgtaaattgctagatgaaggcagaagtgtaaatgaacatacagaagaaggagaaagcctgctgtgtttggcttgttcagcagggtattatgaattagcacaagtattgcttgctatgcatgctaatgttgaagatcgagggaataaaggagacataactcccctgatggcagcttccagtggaggttacttagatattgtgaaattattacttcttcatgatgctgatgtcaactcccagtctgcaacaggaaacactgcgctaacttatgcatgtgctggaggatttgttgacattgttaaagtgctccttaatgaaggtgcaaatatagaagatcataatgaaaatggacatactcccttaatggaagcagccagtgcaggtcatgtggaagttgcaagagttcttttagatcatggtgcaggcatcaacactcattctaatgaattcaaagaaagtgctctaacacttgcttgctacaaaggccatttggatatggttcgctttctacttgaagctggtgcagatcaagagcacaaaacagatgagatgcacactgccttaatggaggcctgcatggatggacatgtagaggtggcacgtttgcttttggatagtggtgctcaagtgaacatgcctgcagattcatttgaatctccattgacgctagctgcctgtggaggacatgttgaattggcagctctacttattgaaaggggagcaaatcttgaagaagttaatgatgaaggatacactcccttgatggaagctgcccgggaaggacatgaagaaatggtggcactactcttagcacaaggagcaaatataaatgcccagacagaagaaactcaagaaactgctcttactttggcttgctgtggaggattttctgaagttgcagactttcttattaaggcaggggctgatatagaacttggctgctccacacctctgatggaggcatctcaggagggacacctggaattggttaaatatttgctggcttctggcgctaatgtgcatgctacaacagcaacaggagacacagccttaacctatgcttgtgaaaatggacatacggatgttgcagatgttttacttcaagcaggggctgatttagaacatgaatctgaaggtggaagaacacctttgatgaaagctgcaagagctggtcatttgtgcactgtgcagtttcttattagcaaaggtgccaatgttaacagggctacagccaataatgatcatacagtagtgtcgctggcatgtgcaggaggccacctggcagttgttgagcttctcttggctcatggggctgaccctactcatcgactcaaggatggttcaacaatgctcattgaagctgcaaagggtggccatactaatgtagtttcttatctgttggattatccaaataatgttctgtcagttcccaccacagatgtgtctcagctccctccaccttctcaagatcagtctcaggtgccacgtgtgccaacgcatacacttgccatggttgtacctccccaggaacctgacagaacttcacaggagaactctcctgcccttttaggagtgcaaaaaggtacatccaagcagaagtccagttccctccaggtagcagatcaggacctactgccatcttttcacccataccagcctttggagtgcatagtagaggagactgaaggcaagctgaatgaactgggacaaagaattagtgctattgaaaaagcacagcttaagtcactggagttaattcaaggtgaacctctgaacaaagataagatagaagaacttaaaaagaacagagaagagcaagtccagaagaagaagaaaatattgaaagaactgcagaaagtggaaaggcagttgcagatgaaaacacagcagcaatttaccaaagaatacttggaaaccaaaggtcagaaagacacagtgtctctacaccaacagtgctctcatagaggagtcttcccagaaggggaaggagatggtagtctcccagaggatcacttttcagagttacctcaggttgacacaatcttatttaaagataatgatgttgatgatgagcaacagtctccaccatcggcagaacagattgattttgtcccagtccagcctttatcatctccacagtgtaacttttccagtgacttaggttctaatgggacaaattctcttgaacttcagaaagtatcaggtaatcagcagattgtaggacagcctcagattgctattactggacatgatcaggggctgttagttcaagaaccagatggactaatggttgcaactccagctcagacgcttaccgacactcttgatgacctgatagcagctgtgagtaccagagtgcccactggttccaacagttcttctcagaccacagagtgtcttacacctgaatcctgttcgcagactacaagcaatgtggcttcccaatcgatgcctcctgtgtatccttcagttgacattgatgcacatactgagagcaatcatgacacagcattaacactagcttgtgcaggtggtcatgaagaacttgtatctgtgctcattgcacgggatgccaaaattgaacacagagacaaaaaaggtttcacaccactaatcctggcagcaacagcagggcatgttggagttgttgaaatccttttggataaaggtggagatatagaagcacagtctgaacgaactaaggatactccgctttcattggcatgttctggtggacgtcaggaggtggtagacttgctgctggctcgaggtgcaaataaagaacataggaacgtatctgattatacaccactgagtctagctgcgtctggaggatatgttaatatcattaagattctgcttaatgctggggcagaaattaattcaaggactgggagtaaactaggtatttctcccctgatgttggctgcaatgaatggacatgttcctgcagtaaaattgctgctcgatatgggttcagacattaatgcccaaatagagaccaatcggaacacggctctcaccctggcctgtttccagggccgagcagaagtagtgagtttgcttctggaccgaaaagccaatgttgaacatagggcaaagacgggtcttacccccttgatggaagcagcttctggagggtatgcagaggttggaagagttcttcttgataaaggagcagatgttaatgctccccctgtgccttcctcaagagatactgctttaacaatagcagcagacaaaggtcactacaaattttgtgaactcctgattcataggggagcccacattgatgttcgtaacaaaaagggaaatacgccactttggctggcatccaatggaggtcattttgatgttgtgcagttgctagtgcaagcaggtgctgatgtggatgcagcagataaccggaaaatcacacctcttatgtcagcatttcgcaagggtcatgtaaaagttgttcaatatttggtaaaggaagtaaatcagttcccttctgatatagaatgcatgagatacatagcaacaattacagataaggaactgttgaaaaaatgtcatcaatgtgtcgaaaccattgtgaaggctaaagaccagcaagctgcagaagcaaataagaatgcgagtattcttttaaaggaacttgatctggaaaagtcaagagaagagagcagaaagcaggctcttgctgctaaaagagaaaaaagaaaagaaaagagaaaaaagaaaaaagaggaacagaaaaggaaacaggaagaagatgaagaaaacaaacctaaggagaattcggaactaccagaggatgaagatgaagaggagaatgatgaagatgtggagcaagaagttcccatagaacctcctagtgcaaccaccaccactacgattggaatctctgcaacatctgcaacattcacaaatgtgtttgggaaaaaaagggccaatgtggtgacaactcccagcaccaatcggaaaaataagaagaacaaaacaaaagaaacccctcctacagcacatttaattttaccagaacaacatatgtctttagcccaacaaaaggcagataaaaataaaataaatggagaacctagaggtggtggtgcaggtgggaatagtgattcagataacttggacagcacagactgcaacagtgagagtagcagtggtggtaaaagccaagagttaaattttgtgatggatgtgaattcctctaaatacccctcactgctccttcattcccaagaagaaaagacaagtactgctacttccaaaactcagacacgacttgaaggtgaagtgactcctaattccttgtcaaccagctacaagacagtgtcattgccattaagctctccaaacataaagctgaatctcactagccctaaaaggggtcagaaaagagaagaagggtggaaagaagttgtacgaaggtcaaagaaattgtctgttccagcctcagtggtgtcgaggataatgggaagaggaggatgcaacatcactgcaatacaggatgttactggtgcccatattgatgtggataaacaaaaagataagaatggcgagagaatgatcacaataaggggtggcacagaatcaacaagatatgcagttcaactaatcaatgcactcattcaagatcctgctaaggaactggaagacttgattcctaaaaatcatatcagaacacctgccagcaccaaatcaattcatgctaacttctcatctggagtaggtaccacagcagcttccagtaaaaatgcatttcctttgggtgctccaactcttgtaacttcacaggcaacaacgttatctacgttccagcccgctaataaacttaataagaatgttccaacaaatgtacgttcttctttcccagtttctctacccttagcttatcctcaccctcattttgccctgctggctgctcaaactatgcaacagattcggcatcctcgcttacccatggcccagtttggaggaaccttctcaccttctcctaacacatggggaccattcccagtgagacctgtgaatcctggcaacacaaatagctctccaaagcataataacacaagccgtctacctaaccagaacgggactgttttaccctcagagtctgctggactagctactgccagttgtcctatcactgtctcttctgtagttgctgccagtcagcaactgtgtgtcactaatacccggactccttcatcagtcagaaagcagttgtttgcctgtgtgcctaagacaagtcctccagcaacagtgatttcttctgtgacaagcacttgtagttccctgccttctgtctcctctgcacctatcactagcgggcaagctcccaccacatttctacctgcaagtacttctcaagcacagctttcttcacaaaagatggagtctttctctgctgtgccacccaccaaagagaaagtgtccacacaggaccagcccatggcaaacctatgtaccccatcttcaactgcaaacagttgcagtagctctgccagcaacaccccgggagctccagaaactcacccatccagtagtcccactcctacttccagtaacacacaagaggaggcacagccatccagtgtgtctgatttaagtcctatgtcaatgccttttgcatctaactcagaacctgctccattgactttgacatcacccagaatggttgctgctgataatcaggacaccagtaatttacctcagttagctgtaccagcacctcgagtttctcatcgaatgcagcccagaggttctttttactccatggtaccaaatgcaactattcaccaggatccccagtctatttttgttacgaatccagttactttaacaccacctcaaggcccaccagctgcagtgcagctttcttcagctgtgaacattatgaatggttctcagatgcacataaacccagcaaataagtctttgccacctacatttggcccagccacacttttcaatcacttcagcagtctttttgatagtagtcaggtgccagctaaccagggctggggagatggtccactgtcctcacgagttgctacagatgcctctttcactgttcagtcagcgttcctgggtaactcagtgcttggacacttggaaaacatgcaccctgataactcaaaggcacctggcttcagaccaccttcccagcgagtttctactagtccagttgggttaccatccattgacccatcaggcagctccccatcttcctcttctgctcctctggcaagtttttccggcataccaggaacaagggttttcctgcaagggccagctcctgttgggactcctagtttcaacagacaacatttttctccccatccttggacaagcgcctcaaactcatccacttctgccccaccaacgttgggccaaccaaaaggagtcagtgccagtcaagatcgaaagatacctcccccaattggaacagagagactggcccgaattcggcaaggagggtctgttgcacaagccccggcggggaccagttttgtcgctcccgttggacacagtggaatctggtcatttggtgtcaatgctgtgtcagaaggcttatcaggttggtcgcaatctgtgatggggaaccatccaatgcatcaacaattatcagacccaagcacattctcccaacatcagccaatggagagagatgattctggaatggtagccccctctaacatttttcatcagcctatggcaagtggttttgtggatttttctaaaggtctgccaatttccatgtatggaggcaccataataccctctcatcctcagcttgctgatgttccaggaggccctctgtttaatggacttcacaatccagatcctgcttggaaccctatgataaaagttatccaaaattcaactgaatgcactgatgcccagcaggccagtctgcttccttcagtccctgctctcaaaggggaaatcccatcacctcagctaaccagaccgaagaagagaattggacggccgatggtggcctctcctaaccagaggcaccaggatcatctacgaccgaaagttcctgctggagtgcaagaactcacccattgcccggacacccccctgctgcctccctcagattcccggggtcacaactcctccaacagcccctctctccaagctggaggagctgaaggagcaggagacagaggaagagatacccgatgacgcacaatttgaaatggacatctaatccagtgcagatgacctggcatgtggagttacagagggatccctcatgccactgctgccaccacctcttcctggggcatccaaaggccagctggcctcatctaatctggaagggagtgacttgttagttccaggcctcctttagttctgaggcagctagaccagggataggagtgggcaacttgccaagcccttaactctacttcctcttcagtctgtggtactcctcctaaccctaaaccctctatgctcaggggctggaactggggaatggagtaagtcaccttctgactgcttagtaaacattc

SEQ ID NO: 205147 - DNA, 7854 bp, Artificial Sequence
  derived and/or modified sequence
atgcttaccgattccggagggggcggaacaagcttcgaagaagatttagattcagtcgccccaagatccgcaccagccggtgcttccgagccacccccccctgggggagtcgggttagggatcagaaccgttcgcctcttcggggaagccggtccagcctctggcgtgggatcttctgggggcgggggctcaggttcagggaccggcggcggcgatgcggccttggattttaaattggctgccgcagtgctgcggaccggaggcggtgggggagcctcaggatctgatgaagatgaggtttctgaagttgaaagtttcatcctcgatcaagaagatctggacaacccggtcctcaagacgacttcagaaatattcctgagctcaaccgcagagggggccgacctacgcaccgttgatcctgaaacccaggcgaggctcgaagcactgctggaggctgctgggattggaaaactctccacagccgatggcaaggctttcgctgatccagaggttcttagaagactcactagctcagtgtcatgtgcactggatgaagcagccgccgcgttaacccggatgaaagctgaaaatagccacaatgccgggcaggttgatacaaggtcgctggcggaggcgtgcagtgacggagatgtgaatgctgttcgcaagcttctggatgagggaaggtcagtcaatgaacacacggaagagggcgagagcctgttgtgtctggcttgttctgccggatactatgaattggcgcaggtgttactggcaatgcacgctaatgtggaagacagggggaacaaaggggatatcacacccctgatggctgccagctccggtggatacctggacatcgtgaaactgttgctcctacacgatgccgatgtcaactcgcagagcgccaccggcaataccgccctgacctacgcgtgcgcgggtggatttgtggatattgtgaaggttctgttgaatgaaggagcgaacatagaggatcacaacgagaacggacataccccgctgatggaagctgcttccgctggtcatgttgaggtggctagagtcttactagaccacggagccgggattaacacacatagtaatgaattcaaagagtcagccctgaccctcgcttgctacaaaggacatcttgacatggttcggtttctgctcgaggccggcgccgatcaggaacacaagacggatgaaatgcatactgcacttatggaagcttgcatggatggacatgtcgaagtggcacgccttctgttggactcaggtgctcaggtcaatatgcccgcagattcattcgagtctccgctgactttggctgcctgtggaggtcacgtcgaactggctgcattgctcatagagaggggggccaatctggaggaggtcaacgatgaaggatacacccccctcatggaggcagcacgagaagggcacgaggagatggttgcactcctcctcgcccagggggcaaacatcaatgcccagaccgaagaaactcaggagacagccctcaccctcgcctgctgcggcggtttttccgaggttgcagactttttaatcaaggccggggctgatattgaattagggtgttccacccctctgatggaagcttcacaggagggacacctggaactcgtcaagtacctcctggcatccggagcgaacgtgcatgccacgactgctacgggagatacagcgctcacttacgcatgcgaaaacggtcatacagacgtagcagacgttctgctgcaggctggcgccgatctcgagcacgagtcggaaggtggccggactccactcatgaaggctgcccgcgctggtcatctctgtacagtgcaattcctgataagtaaaggagcaaacgttaatagagccacggccaacaacgatcacacagtagtgtccttggcctgtgcaggagggcatctcgccgtggtcgagctgctactagcgcacggcgccgatccaacacacaggctcaaggatggcagtacaatgttaatagaagcagccaaaggcggacataccaacgtagtgagctacctgctcgactaccctaataacgtgctatctgtccctaccacagacgtcagtcagctgcctcctcccagtcaagaccagagccaagtacctagggtccctacacacacactcgccatggtggtgcccccacaggagccagatagaacgtctcaggaaaattcccctgccctcctgggagtgcagaaggggacctcaaaacagaaatcctccagcttgcaggttgcagaccaggacctcctcccatccttccatccctaccagcccctggagtgcatcgtcgaggagacagaagggaagcttaacgaactgggtcagaggatctctgcgatcgagaaagcccaactaaaatccttggagttgatccagggggagccgctgaacaaggataagatcgaagagcttaaaaaaaaccgcgaagagcaggtacagaagaagaagaagatcttaaaagaactccagaaagtagaacggcaactgcagatgaagacccagcagcagtttaccaaggagtatctcgagaccaaagggcaaaaagacaccgtgagcctgcatcaacagtgcagtcacaggggcgtgttccccgaaggagaaggcgatggcagtcttcccgaagatcatttttcagaactgccacaagtggataccattttgtttaaagacaatgacgtggatgacgagcagcagagcccccccagcgctgagcagattgacttcgtccccgtccagccattgtcctccccacagtgcaacttctcttccgacctggggagcaatggaaccaacagcctcgaattacagaaggtctcaggcaaccagcagatcgtgggacagccacagattgctatcactgggcacgatcaaggcttgctggttcaggagcccgacgggctgatggttgcaacacccgcccagactttgactgatactcttgatgatcttatagctgccgtgtccacgcgggtacctacaggatccaattcgagttcacagactaccgaatgtctgacaccagagtcctgctctcagactactagcaacgtagcgtcacaatcaatgccaccagtctaccccagcgtcgacatcgatgcacatactgagtcaaaccacgacacggcactaaccctagcctgcgcaggcggccatgaggagctggtttccgttttgatagcccgggatgcgaagatcgagcacagagataagaagggcttcacacccctgatcctagctgccacagcaggccatgtgggcgttgtggaaattctcttggacaaaggcggggatattgaggctcagtctgagcgaacaaaagatacgccgctgtctctcgcctgctcaggagggcgccaggaggttgtggacctgctgctcgcaaggggcgccaataaagagcaccggaatgttagtgactacacaccgctcagcctggcagccagcggtggctatgttaacatcatcaaaattctccttaacgctggagccgagattaactctcgaacaggatccaaacttgggatcagtccactgatgctggcagctatgaatggccacgtccctgccgtgaagcttctcctggatatggggagtgatatcaacgcacaaatcgaaaccaatcgcaacaccgccctaacattagcctgcttccagggccgggccgaagtggtatctctcctcctggatcggaaagctaacgttgagcacagagccaagaccggactgaccccgctgatggaagccgcaagtgggggctatgccgaggtggggcgggtgctgctagataaaggcgccgatgtcaacgctccacccgtgccttcaagtcgcgataccgctctcacgattgccgcagataagggccactacaaattttgtgaacttttgattcaccgcggtgcacacattgatgtgagaaataaaaaggggaatacacctctttggctcgcctctaatggaggccacttcgatgtggtgcagcttttggtgcaagccggagcagatgttgatgcggcggacaataggaagattactcccctgatgtctgcgtttcgaaaggggcacgtgaaagtggtgcaatacctcgtgaaggaggtgaatcagttccctagtgacatagagtgtatgcggtatatcgctacaattaccgataaagagctgctgaagaagtgccatcagtgcgtggaaacaattgtcaaagctaaggaccaacaggcagctgaggccaataaaaatgcatccatcttactcaaagagttagaccttgaaaaatcaagagaggaaagccggaagcaagcccttgccgccaagagagagaaacgtaaagagaaaaggaagaaaaagaaggaggagcaaaagcgcaagcaggaggaagatgaagaaaacaaacccaaagagaacagcgaactacctgaggatgaggacgaagaagagaatgatgaagacgttgaacaagaagttccgattgaaccgccatctgccacaaccacgacaacaataggcatctccgcgaccagcgctactttcactaacgtgtttggcaagaagagagcgaacgttgtgactaccccttcgacaaacaggaaaaataaaaaaaataagacaaaagagactccccctaccgcacatctaatcttgccagaacagcatatgtcactggcacaacaaaaagcagacaagaataagatcaacggggagccgagaggagggggggccggaggtaacagcgattccgacaacctggattccaccgactgcaatagcgagtcatctagcggcgggaagagtcaggagctcaatttcgttatggacgtgaactcatcgaaatatcccagtttactacttcacagtcaagaagagaagaccagcaccgccactagcaaaacccagaccagactcgagggagaggttacgccgaacagtctgtcaacctcatacaaaaccgtgagtttgcccctgtccagtcccaatatcaagctgaatttgacatcgccaaagagaggacagaagagggaagagggctggaaggaagttgtgcgccgcagtaaaaaactctccgtgcccgcgtctgtggtctcgcgcatcatgggacgaggggggtgcaatatcacagctatacaggatgtgaccggggctcacattgacgttgacaaacagaaggataagaatggagaacggatgattactattcgcggcggcaccgagtccactagatacgctgtgcagttgatcaatgctctgatccaggaccctgccaaggagttggaagacctgatacctaaaaatcacataagaaccccagcgtccactaaatcaattcatgcaaatttcagtagtggtgtcgggacaacagccgccagctccaaaaacgctttcccccttggagcaccgaccctggtgacaagccaggcaacgaccctgtctacattccagcctgctaacaaactcaacaagaacgtcccaacgaatgtacgctcctctttccctgtgtcattgcctctcgcttacccacacccccacttcgctcttctagctgcccaaaccatgcagcaaataaggcatccgcggcttccaatggctcaatttggaggaacattttcgccctcaccaaatacttggggcccctttcctgtcagacctgtaaaccctggtaacacgaatagctcccccaagcataataatacctcgaggttaccaaatcagaacgggaccgtgttgccctcagaaagcgctggacttgcaacggctagctgtccaatcactgtatccagcgtggttgcggcctctcagcagctatgcgttacgaacaccagaacacccagttctgtgaggaagcagcttttcgcctgtgtgcccaagacaagccctcccgctaccgtcatttcatctgtcacctcaacctgtagctcattacctagcgtatcttccgcccccataactagcggccaagctccaaccacttttctacctgcttcaacctctcaagcccagttaagttcacagaaaatggagtcgttttcggcggttccccccaccaaggagaaggtgtctacgcaggaccagcccatggctaacttatgcaccccttcttctactgcaaactcgtgctcatcatccgcgagcaatacacctggagcacccgaaacgcacccatctagtagtcctaccccaactagtagcaacacgcaggaggaggcgcagccgtctagcgtttcagatctgtcaccaatgagtatgccctttgccagtaactccgaacccgcaccgctgacgcttaccagcccccggatggtggcagctgataatcaagacacatccaacttacctcagctggccgtccccgcaccaagagtgtcacatcgcatgcaacctagagggagtttttactcaatggtgcccaacgccaccatccaccaagatccccaatccatcttcgtgactaaccccgttaccctgactccccctcaaggtcctcccgcagcagtccaactatcgtcggcagttaatattatgaacggatcacagatgcatatcaatccagccaacaagagcctgcctccaactttcggccccgccacactgttcaatcattttagcagcctgtttgattctagtcaggtgcccgcaaaccagggatggggggacggtcctctctcatcccgcgtagccaccgacgccagcttcaccgtgcagtcagcttttcttggtaactctgtgctaggacaccttgagaacatgcaccccgataattcaaaggctccaggatttcggcctccttcacagcgggtctccacgagtcctgtgggactgccaagcatcgacccttctgggtccagccccagtagttcatcggccccactggccagcttctctggcatccctggcacccgagtctttctacagggccctgcacctgtaggaactcccagtttcaacaggcagcactttagtccacatccctggacctcagcctctaactctagtacctctgcccccccaactctgggccagcccaagggcgtctcggccagtcaggatagaaaaatcccaccacctatcggcactgaaagactggctcgcatacggcaggggggaagcgtggctcaggcacccgccggcacatcgtttgtcgcccccgtaggacattctggaatttggagcttcggagtcaacgcggtcagtgaggggctctcaggctggagccagtccgtgatgggcaaccatcccatgcaccaacagttgagcgatccgtccacgttctcccagcaccagcctatggaaagagacgatagcggaatggtcgcacccagtaacatttttcatcagccaatggcatccggattcgtggacttcagtaagggtctgccaatcagcatgtacggcggaaccatcatcccatcacaccctcagctggctgatgtacccggcgggccactttttaatggattgcacaacccagatcccgcctggaatccaatgatcaaggttattcaaaattccaccgagtgcaccgatgctcagcaggctagtcttttgccctcagtgcccgccctgaaaggcgaaatccctagcccccagctgacgagacctaagaagagaattggccgccccatggttgctagcccaaaccagcgccatcaggaccacctgcgccccaaagttcctgcaggcgtccaagaactgactcactgccctgacacccctttactgcctccttcggattcaagggggcataactcctcgaacagcccctcactgcaagcaggtggagcagaaggggcaggggacagagggcgggacactaggtag

SEQ ID NO: 205148 - DNA, 7854 bp, Artificial Sequence
  derived and/or modified sequence
atgctgaccgacagcggcggcggcggcaccagcttcgaggaggacttggactcagtggccccaagatctgcgccggcaggtgcgtctgagccacccccacccggaggggttggactcggaatcaggaccgtgcggttatttggtgaggccggccctgcttccggcgtggggtcatcaggcgggggcggttccgggagcggaacgggtgggggtgacgccgctctggacttcaaattggcggcagctgtactccggaccggcggcgggggaggtgcatccggatctgacgaggacgaggtcagcgaggtcgaaagttttattctggaccaggaagatctggacaaccccgtgcttaagactacgagtgaaatcttcctgtccagcactgcagagggagctgatctccgcaccgtggatccggagacgcaggctcgactcgaggccttgcttgaggctgccgggatcggtaagctgagcacagctgacgggaaagcattcgcagatcctgaggtgctcaggcggctgacctcaagtgtttcttgcgccctggacgaggccgcagccgccctcacccgaatgaaggccgagaattcccataatgccgggcaggtcgacactcgatctctggccgaggcgtgtagcgacggcgatgtgaatgccgttaggaagctactcgatgaggggcggtcggtgaatgagcacacagaagaaggggagagcttgctctgcctcgcctgctcagccggatattatgagttagctcaggtgttgctcgctatgcacgctaatgtcgaggacaggggaaataaaggagatattacaccgctgatggctgcatcaagcggcggatatttggatatcgtgaaactgctcctgctgcatgacgccgacgtcaatagccagagcgccacaggcaacactgcattgacttacgcttgtgcaggaggatttgtggacatcgttaaagtgcttttgaatgagggggcaaacattgaagaccacaacgagaatggtcataccccactcatggaggctgccagcgctggccatgtcgaggtcgcccgcgtgctcttggatcacggggcgggtatcaacacccactctaacgagttcaaggaaagcgcgctaaccctggcctgctataaaggacacttagatatggtacgcttcctcctggaagccggcgccgatcaggagcacaagaccgacgagatgcatacagccttaatggaggcctgcatggatggtcacgttgaagtggccaggctgttattagattccggggctcaggtgaacatgccggccgactccttcgagtctcccctgacactcgcagcttgcggcggtcacgttgaactggcagctctgctcatcgagcggggggcaaatctggaagaggtgaatgacgagggctacacgcccttgatggaggccgctagggaaggacacgaggaaatggtggctctgctgctcgcacagggagccaacattaatgctcagacagaggagactcaggaaacagcccttacgcttgcttgctgcggaggcttctccgaggtagcggactttctcatcaaagccggagccgatatcgaattaggctgttctacacctctgatggaggcctctcaagaggggcacctggaactggtcaagtacctactggccagtggcgccaacgtccacgctacaaccgccacgggggacaccgctctcacatatgcctgcgaaaatggacacaccgacgtagccgatgtgctcctgcaggctggagcggacctggaacatgagagcgaggggggcagaacacccctcatgaaagccgccagggccggccatctgtgcacggttcaattcctcatatcaaaaggtgccaatgtgaaccgcgcgacagcaaacaacgatcacaccgtggtgtccctcgcttgcgccgggggccacctggctgtggtcgagctgttgcttgcacacggcgctgatcccacccacagacttaaagatggcagcactatgctcatcgaggcagccaaaggaggccatactaacgtggtgagctacttgctggactatccgaacaacgttctgagtgtgcctacaaccgacgtttcacagctgcctccacctagtcaggaccagagccaggtgccccgcgtgccgactcataccttggcaatggttgtgccaccacaggagccagaccggacaagccaggaaaactcccccgccctactgggcgtgcagaaaggcacctctaaacagaagtcctcctctttgcaggttgccgatcaggatctgctaccctcatttcatccctatcagcctctggaatgcatcgtggaggagacggagggcaagctcaacgagctgggacaacgaatctccgccatcgaaaaggcacagctgaagagtctggaactcatccagggagaaccgttaaataaagataaaatagaagagttaaaaaaaaaccgtgaggagcaggtgcaaaagaaaaaaaagattctcaaggagttgcagaaggttgaaagacagctgcagatgaagactcagcaacagttcactaaagagtacttggaaacaaaagggcagaaggatacagtatctctgcaccaacaatgctcccaccggggggtctttcccgaaggggaaggcgacggctccctgcctgaggaccactttagcgagctgccacaggttgacacgatcttatttaaagacaatgacgtggacgatgaacagcagtccccaccctcagccgagcagattgatttcgtcccagttcagccgctttcctccccacagtgcaatttctcatctgatctcggatcaaacggaactaactcactggagctgcagaaagttagcggcaaccagcaaattgtcgggcagccacaaatcgccattactggtcacgaccaggggctcctggtacaggagccggacgggctcatggttgccactccagcacagacacttacagacaccctggacgacttaatcgctgcggtctccactcgcgtacctaccggctcgaatagcagttcgcagaccacagaatgtctcactcctgaaagctgtagccaaacgaccagcaacgtggcttctcagtcgatgcctcctgtgtatccttcagtggacattgacgctcatacggaatcaaatcacgacactgcgctgacacttgcctgcgctggtggccatgaggagctggtgagtgtcctaatcgcaagggatgccaaaattgagcatagggataaaaaagggttcacccccctcatattagctgctacggccggccatgtgggggtcgtggaaatactgcttgataaaggcggggacatcgaggctcagagtgagcgcactaaagatacacctttgagccttgcgtgttcaggtggccggcaagaagtcgtcgatctcctgcttgccaggggggccaacaaagaacaccgcaatgtctcagactatacacctctctccctggcggcttctgggggctacgtaaacatcatcaaaatcctccttaatgccggcgcagagattaactctcgcactggtagtaaattaggcatttcgcctctcatgttggctgccatgaacggacacgtccccgccgtgaaacttttgctggacatgggatcagatataaatgcccagattgaaaccaaccgcaatacagctttgaccctcgcttgcttccagggtagagctgaggtggtctccctgctcctggataggaaagccaacgtggagcacagggccaagactgggctgactcccctgatggaggccgccagcggcggttatgccgaggtaggacgggtgctactggacaagggtgctgatgtaaatgcaccgcctgtgccgagttcacgggataccgccttgacaatcgccgccgataagggccactacaaattttgtgaattactgatccaccggggcgctcacatagatgtcagaaacaaaaagggcaatactcccctttggttagctagcaatgggggccacttcgatgtggtgcagttgctcgtgcaggccggggctgatgtagatgccgccgataatcggaagattacgcctttgatgtctgcgttcaggaagggacacgtgaaggtggtacaatacctagtaaaagaggtgaatcagtttcccagtgatattgagtgcatgagatatatcgcgacgatcactgacaaggagctgctgaagaaatgtcaccagtgcgttgagaccattgttaaggctaaggaccagcaagccgccgaggccaataagaacgcatccatcctgttgaaggaattggaccttgaaaaaagtcgggaagaaagccggaaacaggccctggcggccaaaagagagaagagaaaagagaagagaaagaagaaaaaagaggaacagaagagaaagcaggaggaagacgaggaaaacaagcccaaggagaattctgagctgccggaggatgaagatgaggaagagaacgacgaggacgtggagcaggaggtgccaatcgagcctccctccgccactaccaccaccactatcggtataagtgcaaccagtgccacattcaccaacgtcttcggcaaaaaacgggccaatgttgtgactaccccctctaccaacaggaaaaataagaaaaacaagacaaaagagacaccgcccacagcacatcttatcctgccagagcagcatatgagcctggctcagcagaaggcagataagaataaaattaacggagagccccggggtggtggcgcgggtggcaattcagacagtgacaaccttgactctactgattgcaattccgaatcatcttctggaggaaaatcccaggagctgaatttcgtgatggacgtgaacagcagtaagtatcccagcctgctgctccactcacaggaagagaaaacatccaccgccacctccaagactcagactagattggaaggcgaagtcacccctaacagtctctccacctcctacaaaaccgtgtcactccctctgtcaagtcccaatattaaattgaatcttacatccccaaagaggggccaaaagcgggaagagggatggaaagaggtcgtgaggagaagcaagaagttgtccgtcccagccagcgtggtcagcaggatcatggggcggggtggttgtaacatcacagcgattcaggacgtcactggggcccacattgacgtggacaagcagaaagacaagaacggagaaagaatgatcactattcgaggaggtactgaaagcactcggtacgcggtgcagcttataaacgccttgatccaggacccagcaaaggagctggaagacctgatccccaagaaccacatcaggacccccgcttcgacaaaatctattcacgccaacttttcctccggggttggaaccaccgccgcaagcagtaagaatgcattccctctcggggccccaacactagtcacgagtcaggcaaccaccctgagcacattccagcctgccaacaagctgaacaagaatgtgcctactaacgtccgctcttccttcccagtgtcccttccattggcctatccacacccccacttcgctctcctggctgcacaaaccatgcaacagatcaggcatcctcggctgccgatggcgcagttcggcggaaccttctccccaagccctaatacttgggggcccttccctgtgagaccagtcaatccaggtaatacgaattcgtcccccaagcacaataatacctctcggttgccaaaccagaatggaactgttttaccctccgaaagtgctgggttagcgaccgcctcatgcccaatcacggtctctagcgtagttgctgctagccagcagctgtgtgttaccaatacaaggacaccctccagcgtgcgtaaacaactgttcgcttgcgttcctaagacctccccaccggcaactgtgattagctccgtgacctctacatgttctagcctgccgtcggttagcagcgcccccatcacttcagggcaggcaccaaccacttttctgcccgcctctacttcacaggcgcagctgtcctctcagaagatggagtccttctctgccgttcctcccacaaaagagaaagtctccacacaagaccagcccatggccaacctctgcactccctcttccactgccaactcgtgctcctcaagcgccagcaatacgccgggcgcccctgagacacatcccagcagttcacctacaccaacaagcagcaacactcaggaagaagcccagccaagttcagttagcgatttgtcgcccatgtccatgccgtttgcgtccaattccgagcccgcaccgcttacactcaccagtcctcggatggttgctgctgataatcaagatacgtcaaacctgccacaacttgccgtcccagctcccagagtatctcatcggatgcagccacgcggatccttctactcaatggtcccgaatgctacaatccatcaagacccccagtcaattttcgtgacaaatcccgtgacactgacacctccgcaggggcctcccgcggccgtacagctctcaagtgccgtaaacatcatgaatggtagccaaatgcacattaatcctgccaataaaagtctgccacccaccttcggtccagctactctgttcaatcatttttcaagcctctttgacagctctcaggtcccggctaaccagggctggggagacgggccactctcctctagggtcgctaccgacgccagctttactgtgcagagtgccttcctcggcaactctgtcctaggacacctagagaatatgcatccagacaactctaaggcccccggttttcgcccgccctcgcaaagagtatccacctcgccagtgggattaccgagcatcgaccctagtgggtcatcccctagtagttcttctgcacctcttgcatcattctccgggattcccggtacccgggtattcctgcagggccccgcccccgtcgggactccctccttcaacaggcaacacttcagtcctcatccatggacctctgcaagcaattcctcgacttctgcccctccaactttgggccagcccaaaggtgtgtctgcttcacaggaccgaaagatccctcctcccattggaactgaacgactggccagaatcagacagggcggctcagtcgcccaggcaccggccggcacgtccttcgtagctccggtcggccactcggggatctggagcttcggggtcaacgccgtctccgagggcctgtccggctggagccagtccgtgatgggcaaccaccccatgcaccagcagctatcagatccaagcaccttttctcagcaccagcccatggaacgcgatgacagcggtatggttgcaccatctaatatcttccatcagcctatggcctctggattcgtagacttcagcaaaggtttgcccatttctatgtatggcggaactattattccatcacacccccaactggcagacgtgccggggggaccactgttcaatggtctgcataaccctgatcccgcctggaatcccatgataaaggtgatacaaaactccacagaatgtacggatgcccagcaagcatccctcctcccctcagtccctgctctgaagggagagatcccctcgccccaactgacgaggcccaaaaagaggattggccggcccatggttgcgtcaccaaaccagagacaccaagaccatttgcgccccaaggtgcctgctggagtgcaggagctgacccattgccctgacacgcccctgctgcccccaagcgattcccggggacataatagcagcaacagcccttcattacaggccggcggggccgagggggcgggcgatcgtgggcgcgatacgcgctag

SEQ ID NO: 205149 - DNA, 7569 bp, Artificial Sequence
  derived and/or modified sequence
agtggcgctgctgggacgggggaaaggagacgcttcttcctcttgctgctcttctcgttcccgagatcagcggcggcggtgaccgcgagtgggtcggcaccgtctccggctccgggtgcgaacaatgctgactgatagcggaggcggcggcacctcctttgaggaggacctggactctgtggctccgcgatccgccccagctggggcctcggagccgcctccgccgggaggggtcggtctggggatccgcaccgtgaggctctttggggaggccgggccagcgtcgggagtcggcagcagcggcggcggcggcagcggcagcggtacgggcggaggggacgcggcgctggatttcaagttggcggctgccgtgctgaggaccgggggtggaggtggtgcctctggcagtgacgaggacgaagtgtccgaggttgaatcatttattttggaccaagaagatctggataacccagtgcttaaaacaacatcagagatattcttatcaagtactgcagaaggagcagacttacgcactgtggatccagagacacaggcacgactagaagcattgctagaagcagcaggaattggcaaattgtcaactgctgatggtaaagcttttgcagatcctgaggtactccggagactgacatcctcagttagttgtgcactggatgaagctgctgctgcactgacacggatgaaagcagaaaacagccacaatgcaggacaagtggacactcgcagtctagcagaagcttgttcagatggggatgttaatgctgttcgtaaattgctagatgaaggcagaagtgtaaatgaacatacagaagaaggagaaagcctgctgtgtttggcttgttcagcagggtattatgaattagcacaagtattgcttgctatgcatgctaatgttgaagatcgagggaataaaggagacataactcccctgatggcagcttccagtggaggttacttagatattgtgaaattattacttcttcatgatgctgatgtcaactcccagtctgcaacaggaaacactgcgctaacttatgcatgtgctggaggatttgttgacattgttaaagtgctccttaatgaaggtgcaaatatagaagatcataatgaaaatggacatactcccttaatggaagcagccagtgcaggtcatgtggaagttgcaagagttcttttagatcatggtgcaggcatcaacactcattctaatgaattcaaagaaagtgctctaacacttgcttgctacaaaggccatttggatatggttcgctttctacttgaagctggtgcagatcaagagcacaaaacagatgagatgcacactgccttaatggaggcctgcatggatggacatgtagaggtggcacgtttgcttttggatagtggtgctcaagtgaacatgcctgcagattcatttgaatctccattgacgctagctgcctgtggaggacatgttgaattggcagctctacttattgaaaggggagcaaatcttgaagaagttaatgatgaaggatacactcccttgatggaagctgcccgggaaggacatgaagaaatggtggcactactcttagcacaaggagcaaatataaatgcccagacagaagaaactcaagaaactgctcttactttggcttgctgtggaggattttctgaagttgcagactttcttattaaggcaggggctgatatagaacttggctgctccacacctctgatggaggcatctcaggagggacacctggaattggttaaatatttgctggcttctggcgctaatgtgcatgctacaacagcaacaggagacacagccttaacctatgcttgtgaaaatggacatacggatgttgcagatgttttacttcaagcaggggctgatttagacaagcaggaggacatgaagactattttggagggcatagatccggccaagcatcaggaacatgaatctgaaggtggaagaacacctttgatgaaagctgcaagagctggtcatttgtgcactgtgcagtttcttattagcaaaggtgccaatgttaacagggctacagccaataatgatcatacagtagtgtcgctggcatgtgcaggaggccacctggcagttgttgagcttctcttggctcatggggctgaccctactcatcgactcaaggatggttcaacaatgctcattgaagctgcaaagggtggccatactaatgtagtttcttatctgttggattatccaaataatgttctgtcagttcccaccacagatgtgtctcagctccctccaccttctcaagatcagtctcaggaacctgacagaacttcacaggagaactctcctgcccttttaggagtgcaaaaagctgtgagtaccagagtgcccactggttccaacagttcttctcagaccacagagtgtcttacacctgaatcctgttcgcagactacaagcaatgtggcttcccaatcgatgcctcctgtgtatccttcagttgacattgatgcacatactgagagcaatcatgacacagcattaacactagcttgtgcaggtggtcatgaagaacttgtatctgtgctcattgcacgggatgccaaaattgaacacagagacaaaaaaggtttcacaccactaatcctggcagcaacagcagggcatgttggagttgttgaaatccttttggataaaggtggagatatagaagcacagtctgaacgaactaaggatactccgctttcattggcatgttctggtggacgtcaggaggtggtagacttgctgctggctcgaggtgcaaataaagaacataggaacgtatctgattatacaccactgagtctagctgcgtctggaggatatgttaatatcattaagattctgcttaatgctggggcagaaattaattcaaggactgggagtaaactaggtatttctcccctgatgttggctgcaatgaatggacatgttcctgcagtaaaattgctgctcgatatgggttcagacattaatgcccaaatagagaccaatcggaacacggctctcaccctggcctgtttccagggccgagcagaagtagtgagtttgcttctggaccgaaaagccaatgttgaacatagggcaaagacgggtcttacccccttgatggaagcagcttctggagggtatgcagaggttggaagagttcttcttgataaaggagcagatgttaatgctccccctgtgccttcctcaagagatactgctttaacaatagcagcagacaaaggtcactacaaattttgtgaactcctgattcataggggagcccacattgatgttcgtaacaaaaagggaaatacgccactttggctggcatccaatggaggtcattttgatgttgtgcagttgctagtgcaagcaggtgctgatgtggatgcagcagataaccggaaaatcacacctcttatgtcagcatttcgcaagggtcatgtaaaagttgttcaatatttggtaaaggaagtaaatcagttcccttctgatatagaatgcatgagatacatagcaacaattacagataaggaactgttgaaaaaatgtcatcaatgtgtcgaaaccattgtgaaggctaaagaccagcaagctgcagaagcaaataagaatgcgagtattcttttaaaggaacttgatctggaaaagtcaagagaagagagcagaaagcaggctcttgctgctaaaagagaaaaaagaaaagaaaagagaaaaaagaaaaaagaggaacagaaaaggaaacaggaagaagatgaagaaaacaaacctaaggagaattcggaactaccagaggatgaagatgaagaggagaatgatgaagatgtggagcaagaagttcccatagaacctcctagtgcaaccaccaccactacgattggaatctctgcaacatctgcaacattcacaaatgtgtttgggaaaaaaagggccaatgtggtgacaactcccagcaccaatcggaaaaataagaagaacaaaacaaaagaaacccctcctacagcacatttaattttaccagaacaacatatgtctttagcccaacaaaaggcagataaaaataaaataaatggagaacctagaggtggtggtgcaggtgggaatagtgattcagataacttggacagcacagactgcaacagtgagagtagcagtggtggtaaaagccaagagttaaattttgtgatggatgtgaattcctctaaatacccctcactgctccttcattcccaagaagaaaagacaagtactgctacttccaaaactcagacacgacttgaaggtgaagtgactcctaattccttgtcaaccagctacaagacagtgtcattgccattaagctctccaaacataaagctgaatctcactagccctaaaaggggtcagaaaagagaagaagggtggaaagaagttgtacgaaggtcaaagaaattgtctgttccagcctcagtggtgtcgaggataatgggaagaggaggatgcaacatcactgcaatacaggatgttactggtgcccatattgatgtggataaacaaaaagataagaatggcgagagaatgatcacaataaggggtggcacagaatcaacaagatatgcagttcaactaatcaatgcactcattcaagatcctgctaaggaactggaagacttgattcctaaaaatcatatcagaacacctgccagcaccaaatcaattcatgctaacttctcatctggagtaggtaccacagcagcttccagtaaaaatgcatttcctttgggtgctccaactcttgtaacttcacaggcaacaacgttatctacgttccagcccgctaataaacttaataagaatgttccaacaaatgtacgttcttctttcccagtttctctacccttagcttatcctcaccctcattttgccctgctggctgctcaaactatgcaacagattcggcatcctcgcttacccatggcccagtttggaggaaccttctcaccttctcctaacacatggggaccattcccagtgagacctgtgaatcctggcaacacaaatagctctccaaagcataataacacaagccgtctacctaaccagaacgggactgttttaccctcagagtctgctggactagctactgccagttgtcctatcactgtctcttctgtagttgctgccagtcagcaactgtgtgtcactaatacccggactccttcatcagtcagaaagcagttgtttgcctgtgtgcctaagacaagtcctccagcaacagtgatttcttctgtgacaagcacttgtagttccctgccttctgtctcctctgcacctatcactagcgggcaagctcccaccacatttctacctgcaagtacttctcaagcacagctttcttcacaaaagatggagtctttctctgctgtgccacccaccaaagagaaagtgtccacacaggaccagcccatggcaaacctatgtaccccatcttcaactgcaaacagttgcagtagctctgccagcaacaccccgggagctccagaaactcacccatccagtagtcccactcctacttccagtaacacacaagaggaggcacagccatccagtgtgtctgatttaagtcctatgtcaatgccttttgcatctaactcagaacctgctccattgactttgacatcacccagaatggttgctgctgataatcaggacaccagtaatttacctcagttagctgtaccagcacctcgagtttctcatcgaatgcagcccagaggttctttttactccatggtaccaaatgcaactattcaccaggatccccagtctatttttgttacgaatccagttactttaacaccacctcaaggcccaccagctgcagtgcagctttcttcagctgtgaacattatgaatggttctcagatgcacataaacccagcaaataagtctttgccacctacatttggcccagccacacttttcaatcacttcagcagtctttttgatagtagtcaggtgccagctaaccagggctggggagatggtccactgtcctcacgagttgctacagatgcctctttcactgttcagtcagcgttcctgggtaactcagtgcttggacacttggaaaacatgcaccctgataactcaaaggcacctggcttcagaccaccttcccagcgagtttctactagtccagttgggttaccatccattgacccatcaggcagctccccatcttcctcttctgctcctctggcaagtttttccggcataccaggaacaagggttttcctgcaagggccagctcctgttgggactcctagtttcaacagacaacatttttctccccatccttggacaagcgcctcaaactcatccacttctgccccaccaacgttgggccaaccaaaaggagtcagtgccagtcaagatcgaaagatacctcccccaattggaacagagagactggcccgaattcggcaaggagggtctgttgcacaagccccggcggggaccagttttgtcgctcccgttggacacagtggaatctggtcatttggtgtcaatgctgtgtcagaaggcttatcaggttggtcgcaatctgtgatggggaaccatccaatgcatcaacaattatcagacccaagcacattctcccaacatcagccaatggagagagatgattctggaatggtagccccctctaacatttttcatcagcctatggcaagtggttttgtggatttttctaaaggtctgccaatttccatgtatggaggcaccataataccctctcatcctcagcttgctgatgttccaggaggccctctgtttaatggacttcacaatccagatcctgcttggaaccctatgataaaagttatccaaaattcaactgaatgcactgatgcccagcaggccagtctgcttccttcagtccctgctctcaaaggggaaatcccatcacctcagctaaccagaccgaagaagagaattggacggccgatggtggcctctcctaaccagaggcaccaggatcatctacgaccgaaagttcctgctggagtgcaagaactcacccattgcccggacacccccctgctgcctccctcagattcccggggtcacaactcctccaacagcccctctctccaagctggaggagctgaaggagcaggagacagaggaagagatacccgatgacgcacaatttgaaatggacatctaatccagtgcagatgacctggcatgtggagttacagagggatccctcatgccactgctgccaccacctcttcctggggcatccaaaggccagctggcctcatctaatctggaagggagtgacttgttagttccaggcctcctttagttctgaggcagctagaccagggataggagtgggcaacttgccaagcccttaactctacttcctcttcagtctgtggtactcctcctaaccctaaaccctctatgctcaggggctggaactggggaatggagtaagtcaccttctgactgcttagtaaacattcaaagaaatg

SEQ ID NO: 205150 - DNA, 8370 bp, Artificial Sequence
  derived and/or modified sequence
agtggcgctgctgggacgggggaaaggagacgcttcttcctcttgctgctcttctcgttcccgagatcagcggcggcggtgaccgcgagtgggtcggcaccgtctccggctccgggtgcgaacaatgctgactgatagcggaggcggcggcacctcctttgaggaggacctggactctgtggctccgcgatccgccccagctggggcctcggagccgcctccgccgggaggggtcggtctggggatccgcaccgtgaggctctttggggaggccgggccagcgtcgggagtcggcagcagcggcggcggcggcagcggcagcggtacgggcggaggggacgcggcgctggatttcaagttggcggctgccgtgctgaggaccgggggtggaggtggtgcctctggcagtgacgaggacgaagtgtccgaggttgaatcatttattttggaccaagaagatctggataacccagtgcttaaaacaacatcagagatattcttatcaagtactgcagaaggagcagacttacgcactgtggatccagagacacaggcacgactagaagcattgctagaagcagcaggaattggcaaattgtcaactgctgatggtaaagcttttgcagatcctgaggtactccggagactgacatcctcagttagttgtgcactggatgaagctgctgctgcactgacacggatgaaagcagaaaacagccacaatgcaggacaagtggacactcgcagtctagcagaagcttgttcagatggggatgttaatgctgttcgtaaattgctagatgaaggcagaagtgtaaatgaacatacagaagaaggagaaagcctgctgtgtttggcttgttcagcagggtattatgaattagcacaagtattgcttgctatgcatgctaatgttgaagatcgagggaataaaggagacataactcccctgatggcagcttccagtggaggttacttagatattgtgaaattattacttcttcatgatgctgatgtcaactcccagtctgcaacaggaaacactgcgctaacttatgcatgtgctggaggatttgttgacattgttaaagtgctccttaatgaaggtgcaaatatagaagatcataatgaaaatggacatactcccttaatggaagcagccagtgcaggtcatgtggaagttgcaagagttcttttagatcatggtgcaggcatcaacactcattctaatgaattcaaagaaagtgctctaacacttgcttgctacaaaggccatttggatatggttcgctttctacttgaagctggtgcagatcaagagcacaaaacagatgagatgcacactgccttaatggaggcctgcatggatggacatgtagaggtggcacgtttgcttttggatagtggtgctcaagtgaacatgcctgcagattcatttgaatctccattgacgctagctgcctgtggaggacatgttgaattggcagctctacttattgaaaggggagcaaatcttgaagaagttaatgatgaaggatacactcccttgatggaagctgcccgggaaggacatgaagaaatggtggcactactcttagcacaaggagcaaatataaatgcccagacagaagaaactcaagaaactgctcttactttggcttgctgtggaggattttctgaagttgcagactttcttattaaggcaggggctgatatagaacttggctgctccacacctctgatggaggcatctcaggagggacacctggaattggttaaatatttgctggcttctggcgctaatgtgcatgctacaacagcaacaggagacacagccttaacctatgcttgtgaaaatggacatacggatgttgcagatgttttacttcaagcaggggctgatttagaacatgaatctgaaggtggaagaacacctttgatgaaagctgcaagagctggtcatttgtgcactgtgcagtttcttattagcaaaggtgccaatgttaacagggctacagccaataatgatcatacagtagtgtcgctggcatgtgcaggaggccacctggcagttgttgagcttctcttggctcatggggctgaccctactcatcgactcaaggatggttcaacaatgctcattgaagctgcaaagggtggccatactaatgtagtttcttatctgttggattatccaaataatgttctgtcagttcccaccacagatgtgtctcagctccctccaccttctcaagatcagtctcaggtgccacgtgtgccaacgcatacacttgccatggttgtacctccccaggaacctgacagaacttcacaggagaactctcctgcccttttaggagtgcaaaaaggtacatccaagcagaagtccagttccctccaggtagcagatcaggacctactgccatcttttcacccataccagcctttggagtgcatagtagaggagactgaaggcaagctgaatgaactgggacaaagaattagtgctattgaaaaagcacagcttaagtcactggagttaattcaaggtgaacctctgaacaaagataagatagaagaacttaaaaagaacagagaagagcaagtccagaagaagaagaaaatattgaaagaactgcagaaagtggaaaggcagttgcagatgaaaacacagcagcaatttaccaaagaatacttggaaaccaaaggtcagaaagacacagtgtctctacaccaacagtgctctcatagaggagtcttcccagaaggggaaggagatggtagtctcccagaggatcacttttcagagttacctcaggttgacacaatcttatttaaagataatgatgttgatgatgagcaacagtctccaccatcggcagaacagattgattttgtcccagtccagcctttatcatctccacagtgtaacttttccagtgacttaggttctaatgggacaaattctcttgaacttcagaaagtatcaggtaatcagcagattgtaggacagcctcagattgctattactggacatgatcaggggctgttagttcaagaaccagatggactaatggttgcaactccagctcagacgcttaccgacactcttgatgacctgatagcagctgtgagtaccagagtgcccactggttccaacagttcttctcagaccacagagtgtcttacacctgaatcctgttcgcagactacaagcaatgtggcttcccaatcgatgcctcctgtgtatccttcagttgacattgatgcacatactgagagcaatcatgacacagcattaacactagcttgtgcaggtggtcatgaagaacttgtatctgtgctcattgcacgggatgccaaaattgaacacagagacaaaaaaggtttcacaccactaatcctggcagcaacagcagggcatgttggagttgttgaaatccttttggataaaggtggagatatagaagcacagtctgaacgaactaaggatactccgctttcattggcatgttctggtggacgtcaggaggtggtagacttgctgctggctcgaggtgcaaataaagaacataggaacgtatctgattatacaccactgagtctagctgcgtctggaggatatgttaatatcattaagattctgcttaatgctggggcagaaattaattcaaggactgggagtaaactaggtatttctcccctgatgttggctgcaatgaatggacatgttcctgcagtaaaattgctgctcgatatgggttcagacattaatgcccaaatagagaccaatcggaacacggctctcaccctggcctgtttccagggccgagcagaagtagtgagtttgcttctggaccgaaaagccaatgttgaacatagggcaaagacgggtcttacccccttgatggaagcagcttctggagggtatgcagaggttggaagagttcttcttgataaaggagcagatgttaatgctccccctgtgccttcctcaagagatactgctttaacaatagcagcagacaaaggtcactacaaattttgtgaactcctgattcataggggagcccacattgatgttcgtaacaaaaagggaaatacgccactttggctggcatccaatggaggtcattttgatgttgtgcagttgctagtgcaagcaggtgctgatgtggatgcagcagataaccggaaaatcacacctcttatgtcagcatttcgcaagggtcatgtaaaagttgttcaatatttggtaaaggaagtaaatcagttcccttctgatatagaatgcatgagatacatagcaacaattacagataaggaactgttgaaaaaatgtcatcaatgtgtcgaaaccattgtgaaggctaaagaccagcaagctgcagaagcaaataagaatgcgagtattcttttaaaggaacttgatctggaaaagtcaagagaagagagcagaaagcaggctcttgctgctaaaagagaaaaaagaaaagaaaagagaaaaaagaaaaaagaggaacagaaaaggaaacaggaagaagatgaagaaaacaaacctaaggagaattcggaactaccagaggatgaagatgaagaggagaatgatgaagatgtggagcaagaagttcccatagaacctcctagtgcaaccaccaccactacgattggaatctctgcaacatctgcaacattcacaaatgtgtttgggaaaaaaagggccaatgtggtgacaactcccagcaccaatcggaaaaataagaagaacaaaacaaaagaaacccctcctacagcacatttaattttaccagaacaacatatgtctttagcccaacaaaaggcagataaaaataaaataaatggagaacctagaggtggtggtgcaggtgggaatagtgattcagataacttggacagcacagactgcaacagtgagagtagcagtggtggtaaaagccaagagttaaattttgtgatggatgtgaattcctctaaatacccctcactgctccttcattcccaagaagaaaagacaagtactgctacttccaaaactcagacacgacttgaaggtgaagtgactcctaattccttgtcaaccagctacaagacagtgtcattgccattaagctctccaaacataaagctgaatctcactagccctaaaaggggtcagaaaagagaagaagggtggaaagaagttgtacgaaggtcaaagaaattgtctgttccagcctcagtggtgtcgaggataatgggaagaggaggatgcaacatcactgcaatacaggatgttactggtgcccatattgatgtggataaacaaaaagataagaatggcgagagaatgatcacaataaggggtggcacagaatcaacaagatatgcagttcaactaatcaatgcactcattcaagatcctgctaaggaactggaagacttgattcctaaaaatcatatcagaacacctgccagcaccaaatcaattcatgctaacttctcatctggagtaggtaccacagcagcttccagtaaaaatgcatttcctttgggtgctccaactcttgtaacttcacaggcaacaacgttatctacgttccagcccgctaataaacttaataagaatgttccaacaaatgtacgttcttctttcccagtttctctacccttagcttatcctcaccctcattttgccctgctggctgctcaaactatgcaacagattcggcatcctcgcttacccatggcccagtttggaggaaccttctcaccttctcctaacacatggggaccattcccagtgagacctgtgaatcctggcaacacaaatagctctccaaagcataataacacaagccgtctacctaaccagaacgggactgttttaccctcagagtctgctggactagctactgccagttgtcctatcactgtctcttctgtagttgctgccagtcagcaactgtgtgtcactaatacccggactccttcatcagtcagaaagcagttgtttgcctgtgtgcctaagacaagtcctccagcaacagtgatttcttctgtgacaagcacttgtagttccctgccttctgtctcctctgcacctatcactagcgggcaagctcccaccacatttctacctgcaagtacttctcaagcacagctttcttcacaaaagatggagtctttctctgctgtgccacccaccaaagagaaagtgtccacacaggaccagcccatggcaaacctatgtaccccatcttcaactgcaaacagttgcagtagctctgccagcaacaccccgggagctccagaaactcacccatccagtagtcccactcctacttccagtaacacacaagaggaggcacagccatccagtgtgtctgatttaagtcctatgtcaatgccttttgcatctaactcagaacctgctccattgactttgacatcacccagaatggttgctgctgataatcaggacaccagtaatttacctcagttagctgtaccagcacctcgagtttctcatcgaatgcagcccagaggttctttttactccatggtaccaaatgcaactattcaccaggatccccagtctatttttgttacgaatccagttactttaacaccacctcaaggcccaccagctgcagtgcagctttcttcagctgtgaacattatgaatggttctcagatgcacataaacccagcaaataagtctttgccacctacatttggcccagccacacttttcaatcacttcagcagtctttttgatagtagtcaggtgccagctaaccagggctggggagatggtccactgtcctcacgagttgctacagatgcctctttcactgttcagtcagcgttcctgggtaactcagtgcttggacacttggaaaacatgcaccctgataactcaaaggcacctggcttcagaccaccttcccagcgagtttctactagtccagttgggttaccatccattgacccatcaggcagctccccatcttcctcttctgctcctctggcaagtttttccggcataccaggaacaagggttttcctgcaagggccagctcctgttgggactcctagtttcaacagacaacatttttctccccatccttggacaagcgcctcaaactcatgtgactctcctattccatctgtttcttcgggatcatcttcacctctttcagccacttctgccccaccaacgttgggccaaccaaaaggagtcagtgccagtcaagatcgaaagatacctcccccaattggaacagagagactggcccgaattcggcaaggagggtctgttgcacaagccccggcggggaccagttttgtcgctcccgttggacacagtggaatctggtcatttggtgtcaatgctgtgtcagaaggcttatcaggttggtcgcaatctgtgatggggaaccatccaatgcatcaacaattatcagacccaagcacattctcccaacatcagccaatggagagagatgattctggaatggtagccccctctaacatttttcatcagcctatggcaagtggttttgtggatttttctaaaggtctgccaatttccatgtatggaggcaccataataccctctcatcctcagcttgctgatgttccaggaggccctctgtttaatggacttcacaatccagatcctgcttggaaccctatgataaaagttatccaaaattcaactgaatgcactgatgcccagcaggccagtctgcttccttcagtccctgctctcaaaggggaaatcccatcacctcagctaaccagaccgaagaagagaattggacggccgatggtggcctctcctaaccagaggcaccaggatcatctacgaccgaaagttcctgctggagtgcaagaactcacccattgcccggacacccccctgctgcctccctcagattcccggggtcacaactcctccaacagcccctctctccaagctggaggagctgaaggagcaggagacagaggaagagatacccgatgacgcacaatttgaaatggacatctaatccagtgcagatgacctggcatgtggagttacagagggatccctcatgccactgctgccaccacctcttcctggggcatccaaaggccagctggcctcatctaatctggaagggagtgacttgttagttccaggcctcctttagttctgaggcagctagaccagggataggagtgggcaacttgccaagcccttaactctacttcctcttcagtctgtggtactcctcctaaccctaaaccctctatgctcaggggctggaactggggaatggagtaagtcaccttctgactgcttagtaaacattcaaagaaatg

SEQ ID NO: 205151 - DNA, 8319 bp, Artificial Sequence
  derived and/or modified sequence
agtggcgctgctgggacgggggaaaggagacgcttcttcctcttgctgctcttctcgttcccgagatcagcggcggcggtgaccgcgagtgggtcggcaccgtctccggctccgggtgcgaacaatgctgactgatagcggaggcggcggcacctcctttgaggaggacctggactctgtggctccgcgatccgccccagctggggcctcggagccgcctccgccgggaggggtcggtctggggatccgcaccgtgaggctctttggggaggccgggccagcgtcgggagtcggcagcagcggcggcggcggcagcggcagcggtacgggcggaggggacgcggcgctggatttcaagttggcggctgccgtgctgaggaccgggggtggaggtggtgcctctggcagtgacgaggacgaagtgtccgaggttgaatcatttattttggaccaagaagatctggataacccagtgcttaaaacaacatcagagatattcttatcaagtactgcagaaggagcagacttacgcactgtggatccagagacacaggcacgactagaagcattgctagaagcagcaggaattggcaaattgtcaactgctgatggtaaagcttttgcagatcctgaggtactccggagactgacatcctcagttagttgtgcactggatgaagctgctgctgcactgacacggatgaaagcagaaaacagccacaatgcaggacaagtggacactcgcagtctagcagaagcttgttcagatggggatgttaatgctgttcgtaaattgctagatgaaggcagaagtgtaaatgaacatacagaagaaggagaaagcctgctgtgtttggcttgttcagcagggtattatgaattagcacaagtattgcttgctatgcatgctaatgttgaagatcgagggaataaaggagacataactcccctgatggcagcttccagtggaggttacttagatattgtgaaattattacttcttcatgatgctgatgtcaactcccagtctgcaacaggaaacactgcgctaacttatgcatgtgctggaggatttgttgacattgttaaagtgctccttaatgaaggtgcaaatatagaagatcataatgaaaatggacatactcccttaatggaagcagccagtgcaggtcatgtggaagttgcaagagttcttttagatcatggtgcaggcatcaacactcattctaatgaattcaaagaaagtgctctaacacttgcttgctacaaaggccatttggatatggttcgctttctacttgaagctggtgcagatcaagagcacaaaacagatgagatgcacactgccttaatggaggcctgcatggatggacatgtagaggtggcacgtttgcttttggatagtggtgctcaagtgaacatgcctgcagattcatttgaatctccattgacgctagctgcctgtggaggacatgttgaattggcagctctacttattgaaaggggagcaaatcttgaagaagttaatgatgaaggatacactcccttgatggaagctgcccgggaaggacatgaagaaatggtggcactactcttagcacaaggagcaaatataaatgcccagacagaagaaactcaagaaactgctcttactttggcttgctgtggaggattttctgaagttgcagactttcttattaaggcaggggctgatatagaacttggctgctccacacctctgatggaggcatctcaggagggacacctggaattggttaaatatttgctggcttctggcgctaatgtgcatgctacaacagcaacaggagacacagccttaacctatgcttgtgaaaatggacatacggatgttgcagatgttttacttcaagcaggggctgatttagaacatgaatctgaaggtggaagaacacctttgatgaaagctgcaagagctggtcatttgtgcactgtgcagtttcttattagcaaaggtgccaatgttaacagggctacagccaataatgatcatacagtagtgtcgctggcatgtgcaggaggccacctggcagttgttgagcttctcttggctcatggggctgaccctactcatcgactcaaggatggttcaacaatgctcattgaagctgcaaagggtggccatactaatgtagtttcttatctgttggattatccaaataatgttctgtcagttcccaccacagatgtgtctcagctccctccaccttctcaagatcagtctcaggtgccacgtgtgccaacgcatacacttgccatggttgtacctccccaggaacctgacagaacttcacaggagaactctcctgcccttttaggagtgcaaaaaggtacatccaagcagaagtccagttccctccaggtagcagatcaggacctactgccatcttttcacccataccagcctttggagtgcatagtagaggagactgaaggcaagctgaatgaactgggacaaagaattagtgctattgaaaaagcacagcttaagtcactggagttaattcaaggtgaacctctgaacaaagataagatagaagaacttaaaaagaacagagaagagcaagtccagaagaagaagaaaatattgaaagaactgcagaaagtggaaaggcagttgcagatgaaaacacagcagcaatttaccaaagaatacttggaaaccaaaggtcagaaagacacagtgtctctacaccaacagtgctctcatagaggagtcttcccagaaggggaaggagatggtagtctcccagaggatcacttttcagagttacctcaggttgacacaatcttatttaaagataatgatgttgatgatgagcaacagtctccaccatcggcagaacagattgattttgtcccagtccagcctttatcatctccacagtgtaacttttccagtgacttaggttctaatgggacaaattctcttgaacttcagaaagtatcaggtaatcagcagattgtaggacagcctcagattgctattactggacatgatcaggggctgttagttcaagaaccagatggactaatggttgcaactccagctcagacgcttaccgacactcttgatgacctgatagcagctgtgagtaccagagtgcccactggttccaacagttcttctcagaccacagagtgtcttacacctgaatcctgttcgcagactacaagcaatgtggcttcccaatcgatgcctcctgtgtatccttcagttgacattgatgcacatactgagagcaatcatgacacagcattaacactagcttgtgcaggtggtcatgaagaacttgtatctgtgctcattgcacgggatgccaaaattgaacacagagacaaaaaaggtttcacaccactaatcctggcagcaacagcagggcatgttggagttgttgaaatccttttggataaaggtggagatatagaagcacagtctgaacgaactaaggatactccgctttcattggcatgttctggtggacgtcaggaggtggtagacttgctgctggctcgaggtgcaaataaagaacataggaacgtatctgattatacaccactgagtctagctgcgtctggaggatatgttaatatcattaagattctgcttaatgctggggcagaaattaattcaaggactgggagtaaactaggtatttctcccctgatgttggctgcaatgaatggacatgttcctgcagtaaaattgctgctcgatatgggttcagacattaatgcccaaatagagaccaatcggaacacggctctcaccctggcctgtttccagggccgagcagaagtagtgagtttgcttctggaccgaaaagccaatgttgaacatagggcaaagacgggtcttacccccttgatggaagcagcttctggagggtatgcagaggttggaagagttcttcttgataaaggagcagatgttaatgctccccctgtgccttcctcaagagatactgctttaacaatagcagcagacaaaggtcactacaaattttgtgaactcctgattcataggggagcccacattgatgttcgtaacaaaaagggaaatacgccactttggctggcatccaatggaggtcattttgatgttgtgcagttgctagtgcaagcaggtgctgatgtggatgcagcagataaccggaaaatcacacctcttatgtcagcatttcgcaagggtcatgtaaaagttgttcaatatttggtaaaggaagtaaatcagttcccttctgatatagaatgcatgagatacatagcaacaattacagataaggaactgttgaaaaaatgtcatcaatgtgtcgaaaccattgtgaaggctaaagaccagcaagctgcagaagcaaataagaatgcgagtattcttttaaaggaacttgatctggaaaagtcaagagaagagagcagaaagcaggctcttgctgctaaaagagaaaaaagaaaagaaaagagaaaaaagaaaaaagaggaacagaaaaggaaacaggaagaagatgaagaaaacaaacctaaggagaattcggaactaccagaggatgaagatgaagaggagaatgatgaagatgtggagcaagaagttcccatagaacctcctagtgcaaccaccaccactacgattggaatctctgcaacatctgcaacattcacaaatgtgtttgggaaaaaaagggccaatgtggtgacaactcccagcaccaatcggaaaaataagaagaacaaaacaaaagaaacccctcctacagcacatttaattttaccagaacaacatatgtctttagcccaacaaaaggcagataaaaataaaataaatggagaacctagaggtggtggtgcaggtgggaatagtgattcagataacttggacagcacagactgcaacagtgagagtagcagtggtggtaaaagccaagagttaaattttgtgatggatgtgaattcctctaaatacccctcactgctccttcattcccaagaagaaaagacaagtactgctacttccaaaactcagacacgacttgaaggtgaagtgactcctaattccttgtcaaccagctacaagacagtgtcattgccattaagctctccaaacataaagctgaatctcactagccctaaaaggggtcagaaaagagaagaagggtggaaagaagttgtacgaaggtcaaagaaattgtctgttccagcctcagtggtgtcgaggataatgggaagaggaggatgcaacatcactgcaatacaggatgttactggtgcccatattgatgtggataaacaaaaagataagaatggcgagagaatgatcacaataaggggtggcacagaatcaacaagatatgcagttcaactaatcaatgcactcattcaagatcctgctaaggaactggaagacttgattcctaaaaatcatatcagaacacctgccagcaccaaatcaattcatgctaacttctcatctggagtaggtaccacagcagcttccagtaaaaatgcatttcctttgggtgctccaactcttgtaacttcacaggcaacaacgttatctacgttccagcccgctaataaacttaataagaatgttccaacaaatgtacgttcttctttcccagtttctctacccttagcttatcctcaccctcattttgccctgctggctgctcaaactatgcaacagattcggcatcctcgcttacccatggcccagtttggaggaaccttctcaccttctcctaacacatggggaccattcccagtgagacctgtgaatcctggcaacacaaatagctctccaaagcataataacacaagccgtctacctaaccagaacgggactgttttaccctcagagtctgctggactagctactgccagttgtcctatcactgtctcttctgtagttgctgccagtcagcaactgtgtgtcactaatacccggactccttcatcagtcagaaagcagttgtttgcctgtgtgcctaagacaagtcctccagcaacagtgatttcttctgtgacaagcacttgtagttccctgccttctgtctcctctgcacctatcactagcgggcaagctcccaccacatttctacctgcaagtacttctcaagcacagctttcttcacaaaagatggagtctttctctgctgtgccacccaccaaagagaaagtgtccacacaggaccagcccatggcaaacctatgtaccccatcttcaactgcaaacagttgcagtagctctgccagcaacaccccgggagctccagaaactcacccatccagtagtcccactcctacttccagtaacacacaagaggaggcacagccatccagtgtgtctgatttaagtcctatgtcaatgccttttgcatctaactcagaacctgctccattgactttgacatcacccagaatggttgctgctgataatcaggacaccagtaatttacctcagttagctgtaccagcacctcgagtttctcatcgaatgcagcccagaggttctttttactccatggtaccaaatgcaactattcaccaggatccccagtctatttttgttacgaatccagttactttaacaccacctcaaggcccaccagctgcagtgcagctttcttcagctgtgaacattatgaatggttctcagatgcacataaacccagcaaataagtctttgccacctacatttggcccagccacacttttcaatcacttcagcagtctttttgatagtagtcaggtgccagctaaccagggctggggagatggtccactgtcctcacgagttgctacagatgcctctttcactgttcagtcagcgttcctgggtaactcagtgcttggacacttggaaaacatgcaccctgataactcaaaggcacctggcttcagaccaccttcccagcgagtttctactagtccagttgggttaccatccattgacccatcaggcagctccccatcttcctcttctgctcctctggcaagtttttccggcataccaggaacaagggttttcctgcaagggccagctcctgttgggactcctagtttcaacagacaacatttttctccccatccttggacaagcgcctcaaactcatccacttctgccccaccaacgttgggccaaccaaaaggagtcagtgccagtcaagatcgaaagatacctcccccaattggaacagagagactggcccgaattcggcaaggagggtctgttgcacaagccccggcggggaccagttttgtcgctcccgttggacacagtggaatctggtcatttggtgtcaatgctgtgtcagaaggcttatcaggttggtcgcaatctgtgatggggaaccatccaatgcatcaacaattatcagacccaagcacattctcccaacatcagccaatggagagagatgattctggaatggtagccccctctaacatttttcatcagcctatggcaagtggttttgtggatttttctaaaggtctgccaatttccatgtatggaggcaccataataccctctcatcctcagcttgctgatgttccaggaggccctctgtttaatggacttcacaatccagatcctgcttggaaccctatgataaaagttatccaaaattcaactgaatgcactgatgcccagcaggccagtctgcttccttcagtccctgctctcaaaggggaaatcccatcacctcagctaaccagaccgaagaagagaattggacggccgatggtggcctctcctaaccagaggcaccaggatcatctacgaccgaaagttcctgctggagtgcaagaactcacccattgcccggacacccccctgctgcctccctcagattcccggggtcacaactcctccaacagcccctctctccaagctggaggagctgaaggagcaggagacagaggaagagatacccgatgacgcacaatttgaaatggacatctaatccagtgcagatgacctggcatgtggagttacagagggatccctcatgccactgctgccaccacctcttcctggggcatccaaaggccagctggcctcatctaatctggaagggagtgacttgttagttccaggcctcctttagttctgaggcagctagaccagggataggagtgggcaacttgccaagcccttaactctacttcctcttcagtctgtggtactcctcctaaccctaaaccctctatgctcaggggctggaactggggaatggagtaagtcaccttctgactgcttagtaaacattcaaagaaatg

SEQ ID NO: 205152 - DNA, 8376 bp, Artificial Sequence
  derived and/or modified sequence
agtggcgctgctgggacgggggaaaggagacgcttcttcctcttgctgctcttctcgttcccgagatcagcggcggcggtgaccgcgagtgggtcggcaccgtctccggctccgggtgcgaacaatgctgactgatagcggaggcggcggcacctcctttgaggaggacctggactctgtggctccgcgatccgccccagctggggcctcggagccgcctccgccgggaggggtcggtctggggatccgcaccgtgaggctctttggggaggccgggccagcgtcgggagtcggcagcagcggcggcggcggcagcggcagcggtacgggcggaggggacgcggcgctggatttcaagttggcggctgccgtgctgaggaccgggggtggaggtggtgcctctggcagtgacgaggacgaagtgtccgaggttgaatcatttattttggaccaagaagatctggataacccagtgcttaaaacaacatcagagatattcttatcaagtactgcagaaggagcagacttacgcactgtggatccagagacacaggcacgactagaagcattgctagaagcagcaggaattggcaaattgtcaactgctgatggtaaagcttttgcagatcctgaggtactccggagactgacatcctcagttagttgtgcactggatgaagctgctgctgcactgacacggatgaaagcagaaaacagccacaatgcaggacaagtggacactcgcagtctagcagaagcttgttcagatggggatgttaatgctgttcgtaaattgctagatgaaggcagaagtgtaaatgaacatacagaagaaggagaaagcctgctgtgtttggcttgttcagcagggtattatgaattagcacaagtattgcttgctatgcatgctaatgttgaagatcgagggaataaaggagacataactcccctgatggcagcttccagtggaggttacttagatattgtgaaattattacttcttcatgatgctgatgtcaactcccagtctgcaacaggaaacactgcgctaacttatgcatgtgctggaggatttgttgacattgttaaagtgctccttaatgaaggtgcaaatatagaagatcataatgaaaatggacatactcccttaatggaagcagccagtgcaggtcatgtggaagttgcaagagttcttttagatcatggtgcaggcatcaacactcattctaatgaattcaaagaaagtgctctaacacttgcttgctacaaaggccatttggatatggttcgctttctacttgaagctggtgcagatcaagagcacaaaacagatgagatgcacactgccttaatggaggcctgcatggatggacatgtagaggtggcacgtttgcttttggatagtggtgctcaagtgaacatgcctgcagattcatttgaatctccattgacgctagctgcctgtggaggacatgttgaattggcagctctacttattgaaaggggagcaaatcttgaagaagttaatgatgaaggatacactcccttgatggaagctgcccgggaaggacatgaagaaatggtggcactactcttagcacaaggagcaaatataaatgcccagacagaagaaactcaagaaactgctcttactttggcttgctgtggaggattttctgaagttgcagactttcttattaaggcaggggctgatatagaacttggctgctccacacctctgatggaggcatctcaggagggacacctggaattggttaaatatttgctggcttctggcgctaatgtgcatgctacaacagcaacaggagacacagccttaacctatgcttgtgaaaatggacatacggatgttgcagatgttttacttcaagcaggggctgatttagacaagcaggaggacatgaagactattttggagggcatagatccggccaagcatcaggaacatgaatctgaaggtggaagaacacctttgatgaaagctgcaagagctggtcatttgtgcactgtgcagtttcttattagcaaaggtgccaatgttaacagggctacagccaataatgatcatacagtagtgtcgctggcatgtgcaggaggccacctggcagttgttgagcttctcttggctcatggggctgaccctactcatcgactcaaggatggttcaacaatgctcattgaagctgcaaagggtggccatactaatgtagtttcttatctgttggattatccaaataatgttctgtcagttcccaccacagatgtgtctcagctccctccaccttctcaagatcagtctcaggtgccacgtgtgccaacgcatacacttgccatggttgtacctccccaggaacctgacagaacttcacaggagaactctcctgcccttttaggagtgcaaaaaggtacatccaagcagaagtccagttccctccaggtagcagatcaggacctactgccatcttttcacccataccagcctttggagtgcatagtagaggagactgaaggcaagctgaatgaactgggacaaagaattagtgctattgaaaaagcacagcttaagtcactggagttaattcaaggtgaacctctgaacaaagataagatagaagaacttaaaaagaacagagaagagcaagtccagaagaagaagaaaatattgaaagaactgcagaaagtggaaaggcagttgcagatgaaaacacagcagcaatttaccaaagaatacttggaaaccaaaggtcagaaagacacagtgtctctacaccaacagtgctctcatagaggagtcttcccagaaggggaaggagatggtagtctcccagaggatcacttttcagagttacctcaggttgacacaatcttatttaaagataatgatgttgatgatgagcaacagtctccaccatcggcagaacagattgattttgtcccagtccagcctttatcatctccacagtgtaacttttccagtgacttaggttctaatgggacaaattctcttgaacttcagaaagtatcaggtaatcagcagattgtaggacagcctcagattgctattactggacatgatcaggggctgttagttcaagaaccagatggactaatggttgcaactccagctcagacgcttaccgacactcttgatgacctgatagcagctgtgagtaccagagtgcccactggttccaacagttcttctcagaccacagagtgtcttacacctgaatcctgttcgcagactacaagcaatgtggcttcccaatcgatgcctcctgtgtatccttcagttgacattgatgcacatactgagagcaatcatgacacagcattaacactagcttgtgcaggtggtcatgaagaacttgtatctgtgctcattgcacgggatgccaaaattgaacacagagacaaaaaaggtttcacaccactaatcctggcagcaacagcagggcatgttggagttgttgaaatccttttggataaaggtggagatatagaagcacagtctgaacgaactaaggatactccgctttcattggcatgttctggtggacgtcaggaggtggtagacttgctgctggctcgaggtgcaaataaagaacataggaacgtatctgattatacaccactgagtctagctgcgtctggaggatatgttaatatcattaagattctgcttaatgctggggcagaaattaattcaaggactgggagtaaactaggtatttctcccctgatgttggctgcaatgaatggacatgttcctgcagtaaaattgctgctcgatatgggttcagacattaatgcccaaatagagaccaatcggaacacggctctcaccctggcctgtttccagggccgagcagaagtagtgagtttgcttctggaccgaaaagccaatgttgaacatagggcaaagacgggtcttacccccttgatggaagcagcttctggagggtatgcagaggttggaagagttcttcttgataaaggagcagatgttaatgctccccctgtgccttcctcaagagatactgctttaacaatagcagcagacaaaggtcactacaaattttgtgaactcctgattcataggggagcccacattgatgttcgtaacaaaaagggaaatacgccactttggctggcatccaatggaggtcattttgatgttgtgcagttgctagtgcaagcaggtgctgatgtggatgcagcagataaccggaaaatcacacctcttatgtcagcatttcgcaagggtcatgtaaaagttgttcaatatttggtaaaggaagtaaatcagttcccttctgatatagaatgcatgagatacatagcaacaattacagataaggaactgttgaaaaaatgtcatcaatgtgtcgaaaccattgtgaaggctaaagaccagcaagctgcagaagcaaataagaatgcgagtattcttttaaaggaacttgatctggaaaagtcaagagaagagagcagaaagcaggctcttgctgctaaaagagaaaaaagaaaagaaaagagaaaaaagaaaaaagaggaacagaaaaggaaacaggaagaagatgaagaaaacaaacctaaggagaattcggaactaccagaggatgaagatgaagaggagaatgatgaagatgtggagcaagaagttcccatagaacctcctagtgcaaccaccaccactacgattggaatctctgcaacatctgcaacattcacaaatgtgtttgggaaaaaaagggccaatgtggtgacaactcccagcaccaatcggaaaaataagaagaacaaaacaaaagaaacccctcctacagcacatttaattttaccagaacaacatatgtctttagcccaacaaaaggcagataaaaataaaataaatggagaacctagaggtggtggtgcaggtgggaatagtgattcagataacttggacagcacagactgcaacagtgagagtagcagtggtggtaaaagccaagagttaaattttgtgatggatgtgaattcctctaaatacccctcactgctccttcattcccaagaagaaaagacaagtactgctacttccaaaactcagacacgacttgaaggtgaagtgactcctaattccttgtcaaccagctacaagacagtgtcattgccattaagctctccaaacataaagctgaatctcactagccctaaaaggggtcagaaaagagaagaagggtggaaagaagttgtacgaaggtcaaagaaattgtctgttccagcctcagtggtgtcgaggataatgggaagaggaggatgcaacatcactgcaatacaggatgttactggtgcccatattgatgtggataaacaaaaagataagaatggcgagagaatgatcacaataaggggtggcacagaatcaacaagatatgcagttcaactaatcaatgcactcattcaagatcctgctaaggaactggaagacttgattcctaaaaatcatatcagaacacctgccagcaccaaatcaattcatgctaacttctcatctggagtaggtaccacagcagcttccagtaaaaatgcatttcctttgggtgctccaactcttgtaacttcacaggcaacaacgttatctacgttccagcccgctaataaacttaataagaatgttccaacaaatgtacgttcttctttcccagtttctctacccttagcttatcctcaccctcattttgccctgctggctgctcaaactatgcaacagattcggcatcctcgcttacccatggcccagtttggaggaaccttctcaccttctcctaacacatggggaccattcccagtgagacctgtgaatcctggcaacacaaatagctctccaaagcataataacacaagccgtctacctaaccagaacgggactgttttaccctcagagtctgctggactagctactgccagttgtcctatcactgtctcttctgtagttgctgccagtcagcaactgtgtgtcactaatacccggactccttcatcagtcagaaagcagttgtttgcctgtgtgcctaagacaagtcctccagcaacagtgatttcttctgtgacaagcacttgtagttccctgccttctgtctcctctgcacctatcactagcgggcaagctcccaccacatttctacctgcaagtacttctcaagcacagctttcttcacaaaagatggagtctttctctgctgtgccacccaccaaagagaaagtgtccacacaggaccagcccatggcaaacctatgtaccccatcttcaactgcaaacagttgcagtagctctgccagcaacaccccgggagctccagaaactcacccatccagtagtcccactcctacttccagtaacacacaagaggaggcacagccatccagtgtgtctgatttaagtcctatgtcaatgccttttgcatctaactcagaacctgctccattgactttgacatcacccagaatggttgctgctgataatcaggacaccagtaatttacctcagttagctgtaccagcacctcgagtttctcatcgaatgcagcccagaggttctttttactccatggtaccaaatgcaactattcaccaggatccccagtctatttttgttacgaatccagttactttaacaccacctcaaggcccaccagctgcagtgcagctttcttcagctgtgaacattatgaatggttctcagatgcacataaacccagcaaataagtctttgccacctacatttggcccagccacacttttcaatcacttcagcagtctttttgatagtagtcaggtgccagctaaccagggctggggagatggtccactgtcctcacgagttgctacagatgcctctttcactgttcagtcagcgttcctgggtaactcagtgcttggacacttggaaaacatgcaccctgataactcaaaggcacctggcttcagaccaccttcccagcgagtttctactagtccagttgggttaccatccattgacccatcaggcagctccccatcttcctcttctgctcctctggcaagtttttccggcataccaggaacaagggttttcctgcaagggccagctcctgttgggactcctagtttcaacagacaacatttttctccccatccttggacaagcgcctcaaactcatccacttctgccccaccaacgttgggccaaccaaaaggagtcagtgccagtcaagatcgaaagatacctcccccaattggaacagagagactggcccgaattcggcaaggagggtctgttgcacaagccccggcggggaccagttttgtcgctcccgttggacacagtggaatctggtcatttggtgtcaatgctgtgtcagaaggcttatcaggttggtcgcaatctgtgatggggaaccatccaatgcatcaacaattatcagacccaagcacattctcccaacatcagccaatggagagagatgattctggaatggtagccccctctaacatttttcatcagcctatggcaagtggttttgtggatttttctaaaggtctgccaatttccatgtatggaggcaccataataccctctcatcctcagcttgctgatgttccaggaggccctctgtttaatggacttcacaatccagatcctgcttggaaccctatgataaaagttatccaaaattcaactgaatgcactgatgcccagcaggccagtctgcttccttcagtccctgctctcaaaggggaaatcccatcacctcagctaaccagaccgaagaagagaattggacggccgatggtggcctctcctaaccagaggcaccaggatcatctacgaccgaaagttcctgctggagtgcaagaactcacccattgcccggacacccccctgctgcctccctcagattcccggggtcacaactcctccaacagcccctctctccaagctggaggagctgaaggagcaggagacagaggaagagatacccgatgacgcacaatttgaaatggacatctaatccagtgcagatgacctggcatgtggagttacagagggatccctcatgccactgctgccaccacctcttcctggggcatccaaaggccagctggcctcatctaatctggaagggagtgacttgttagttccaggcctcctttagttctgaggcagctagaccagggataggagtgggcaacttgccaagcccttaactctacttcctcttcagtctgtggtactcctcctaaccctaaaccctctatgctcaggggctggaactggggaatggagtaagtcaccttctgactgcttagtaaacattcaaagaaatg

SEQ ID NO: 205153 - DNA, 7853 bp, Artificial Sequence
  derived and/or modified sequence
atgctcaccgattcgggcggaggaggcacaagctttgaggaggatctagatagcgtcgcccctcggtccgcccctgctggcgcttcagagcccccacctcctggtggagtcggactgggcatccggaccgtacggctcttcggggaagctgggccagcctcaggtgtggggtcttctgggggaggcggatctggctcggggactggaggaggagacgccgctctggattttaagctcgccgctgccgtgctcagaactggcggagggggtggggctagcgggtccgacgaagacgaagtgtccgaagtggaaagtttcatattggatcaggaggatctggacaaccctgtgcttaagacgacttccgagatctttctgtcttctaccgccgagggagcagacctacgcactgtggatcccgaaactcaggcgcgactggaggctctcctggaagccgctggtataggcaagttaagcactgcagacggaaaggcattcgccgacccggaagtgctgcgcaggctcacttccagtgtctcatgcgcgctggacgaggcagccgctgcattgactaggatgaaggctgagaactcccacaacgccggacaagtcgacacacgctcgctggctgaggcttgttccgatggcgatgtcaatgccgtgaggaaattgctcgacgaaggtaggagtgtgaatgagcacacagaggaaggcgagtcacttctgtgtcttgcctgtagtgctggatactatgagcttgcccaggtgctgctcgccatgcacgcgaatgtggaagatagggggaacaagggtgacatcacaccactcatggccgcaagctcagggggttacctggacattgtgaagctgctcctcctgcacgatgcagatgttaattcccagagcgctaccggtaacactgccctgacctatgcctgcgcagggggatttgtagatattgtgaaggtcctgctgaatgagggtgcaaacattgaagaccataacgagaacggacacaccccccttatggaggccgcatcggccggacatgtggaagtggcccgagtgttactagaccatggagcgggaataaacacccattccaacgaatttaaggagtcagccttgaccctggcatgttataaaggccacttagatatggtcagattcctgctggaggctggagcggaccaagagcataaaacagacgagatgcacactgccctgatggaggcctgtatggacggccacgtggaagtggctcgcttgttgctcgacagcggggctcaagtgaacatgcctgccgacagcttcgagagccccctcacgttggccgcatgtggcggtcacgtggagctcgccgcattgctgattgagagaggagccaatctggaggaggtgaacgatgaaggatatactcccttgatggaagctgcgagggagggtcacgaggaaatggtcgcactgttgctggcacagggtgccaatattaacgctcagaccgaggagacgcaggagacagctctcactctggcatgttgcggtggtttttcagaggtggctgattttctgataaaagcaggtgcggacattgagcttggatgttccacccccttgatggaggcaagccaggaaggacatcttgaacttgtgaagtaccttctcgccagcggtgctaatgtccacgctactaccgcaactggggacacggcattaacctatgcttgcgaaaacgggcatacagatgtggcagatgtattgttgcaggccggagccgacttggaacatgagagcgaagggggaagaaccccattgatgaaggctgcgagagccggtcatctgtgcacggtgcagtttctgatttccaaaggtgctaatgttaatcgagccacagcaaataatgatcatactgtggttagccttgcctgcgccggtggccacttagcagtagtggagctgctgttggcgcatggagccgaccccacacaccggctcaaggacggatcgacaatgctgatagaagccgctaaaggcggacatacgaacgtcgtaagctacctgctggactatcctaataatgtcttgtctgtccctacgacagacgtctcccagctacctcccccatctcaggaccagtcacaggttccaagagtgccaacacatacgctggctatggtcgtccccccacaggagcctgacagaaccagccaggagaactcaccagcccttcttggggtgcagaaagggacaagtaagcagaaatcgtcaagcctgcaggtggcggatcaagacctgttacctagcttccacccctaccagccgttggaatgtatcgtcgaggagacagagggcaaattgaacgaacttggccaaagaatttcagctattgagaaggctcagctcaagagcctcgaactaattcagggtgagccattgaacaaagacaaaattgaggagctcaagaagaacagggaggagcaggtgcagaaaaaaaaaaagatcctcaaagagctccagaaagtggaaagacagctgcagatgaagactcagcagcagtttactaaagaatacttggagaccaagggtcaaaaagacacagtgagcttgcaccaacagtgctcgcatagaggggtcttccctgagggcgaaggtgacggatctctgcctgaggatcacttttccgaactcccacaggttgatacaatactgtttaaagataacgacgttgacgatgagcagcaaagcccacccagtgcggagcagatagattttgtccctgtccagcccttgagctctccccaatgtaacttttccagcgaccttggctccaatgggaccaacagcttggagctgcagaaggtgtcggggaatcagcagatcgttggtcaaccgcagatcgccatcacagggcacgaccagggtctcctggtgcaggagccagatggcctcatggtagcgacccctgcccagaccctgactgacaccctggatgaccttatcgcagctgtgtccactagagtgcccacagggtctaacagttcttctcagactacggagtgtcttacacctgagagctgtagccaaaccacaagtaatgtggcatcacagtctatgccaccagtatatcccagtgttgacattgacgcacacaccgagagcaatcacgataccgccctgaccttagcctgtgctggagggcatgaagagttggttagcgtgctgatagctcgcgacgctaaaatcgagcaccgggataagaaaggcttcacacctctgattctggcagccacggctggacacgtgggggtggttgagatcctgctcgataaaggaggagacattgaagcacagtctgaaagaacaaaggacacacctctgtcacttgcttgctcaggcggaagacaggaagtggttgatcttctactagcacgcggagctaacaaagaacatcgcaacgtttccgattatacgccactgtcccttgcggcttccgggggttatgtgaacatcataaagatcctactaaacgctggggcagagatcaacagccggacgggcagtaaactcggtattagtccactgatgcttgctgccatgaatggccacgttccagccgtcaagctgctgttagacatgggctctgatataaatgcacagattgaaactaacagaaataccgcattgacactcgcttgctttcaaggtagggctgaagtcgtatctctcctcctggacaggaaggccaacgttgagcatagggcaaaaacgggtctcactcccctgatggaggccgcttccgggggttacgcagaagttggacgggtgctcctcgataagggcgcagacgttaatgccccaccagtcccatcctccagggacaccgccctgaccatagccgctgataaggggcattacaagttctgcgagcttcttatccataggggagcacatattgatgtgaggaataagaagggcaatacacctttatggcttgctagcaacggcggacactttgacgtggttcagctgctcgtacaggccggagcagacgtcgatgccgcagacaatcggaagatcacaccactgatgtcagcctttaggaagggtcatgtcaaggtggttcagtatcttgtgaaggaggttaatcaatttccatccgatatcgaatgcatgcgctacatcgcaaccatcactgacaaggaacttctaaaaaagtgccaccagtgtgtggagacaattgtcaaagccaaggatcaacaagccgcagaggcaaataagaatgcaagcatcctcctcaaggaattggatttggagaaaagtagagaggagagccgcaagcaagctttagcagcaaaaagagagaagaggaaagaaaaaagaaaaaaaaagaaggaggaacagaagagaaagcaggaggaagatgaagagaacaagccaaaagaaaattctgaactgcccgaggatgaagacgaggaggaaaacgatgaagacgtggagcaggaagttccaattgagccaccatccgccacgactactaccacaatcggcatttccgcgacatccgccaccttcacaaacgtgtttggcaagaagcgggcaaacgttgttacaaccccctcaaccaataggaaaaataaaaagaacaagacaaaagagacccctccaaccgcacatctgattctccccgagcagcatatgtcactggcgcagcagaaggccgacaaaaataagatcaatggcgagcccagggggggtggtgccggaggcaattcagattcagataacctcgactctaccgattgcaacagcgaatcatcttctggtgggaagagtcaggagctgaatttcgttatggatgtgaatagcagcaaatatccctctctccttctacactcccaggaggagaaaactagtaccgctaccagtaagacacaaactagacttgagggggaggtcacgcccaattccctttcaacttcttacaaaaccgtctctctgccgctgagctctccgaacataaagctgaatctgacatcccccaaacgtggtcagaagcgcgaggaaggatggaaggaagtggtaaggcggagcaagaaactatcggtccccgcatcggtggtcagtcgcattatggggagagggggttgcaacatcacagcgattcaggatgtgaccggggctcacatcgacgtggacaagcaaaaagacaaaaatggcgaaagaatgatcaccataagaggaggcacggagtcaactcggtatgccgtacaactgatcaacgccctcatccaggatcctgctaaagaactggaggacctcatcccaaaaaatcatattcgaactcccgctagcactaagagtatacacgccaatttttcatctggcgtgggcacgacagccgcatccagcaagaatgcattcccgctgggagcccctaccctcgtcacctcacaagccacaactttgtccacatttcagcccgctaacaagttaaataaaaatgtgcctacgaatgtgcggtcctcattccctgtgagcctgccactggcttatccccatccccacttcgcgcttttagccgctcagaccatgcagcaaatccgacaccctcggttacccatggctcaattcggcggtacattttcacccagccctaatacctggggcccatttccagtcaggcctgtgaacccgggaaacactaattcttcccctaagcataataacacctcgcgcttgcccaaccaaaacgggacggtgctcccttcggaatctgcaggactagctacggcttcatgtcctattactgtgtcctcagttgtcgcagcaagtcagcagttgtgtgtcacaaataccaggacaccttcaagcgtaagaaagcagctgtttgcgtgtgtccccaagacctctccccctgcgacggtgatcagttcggtaacgtccacctgctcttccctccccagcgttagctcagcaccgataacttcaggccaggcgcctaccaccttcttgcccgcaagcaccagtcaggcacagctgagttcgcagaaaatggaatctttttccgctgttcccccaacgaaggaaaaggtgtccacgcaggaccagccaatggccaatttgtgcacaccttctagcaccgccaacagctgctcctcctccgcatcaaacacacccggagcacccgagactcacccctcatcatcccctacgccaacatcttctaatacccaggaggaggctcagccgtcatcagtgtcggacttgagccctatgagcatgcccttcgcatcaaacagcgagcccgcacccttgaccctgactagtccgcgaatggtggcagccgataaccaggatacctccaatctgccacaattggccgtaccagcacctagagtatcacacagaatgcagccacgcggatccttttattcgatggtgccaaacgccaccattcaccaagaccctcagtctatttttgttacaaatcccgtgaccttgacaccaccacaagggcctcctgccgcagtgcagctgagctccgccgtgaatattatgaatggctcacagatgcacataaatccagccaacaagtctctgccacccacatttggtccagccactcttttcaatcatttctcgtctttatttgacagctcacaagtgcccgctaaccaggggtggggggacggacctctgagttcaagggtggccactgacgcttcttttactgtgcagagtgcttttctcggcaatagtgtgctgggtcacctcgaaaatatgcatcccgacaattccaaggcccctgggtttcgccctccatctcaacgcgtctccacctctccagtggggctgccttccattgacccttctggttcttctcccagttcctcctctgctcctttagcctccttctctggaattcctggaaccagagtgttcttacaagggcctgcccctgtgggaactcctagttttaatagacagcatttttctccccacccctggacaagcgcctctaacagttcgacctcagctcctccaacgctcgggcagcctaagggggtctccgcttctcaggaccggaaaattccgcctcccattggtacggagaggctggctcgcatacgccagggtggctctgtggctcaggcaccggctggaacctctttcgtggctcctgtgggccacagcggcatctggtcatttggcgttaacgctgtgtccgagggcttgagtgggtggtcacaatcagtgatggggaatcaccccatgcatcagcagctgagtgacccttcaacattcagccagcaccaaccaatggaacgcgatgattcagggatggtggcaccatccaacatctttcatcagcccatggcaagtggatttgtggacttttcaaagggactgcccatttcgatgtacgggggaaccataataccaagccacccccagttggccgacgttccaggcggaccgctgttcaatggactgcataatcctgatcctgcttggaatcccatgatcaaggtgatacagaatagcacagaatgcaccgacgcccaacaggcctctctgctcccatctgtcccagctctgaagggcgaaattccttcccctcagctgactcgccctaagaagcgtattggaagacccatggtcgcatctccgaaccaacgccaccaggatcatctgcgccctaaagtgccagccggtgttcaggagctgactcactgtccagacactccactccttccgccaagtgacagccgcggacacaactcctcaaactccccttctctccaggcaggcggagctgagggcgctggggataggggacgggacacaagata

SEQ ID NO: 205154 - protein, 2113 aa, Artificial Sequence
  derived and/or modified sequence
MTGAGEPRREEPPPQPSAGLRSRESGAPSAGGWERAERGRGAAARPATGPPPRRIGPLYGMWLVTFLLLLDSLHKARPEDVGTSLYFVNDSLQQVTFSSSVGVVVPCPAAGSPSAALRWYLATGDDIYDVPHIRHVHANGTLQLYPFSPSAFNSFIHDNDYFCTAENAAGKIRSPNIRVKAVFREPYTVRVEDQRSMRGNVAVFKCLIPSSVQEYVSVVSWEKDTVSIIPEHRFFITYHGGLYISDVQKEDALSTYRCITKHKYSGETRQSNGARLSVTDPAESIPTILDGFHSQEVWAGHTVELPCTASGYPIPAIRWLKDGRPLPADSRWTKRITGLTISDLRTEDSGTYICEVTNTFGSAEATGILMVIDPLHVTLTPKKLKTGIGSTVILSCALTGSPEFTIRWYRNTELVLPDEAISIRGLSNETLLITSAQKSHSGAYQCFATRKAQTAQDFAIIALEDGTPRIVSSFSEKVVNPGEQFSLMCAAKGAPPPTVTWALDDEPIVRDGSHRTNQYTMSDGTTISHMNVTGPQIRDGGVYRCTARNLVGSAEYQARINVRGPPSIRAMRNITAVAGRDTLINCRVIGYPYYSIKWYKDALLLPDNHRQVVFENGTLKLTDVQKGMDEGEYLCSVLIQPQLSISQSVHVAVKVPPLIQPFEFPPASIGQLLYIPCVVSSGDMPIRITWRKDGQVIISGSGVTIESKEFMSSLQISSVSLKHNGNYTCIASNAAATVSRERQLIVRVPPRFVVQPNNQDGIYGKAGVLNCSVDGYPPPKVMWKHAKGSGNPQQYHPVPLTGRIQILPNSSLLIRHVLEEDIGYYLCQASNGVGTDISKSMFLTVKIPAMITSHPNTTIAIKGHAKELNCTARGERPIIIRWEKGDTVIDPDRVMRYAIATKDNGDEVVSTLKLKPADRGDSVFFSCHAINSYGEDRGLIQLTVQEPPDPPELEIREVKARSMNLRWTQRFDGNSIITGFDIEYKNKSDSWDFKQSTRNISPTINQANIVDLHPASVYSIRMYSFNKIGRSEPSKELTISTEEAAPDGPPMDVTLQPVTSQSIQVTWKAPKKELQNGVIRGYQIGYRENSPGSNGQYSIVEMKATGDSEVYTLDNLKKFAQYGVVVQAFNRAGTGPSSSEINATTLEDVPSQPPENVRALSITSDVAVISWSEPPRSTLNGVLKGYRVIFWSLYVDGEWGEMQNITTTRERVELRGMEKFTNYSVQVLAYTQAGDGVRSSVLYIQTKEDVPGPPAGIKAVPSSASSVVVSWLPPTKPNGVIRKYTIFCSSPGSGQPAPSEYETSPEQLFYRIAHLNRGQQYLLWVAAVTSAGRGNSSEKVTIEPAGKAPAKIISFGGTVTTPWMKDVRLPCNSVGDPAPAVKWTKDSEDSAIPVSMDGHRLIHTNGTLLLRAVKAEDSGYYTCTATNTGGFDTIIVNLLVQVPPDQPRLTVSKTSASSITLTWIPGDNGGSSIRGFVLQYSVDNSEEWKDVFISSSERSFKLDSLKCGTWYKVKLAAKNSVGSGRISEIIEAKTHGREPSFSKDQHLFTHINSTHARLNLQGWNNGGCPITAIVLEYRPKGTWAWQGLRANSSGEVFLTELREATWYELRMRACNSAGCGNETAQFATLDYDGSTIPPIKSAQGEGDDVKKLFTIGCPVILATLGVALLFIVRKKRKEKRLKRLRDAKSLAEMLISKNNRSFDTPVKGPPQGPRLHIDIPRVQLLIEDKEGIKQLGDDKATIPVTDAEFSQAVNPQSFCTGVSLHHPTLIQSTGPLIDMSDIRPGTNPVSRKNVKSAHSTRNRYSSQWTLTKCQASTPARTLTSDWRTVGSQHGVTVTESDSYSASLSQDTDKGRNSMVSTESASSTYEELARAYEHAKLEEQLQHAKFEITECFISDSSSDQMTTGTNENADSMTSMSTPSEPGICRFTASPPKPQDADRGKNVAVPIPHRANKSDYCNLPLYAKSEAFFRKADGREPCPVVPPREASIRNLARTYHTQARHLTLDPASKSLGLPHPGAPAAASTATLPQRTLAMPAPPAGTAPPAPGPTPAEPPTAPSAAPPAPSTEPPRAGGPHTKMGGSRDSLLEMSTSGVGRSQKQGAGAYSKSYTLV

SEQ ID NO: 205155 - DNA, 6342 bp, Artificial Sequence
  derived and/or modified sequence
atgacgggagccggagagcccagaagagaagaacctccaccccagccaagcgctggtctgagatctagagagtctggtgcgccttctgccggcgggtgggagagagccgagcgaggccggggagccgccgccagacccgcgaccggccctccaccgaggcgcattgggcccctttacggcatgtggctcgtgacattcctcctgctgctggactcccttcacaaagctagacctgaggacgtcggtacgtccttgtattttgtcaatgactctctacagcaggtgacatttagtagctcggttggcgtcgtggtgccgtgcccagctgcaggttcaccctccgccgccttgagatggtacctggcaacaggggatgacatatacgacgttcctcatatcagacacgtgcacgctaatggaactcttcaactctatccattcagcccctcagcattcaattcattcatccacgataacgattacttctgcactgccgaaaatgccgcaggaaagatccgctcacccaatattcgggtaaaagctgtctttagggaaccctacactgtcagagtggaggatcaacggtctatgcggggcaatgtggctgtgtttaagtgccttattccatcatcagttcaggaatacgtgagtgtggttagctgggagaaagataccgtgtccattatccccgagcatcgtttttttataacctaccatggtggactttatattagcgacgtgcagaaagaggatgcactgtcaacttacaggtgcatcactaagcataagtactcaggtgaaaccaggcaatctaatggcgcgcgcctcagtgttactgatccagctgagtctatccctacaatcctggatgggttccacagccaagaagtgtgggcaggccatacagtggagctgccctgcacagccagtggctaccctattcccgcgatacggtggttaaaggatgggcggccactgccggcggatagccgttggaccaaaagaataaccgggctcacaatctccgacctgaggacggaagacagtggcacatacatttgtgaggtaacaaacacattcggtagcgcagaggcaacaggtatccttatggttattgaccctctccatgttacactgaccccaaaaaaattaaagaccggtatcggcagtaccgtgatcttgagctgcgccctgacagggagccctgagttcacaatcagatggtacaggaacaccgaactcgtgctgcccgatgaagctattagtatccgaggtctgtctaacgagaccttgttgataacttcagcccagaagagtcacagcggagcctatcaatgctttgccacgcgcaaagcacagactgctcaagactttgctatcatcgcgctggaggatggcacaccgcgcatcgtgtctagcttttctgagaaagtagtgaaccccggtgagcagttcagcctcatgtgcgccgccaaaggagcccccccacctaccgtcacctgggccctggatgacgagccaattgttcgcgacggcagccaccgcactaatcaatatacaatgagcgatggcaccacaatcagccacatgaatgttactggcccacagattcgggatggtggagtctatcgatgtaccgcaagaaacctggtgggatcggccgagtaccaggcacggattaacgtgcgcgggccaccaagcattcgggctatgcgaaacattaccgctgtggcaggtcgggatacactgattaactgccgcgtgatcgggtacccgtactacagcatcaagtggtacaaggatgcactgttgctcccagacaaccatcgccaagtcgtcttcgagaacgggacgcttaagctgaccgacgtccaaaaaggtatggacgagggtgaatacttgtgtagtgtgctgattcagcctcagctgtccatctctcagtctgtccatgtggccgttaaggtccccccgttgatccaaccttttgagtttccccccgcatccatcggccagctgctctacattccttgtgtcgtttccagcggcgacatgccaatcaggataacttggcggaaagacggccaggtgatcattagcgggtccggagtgactatagaatccaaggaatttatgagttccctccaaatcagctcggtttcgctcaagcacaacgggaattacacgtgtatcgcttctaacgctgctgctacggtctctagagagagacagctcatagtacgtgtgcctccccgtttcgtggtacaacccaataaccaagacggcatctacgggaaagccggcgtgctgaactgctccgttgacggataccctcccccaaaggtgatgtggaagcacgccaaggggagcggtaatccccaacagtaccatcccgtcccacttaccggccgaatccagattctgccgaatagctctctgcttatccgccatgtcctggaggaggacattggttattacctgtgccaggcgtccaatggtgtgggtacggacatttccaagtccatgtttctcacagtcaagatcccggccatgataacctcccacccaaataccacaatcgctattaaagggcatgcaaaggagctcaactgtacagcgaggggcgaacgcccaattattataagatgggagaaaggcgatactgtcatcgacccggaccgtgtgatgagatatgccattgccactaaggacaacggggacgaggtggtgtccacactgaaactgaagccggctgaccgaggcgactccgttttcttttcctgccatgctatcaattcctatggggaagacagaggcctgatccagcttaccgtacaagaacctccagatccccccgagctggaaatcagggaagtgaaagcccggagtatgaatcttcggtggactcaacggtttgacggcaattcaatcataacgggctttgatatcgagtataagaataaatccgattcctgggacttcaaacaatctactagaaatatctctcctaccatcaatcaggccaacatcgtggacctccaccctgccagtgtctattcaattcggatgtattccttcaataagataggtagatccgagccttctaaagagcttactatttctacagaggaagcagcgccggacggtccccctatggacgtgaccctccagccggtgacttcccagagtatccaggttacctggaaggccccaaaaaaggaattacaaaacggcgttattagaggttatcaaatagggtaccgagagaactccccaggcagcaacgggcagtattcaatcgttgaaatgaaggccacaggcgactctgaggtgtacactctggataatctgaagaagttcgcgcagtatggggtggtcgtccaagcctttaacagggcgggtaccggaccatcttcctccgaaatcaacgcgactaccctggaggacgtcccctctcaaccgcccgaaaacgtgcgcgcactgagcatcacatcagacgtggctgtcattagctggtccgaaccacctcgttccaccctgaacggggttctgaaaggctacagagtgattttttggtccctgtatgttgatggcgagtggggcgaaatgcagaatattaccacaacacgcgaacgggtcgaactgcggggaatggagaagtttacaaattatagtgtccaggtcctggcctacactcaggctggagatggcgtccgcagttccgtactctatatccaaacaaaagaggacgtccctggtccccccgccgggattaaggctgttccttcctctgctagctctgtggttgtatcttggctcccccctacaaaacccaacggggtcattcgcaaatacacaattttctgctccagccctggctcgggccagcccgccccatccgaatatgaaacgtcgcccgaacagctgttttaccggattgcacatcttaatcgcggacaacagtatctcctttgggttgctgccgtgaccagcgctgggagaggaaatagctctgaaaaagttaccatcgagccagccggtaaggctcctgccaaaattatcagcttcggcggcaccgtcactacaccttggatgaaagacgtgcgactcccttgcaatagcgtcggagatccagcgcccgctgttaagtggaccaaggattccgaggacagcgcaatccccgttagcatggacggccatcggctgatccacacgaatggcaccctgctcctacgggccgttaaagctgaggatagcgggtattacacatgcacagccaccaacaccggtggttttgatactatcatcgtcaacctgctggtgcaggttccacctgatcagcctaggctgacagtgtccaaaacctcagcttccagtattacgttgacttggattcccggcgacaatgggggcagctcaatacgcggctttgtcctccagtacagtgtggacaacagtgaggagtggaaggatgtattcatctctagttctgaacggtcgttcaagttggacagcctgaagtgcggcacctggtataaagtgaaactcgcggccaaaaactccgtcggctcgggcagaatttcagaaatcattgaggccaaaacgcatgggagggaaccttccttcagtaaagatcagcatttattcacccatatcaactccacccatgcgcgcctcaatctccagggttggaataatggcggttgtcccattaccgcaattgtgctggagtacagaccaaaaggcacatgggcgtggcaagggttacgggcaaactccagtggggaagtgtttctaactgagctcagagaggccacttggtacgagctgcgcatgcgggcttgcaatagtgcaggttgcggcaatgaaacagctcagttcgccaccctcgactatgacggcagcactatccctcccatcaagagtgcccaaggtgagggtgatgacgttaaaaagctgtttacaattggttgcccagtcatccttgccactctgggcgtggctctgctgttcatcgtgcgtaaaaaaagaaaggagaaacgcctgaagcggcttagggacgccaagtctctggccgaaatgcttatttcaaagaataaccgctccttcgacacaccagtgaagggcccccctcaaggacctcgtctgcacattgacataccccgggtccaactgctgatagaggataaggagggaatcaagcagttgggagacgataaagctacgatacccgtgaccgacgcggagttctctcaggccgtgaacccacagtcgttttgtaccggagtgtcgctgcaccaccctacgctgatccagagcactgggcctctgatcgacatgtcggatattagacccggcacaaatccggtttcccgtaaaaacgtgaaatccgcacacagcactcggaaccgttacagtagtcagtggactctcaccaagtgtcaggcatccactcctgccaggaccctcacctccgattggcgcacagtggggtcccagcatggcgtgacagtgacagagtccgacagctacagtgcttcactttcccaggataccgacaagggtagaaattcaatggtttctacagaaagcgcgtcttccacttacgaggagctggcaagggcctatgaacacgcaaagctggaggaacagttacagcacgctaagttcgaaatcactgagtgcttcattagtgatagctcttctgaccagatgactacaggcacaaatgagaacgcagatagcatgacaagtatgtcaaccccttctgagcccggtatctgtagatttacagccagcccaccaaagccccaggatgcagatcggggcaagaacgtggcagttcccatcccacacagggccaacaagtcggattactgcaatcttcctttgtacgctaagtccgaagccttctttagaaaggccgatggtcgggagccctgtccagtcgtgcctccaagggaggcttccatccgtaacctggctagaacatatcatactcaagcccggcacttgacactcgatccggcaagtaaaagcctggggctgccccaccctggggccccggctgcagcctcgaccgctacactaccacaacgcactcttgccatgcccgctccacccgctgggaccgcccccccggctcccgggcccacccccgcggagcctcctactgccccctcagctgccccccccgcccccagcaccgagcctcctagagccggtggaccccacacgaagatgggaggaagtagagattctctcctggaaatgtcgacgtccggcgtgggaagaagtcagaagcagggagctggggcgtattcaaaatcttatacactcgtgtag

SEQ ID NO: 205156 - DNA, 6342 bp, Artificial Sequence
  derived and/or modified sequence
atgaccggggccggggagccccggcgggaggagcccccaccccagcccagcgctggcctgcggagccgggagagcggggcccccagcgctgggggctgggagcgggcagagcggggccgcggggctgctgcccggcctgccaccggccccccaccaagaagaattggccccctgtatggcatgtggctggtgaccttcctgctgctgctggacagcctgcacaaggcccggccagaagatgtgggcaccagcctgtactttgtgaatgacagcctgcagcaggtgaccttcagcagctctgtgggcgtggtggtgccctgcccagctgctggcagccccagcgctgccctgcgctggtacctggccactggagatgacatctatgatgtgccccacatcagacatgtgcacgccaacggcaccctgcagctgtaccccttcagccccagcgccttcaacagcttcatccatgacaatgactacttctgcacagcagaaaatgctgctgggaagatccgcagccccaacatccgggtgaaggctgtgttccgggagccctacacagtgcgggtggaggaccagaggtccatgagaggaaatgtggccgtgttcaagtgcctgatccccagctctgtgcaggagtatgtgtctgtggtgtcctgggagaaggacacagtgtccatcatccctgagcaccgcttcttcatcacctaccatggaggcctgtacatcagtgatgtgcagaaggaggatgccctgagcacctaccgctgcatcaccaagcacaagtacagcggggagacccggcagagcaatggagcccggctgtctgtgacagatcctgctgagagcatccccaccatcctggatggcttccacagccaggaggtgtgggccggccacacagtggagctgccctgcacagccagcggctaccccatcccagccatccgctggctgaaggatggccggcccctgcctgctgacagccgctggaccaagaggatcaccggcctgaccatcagtgacctgaggacagaagattctggcacctacatctgtgaggtgaccaacaccttcggcagcgctgaggccaccggcatcctgatggtgattgaccccctgcacgtgaccctgacccccaagaagctgaagacaggcatcggcagcaccgtcatcctgagctgtgccctgaccggcagccctgagttcaccatccgctggtacagaaacacagagctggtgctgcctgatgaggccatcagcatccggggcctgagcaatgagaccctgctgatcaccagcgcccagaagagccacagcggggcctaccagtgctttgccaccaggaaggcccagacagcccaggactttgccatcatcgccctggaggatggcaccccccgcatcgtgtcctccttcagcgagaaggtggtgaaccctggagagcagttcagcctgatgtgtgccgccaagggggcccccccacccaccgtgacctgggccctggatgatgagcccatcgtgagagatggcagccacaggaccaaccagtacaccatgtctgatggcaccaccatcagccacatgaatgtgacaggcccccagatcagagatggaggagtgtaccgctgcacagccaggaacctggtgggcagcgctgagtaccaggcccgcatcaacgtgcggggccccccatccatccgggccatgaggaacatcacagctgtggccggccgggacaccctcatcaactgccgggtgattggctacccctactacagcatcaagtggtacaaggatgccctgctgctgcctgacaaccaccggcaggtggtgtttgaaaatggcaccctgaagctgacagatgtgcagaagggcatggatgaaggagagtacctgtgcagcgtgctgatccagccccagctgagcatcagccagagcgtgcacgtggccgtgaaggtgcccccactcatccagccctttgagttccccccagccagcatcggccagctgctgtacatcccctgtgtggtgtcctctggggacatgcccatccgcatcacctggaggaaggatggccaggtgatcatcagcggcagcggcgtgaccatcgagagcaaggagttcatgagcagcctgcagatcagctctgtgtccctgaagcacaacggcaactacacctgcatcgccagcaatgctgctgccaccgtgtcccgggagcggcagctgattgtgcgggtgcccccaagatttgtggtgcagcccaacaaccaggacggcatctacggcaaggccggcgtgctgaactgcagcgtggatggctaccccccacccaaggtgatgtggaagcacgccaagggcagcggcaacccccagcagtaccaccctgtgcccctgaccggccgcatccagatcctgcccaacagcagcctgctgatccgccacgtgctggaggaggacatcggctactacctgtgccaggccagcaatggagtgggcacagacatcagcaagtccatgttcctgactgtgaagatcccagccatgatcaccagccaccccaacaccaccatcgccatcaagggccacgccaaggagctgaactgcacagcccggggggagcggcccatcatcatccgctgggagaagggggacacagtgattgatcctgacagagtgatgagatatgccatcgccaccaaggacaatggagatgaggtggtgtccaccctgaagctgaagccagctgacagaggagacagcgtcttcttcagctgccacgccatcaacagctatggagaagatcggggcctcatccagctgactgtgcaggagcccccagaccccccagagctggagatccgggaggtgaaggcccgctccatgaacctgcgctggacccagagatttgatggcaacagcatcatcaccggctttgacatcgagtacaagaacaagagtgacagctgggacttcaagcagagcaccaggaacatcagccccaccatcaaccaggccaacatcgtggacctgcacccagcctctgtgtacagcatccgcatgtacagcttcaacaagattggccgctctgagcccagcaaggagctgaccatcagcacagaggaggccgccccagatggcccccccatggatgtgaccctgcagcctgtgaccagccagagcatccaggtgacctggaaggcccccaagaaggagctgcagaatggagtcatccggggctaccagatcggctaccgggagaacagccctggcagcaatggccagtacagcatcgtggagatgaaggccactggagacagcgaggtgtacaccctggacaacctgaagaagtttgcccagtatggagtggtggtgcaggccttcaacagagctggcaccggccccagcagcagcgagatcaatgccaccaccctggaggatgtgcccagccagcccccagaaaatgtgcgggccctgagcatcaccagtgatgtggccgtcatctcctggagcgagccccccaggagcaccctgaatggagtgctgaagggctacagagtcatcttctggagcctgtatgtggatggagagtggggcgagatgcagaacatcaccaccacccgggagcgggtggagctgcggggcatggagaagttcaccaactacagcgtgcaggtgctggcctacacccaggccggagatggagtgcgcagctctgtgctgtacatccagaccaaggaggatgtgcccggccccccagctggcatcaaggctgtgcccagcagcgccagctctgtggtggtgtcctggctgccccccaccaagcccaacggggtcatcaggaagtacaccatcttctgcagcagccctggcagcggccagcctgcccccagtgaatatgagaccagccctgagcagctgttctaccgcatcgcccacctgaacagaggccagcagtacctgctgtgggtggccgctgtgaccagcgctggccggggcaacagcagcgagaaggtgaccatcgagcctgctgggaaggccccagccaagatcatcagctttggaggcaccgtgaccaccccctggatgaaggatgtgcggctgccctgcaacagcgtgggggaccctgccccagctgtgaagtggaccaaggacagcgaggacagcgccatccctgtgtccatggatggccacaggctcatccacaccaacggcaccctgctgctgcgggctgtgaaggccgaggacagcggctactacacctgcacagccaccaacacaggaggctttgacaccatcatcgtgaacctgctggtgcaggtgcccccagaccagccccggctgactgtgtccaagaccagcgccagcagcatcaccctgacctggatccctggggacaatggaggcagcagcatccggggctttgtgctgcagtacagcgtggacaacagcgaggagtggaaggatgtgttcatcagcagcagcgagaggagcttcaagctggacagcctgaagtgtggcacctggtacaaggtgaagctggccgccaagaacagcgtgggcagcggccgcatcagcgagatcatcgaggccaagacccacggccgggagcccagcttcagcaaggaccagcacctgttcacccacatcaacagcacccacgcccggctgaacctgcagggctggaacaatggaggctgccccatcacagccatcgtgctggagtaccggcccaagggcacctgggcctggcagggcctgcgggccaacagcagtggagaggtgttcctgacagagctgcgggaggccacctggtatgagctgaggatgagggcctgcaacagcgctggctgtggaaatgaaacagcccagtttgccaccctggactatgatggcagcaccatcccccccatcaagagcgcccagggcgagggagatgatgtgaagaagctgttcaccatcggctgccctgtgatcctggccaccctgggcgtggccctgctcttcatcgtgaggaagaagaggaaggagaagaggctgaagaggctgagagatgccaagagcctggccgagatgctgatcagcaagaacaacagaagctttgacacccctgtgaagggccccccccagggcccccggctgcacatcgacatcccccgggtgcagctgctgattgaggacaaggagggcatcaagcagctgggagatgacaaggccaccatccctgtgacagatgctgagttcagccaggccgtgaacccccagagcttctgcaccggggtgtccctgcaccaccccaccctcatccagagcacaggccccctgattgacatgtctgacatccggcccggcaccaaccctgtgtccaggaagaatgtgaagagcgcccacagcaccaggaaccgctacagcagccagtggaccctgaccaagtgccaggccagcaccccagcccggaccctgaccagtgactggaggacagtgggcagccagcacggcgtgacagtgacagaaagtgacagctacagcgccagcctgagccaggacacagacaagggcagaaattccatggtgtccacagaaagtgccagcagcacctatgaggagctggcccgggcctatgaacatgccaagctggaggagcagctgcagcacgccaagtttgagatcacagagtgcttcatcagtgacagcagcagtgaccagatgaccaccggcaccaatgaaaatgctgacagcatgacctccatgagcacccccagcgagcccggcatctgccgcttcaccgccagcccccccaagccccaggatgctgaccggggcaagaatgtggccgtgcccatcccccaccgggccaacaagagtgactactgcaacctgcccctgtatgccaagtctgaggccttcttcaggaaggcagatggccgggagccctgccctgtggtgcccccccgggaggccagcatccggaacctggcccggacctaccacacccaggcccggcacctgaccctggaccctgccagcaagagcctgggcctgccccaccctggggccccagctgctgccagcacagccaccctgccccagaggaccctggccatgcctgcccctcctgctggaacagcccccccagcccctggccccaccccagctgagcccccaacagcccccagcgctgcccccccagcccccagcacagagccccccagggctgggggcccccacaccaagatgggcggcagccgggacagcctgctggagatgagcaccagcggcgtgggccgcagccagaagcagggcgctggggcctacagcaagagctacaccctggtgtag

SEQ ID NO: 205157 - DNA, 6342 bp, Artificial Sequence
  derived and/or modified sequence
atgaccggcgccggcgagccccggcgggaggagccccccccccagcctagtgcaggtctaaggagtcgcgagtcaggtgcaccctctgctggcggttgggaaagagctgaacggggcagaggcgccgccgcccggcctgctacaggaccgccacctagaaggataggtcctctgtatggcatgtggctggtcaccttccttctgctgcttgattccctccataaagcgagacccgaagacgtcgggacttcgctatattttgtcaatgacagtcttcagcaggtcacattctcctcttccgtgggggtggtggtcccctgtccggccgcgggatccccttctgccgcgttgcggtggtacctggctactggagacgacatatacgacgtaccccatatccgccatgtgcatgcaaatggcactctccaactgtaccccttttcaccatccgcatttaattcattcattcatgataacgactatttctgcacagccgagaacgctgccgggaagatcaggtctccaaatatccgcgtaaaagctgtgttcagagagccctacactgtgagggtggaggaccaacggtcaatgagaggaaacgtcgctgtgtttaaatgcttgatcccctctagcgtccaggaatacgtgagtgtggtgtcctgggagaaagatacagtgtcaataatccctgagcataggttttttatcacataccacgggggcctttatatctccgatgtgcaaaaagaagacgctctgtcgacctataggtgtataacaaaacacaagtatagtggcgaaacacgccagtccaacggcgctcgccttagtgttacagacccagcagaatctatccccacgattctggacggattccattcacaagaagtgtgggctgggcacaccgtggagcttccctgtaccgctagcggataccctatcccagccattcggtggctgaaggatggaagaccactgcctgccgatagcagatggactaaacggattacggggctcacaatttcggatcttaggaccgaagacagtggtacctacatctgcgaagtgacaaatacatttggttctgcagaagccaccgggattctaatggttatcgaccccctgcacgtaacactgacaccaaaaaaactcaaaactggcattgggagcaccgttattttgtcttgcgcactgaccgggtcaccagagtttacaatccgctggtacagaaatacggaactcgttctccccgacgaggcaatttccatccggggattaagtaacgaaaccctgctcattaccagcgcccagaaaagccactctggtgcttatcagtgtttcgctaccaggaaggcacagacagcccaggatttcgcaattattgccctcgaggatggaacccctcgcattgtctcatctttctcagagaaggtggtcaaccccggcgagcagttctcgcttatgtgcgctgctaagggtgccccaccacctacagtgacctgggcactggatgacgagccaatcgttcgagacggctcacacaggaccaatcaatacacgatgagcgacggcacaactatttcccacatgaacgtgactggtccccaaatccgagatggaggagtgtaccgatgtaccgctcggaacctggtaggaagcgccgagtaccaggcaagaatcaatgtgcgcggtccccccagcatccgagccatgcggaacattactgccgtggccggccgagatactctcattaattgccgcgtcataggatacccctattactccataaagtggtacaaggatgcactgctgttgccagataaccatcgccaggtggtcttcgagaacggtacacttaaactgacagacgtccagaagggcatggatgagggcgagtacctctgctctgtgctgatccagcctcagctatcaatctctcagtccgtgcatgtggccgtgaaggtccctcctctcatccagccatttgagttcccacccgccagtataggacagctcctgtacatcccctgcgtggtgagctctggcgatatgcccatacgcatcacctggcgcaaagacggccaggtcatcatttctggatccggcgttaccattgaaagcaaagagtttatgagctccttgcagatatcaagcgtgtccctgaagcacaacggcaattatacctgtattgcgagcaatgctgcagcgaccgtgtctagggaaaggcagctgattgtccgagttccacccaggtttgtcgtacagccaaacaatcaggacggtatatacgggaaggccggcgtgctgaactgctcggtggatggctaccccccccctaaagtgatgtggaagcacgctaaaggatctggtaacccccagcagtaccaccccgtgccccttaccggacgaattcagatcctaccgaatagctcccttctgattcggcacgtgctcgaggaggatatcggctattatctgtgccaggctagcaatggtgttggtacggacataagcaaatctatgttcctcacggtcaagatacccgccatgattaccagccatcccaacaccactatcgccatcaaggggcatgccaaggagctgaattgcactgcacgcggggagcggccaatcattatcaggtgggaaaaaggcgacaccgtgatcgatcccgatagagtaatgcggtacgcgatcgccaccaaggacaatggcgacgaggtcgtgagcaccctgaagcttaagcctgcagaccggggggattccgtgttcttctcctgtcacgctatcaattcctacggtgaagatcgcgggcttattcagctcactgtccaggagccccctgacccccccgagctcgagatccgcgaagtcaaggctaggtcaatgaatctgcggtggacacagcgattcgacggaaacagcattataaccgggtttgacatcgagtataaaaacaagagcgacagctgggactttaagcaaagtacacgaaacatctctcccacgataaaccaggcaaacatagtcgacctgcaccctgcctcggtttactccatccggatgtactcattcaacaaaattggacgcagcgagccatccaaggagctgacaatcagcaccgaggaggcagcccctgacggaccccctatggacgtgacattgcagcctgtcacgagccaatccatacaagtgacttggaaggcccctaagaaggaacttcagaatggtgtgattcgaggttaccaaatcggctacagagaaaattctcctggaagcaacgggcaatacagtatagtggaaatgaaagcaacaggcgactccgaagtatatacgctggataacttgaagaaattcgcacagtatggagtcgtagtccaggcttttaacagggccgggaccgggcccagcagcagtgaaatcaatgctacaactcttgaagatgtgcctagccaaccacctgagaacgtgcgtgcgttatctattacttcagacgtggctgttatctcgtggagtgaacctcctcgcagcactctgaacggagtactcaagggctaccgggtgattttttggagcctgtacgtggacggcgagtggggcgaaatgcaaaatattacaactacccgggaaagggtcgagctgcgtgggatggagaaattcacaaattattctgtacaggtgcttgcgtatactcaggctggggacggtgttagaagctccgtactgtatatccaaacaaaagaagatgtgcctgggccccccgcgggcattaaagccgtgcctagctcagcatcttctgtcgtggttagttggctgcccccaaccaaacccaacggagtgattagaaaatacacgattttctgttcctcacccggttcggggcagccagctccatctgagtacgagacctctcctgaacagcttttctatcgcatcgcgcaccttaacagagggcagcagtatctgttgtgggtagcggcagtgacgagtgcaggtcgtggaaactcgagcgagaaggtcactatcgagcccgctggtaaagcccccgccaaaatcatctcatttggcgggaccgtgaccaccccttggatgaaggatgtcaggctgccttgtaatagtgtgggagatcccgcaccagccgtgaaatggaccaaggacagtgaagattcagcgataccagtaagtatggatggacacaggttgattcacaccaatggaacgctgctgctccgagctgtgaaggctgaggacagcggctactatacttgtaccgccaccaacaccggagggttcgatactatcatagtgaatctccttgttcaggtcccccccgatcagcctaggttgactgtgagtaagacttccgcatcttcaataacgctgacgtggatccctggtgacaacgggggcagttctatcagagggttcgtactgcagtactccgttgacaattcagaagagtggaaagatgtgttcatatcctcatccgagcggtcattcaaattggactcactgaaatgtggaacgtggtacaaagtgaagctcgctgccaaaaactctgtcggcagcgggcgcatcagtgagatcatcgaggcaaagactcacggtcgagagcctagttttagtaaggaccagcacctgtttacccatattaactccacacatgcacgattgaacctccagggttggaataacgggggatgcccaatcactgccattgtgctggagtatagacctaagggcacatgggcttggcaaggactgagagcaaatagcagcggcgaagtgtttctcacagaactgagggaggccacttggtatgagctgcggatgagagcctgtaacagcgccggctgtggcaatgagactgcccagttcgctaccctggattatgatggctcgaccatccctcccataaagtccgcccagggggaaggcgatgatgtgaagaagctattcaccattggatgccctgtcattctggccacacttggggtggccctgctatttatcgtccggaaaaaaaggaaggaaaagaggttaaaacgcttacgcgacgcaaaatcactggcagaaatgttgattagcaaaaacaaccggtcctttgataccccggtcaaaggcccaccccagggaccgagacttcacatcgacatccctagggtgcaactgcttatcgaggacaaagagggtattaaacagttgggagatgataaggccacaatccccgtcacagatgctgagttctctcaggctgtgaaccctcagtcattttgcactggagtaagtctgcatcaccccactctcatacagtccaccgggcccttaatcgatatgtccgacattaggcctggaactaatcctgttagtcgcaaaaatgttaaaagcgctcattctacccgcaaccgctactcctctcagtggaccctaacaaaatgtcaggcttcaactccagcccgcacactgacatcggattggcgcaccgttggcagccagcacggcgtaaccgtgactgaatccgatagctatagcgcaagcctgagccaggatacagacaagggcagaaacagtatggtttcaacagagtccgcgagtagcacctacgaagagctggccagggcttatgagcatgctaaattggaagaacaactacagcatgctaaattcgagatcaccgagtgcttcatttctgattcgtcttctgaccagatgactacaggcacaaatgaaaacgccgatagtatgaccagtatgtctactccttccgagcccgggatctgtcgttttaccgcgtctcctccaaagccccaggatgcagaccgtgggaagaacgtggccgtcccaatcccccatagggctaataaaagcgattactgcaatttgcctctctatgccaaatctgaagccttcttccggaaggccgatggccgagagccctgtcctgtcgtcccacctagggaggcaagcattcgcaacctggcgaggacttaccatacacaggcgagacatctgacccttgaccctgctagtaaatcactcggacttcctcatccaggtgcacccgcagccgcgtcaaccgcgactctgccccagcggacattggcaatgccagcaccaccagccggcactgcaccgcctgcaccggggcccacccccgccgaaccacctaccgcaccatcggcagccccccctgcacccagcaccgaaccccccagggcaggtggtccacacaccaaaatgggcggatctcgagatagtctcctggaaatgagcacaagcggcgtgggacgttcacaaaagcaaggcgccggcgcatatagtaaatcctatactctggtgtag

SEQ ID NO: 205158 - DNA, 6341 bp, Artificial Sequence
  derived and/or modified sequence
atgaccggagcaggtgagcccaggagggaggagcctccccctcaacctagcgccggactgagaagccgcgagtctggtgcccctagcgccggtgggtgggaaagggcggagcgtggcagaggggctgcagcacgcccagcaaccggaccacctcccagacggattgggcctctgtatggtatgtggttggttactttcctactgctgctggactccctgcacaaagccaggcccgaggatgtggggacctccctctatttcgtgaacgacagcttgcaacaggtcacattctcaagctcagtgggggtcgtagtgccgtgcccggcagcagggagtccctcagctgcattgcgctggtatttagccactggcgacgatatctatgatgtcccacatatccgccacgttcacgccaacggcaccctgcagttatacccttttagtccctcggccttcaacagcttcatacatgacaatgattacttttgtaccgccgaaaacgctgcaggtaagatccgtagccctaacattagagtgaaagctgtgttcagggagccttatacagtgcgcgtggaagaccagagatccatgcggggaaatgtcgccgtctttaagtgtctgattcccagctcagtgcaggagtacgtatccgttgtttcctgggagaaagataccgtctcaatcattccagaacatagattctttataacataccatgggggtttatatataagtgatgtacaaaaggaagatgccctaagcacctatcgctgtatcaccaagcacaagtattcaggggagacccgccagtctaacggagctaggttatcagtcaccgacccggctgaatccattcccaccattctcgacgggtttcacagtcaagaggtgtgggccggacataccgtcgagctcccctgtacagcctccggttatccaatcccagctatcagatggctgaaggatgggagacccttaccagccgactcaaggtggactaagcggatcacggggcttacgatttctgacctaagaaccgaggatagtggcacttacatatgcgaggtgaccaacacctttggcagcgcagaggctactggaattctaatggtcatcgatccactccacgtgaccctgactcccaagaagctgaaaactggaatcgggagtacggtgatcctgtcctgtgctctaacaggctcacctgagtttacaataaggtggtaccgcaacacggaattggtgctcccagatgaagccattagcattcgcggtctcagcaatgagacgctcctgattacgtcagctcagaaatcacatagtggtgcttaccagtgtttcgcgacacgcaaggcccagactgctcaggattttgcaatcatcgcactggaagacggcactcccaggatcgtgagcagtttttccgaaaaggtcgtcaaccctggagaacagttttcacttatgtgcgcagcgaaaggcgctccccctcccacggttacatgggctctagatgacgagcctattgtaagggatggatcccacagaactaatcagtataccatgagcgatggcaccacgatctcacacatgaatgtcacaggccctcagattagggacgggggagtgtaccggtgcactgccaggaacttagttgggagcgccgaataccaggccagaatcaacgtgcggggaccgcctagcatccgggcaatgaggaacatcaccgccgtggctggtagagatactcttattaactgtagggtgatcggctacccgtattattccataaagtggtacaaagatgctctgctgctgccggataatcataggcaagtggtgtttgaaaatgggaccttgaagctgaccgacgtccagaaaggaatggacgagggggaatatctgtgttcagtactaatccagccacagctgtccattagccagtcagttcatgttgcagttaaggttcctcccttaatacaaccatttgagtttccgccagcttccattggccaactcctgtacattccctgcgtggtgtcctccggcgacatgccaatacgtattacttggcgtaaagacggtcaggttattattagtggttcgggcgtgacaattgagagcaaggagttcatgagcagcctgcagattagcagtgtatctctcaaacataatggaaactacacctgcatagcctcaaacgccgctgcaaccgtctctcgcgagagacagctcatcgtgagagttccacccaggttcgttgttcagcccaacaatcaagatggtatctacggtaaagcaggagtcctgaattgttccgttgacggataccctccccctaaagtcatgtggaagcatgctaagggctcaggaaatcctcagcagtaccacccagtgccactgacggggagaatccagattctccccaactcctctctactgatccgccacgttctcgaagaggatatcgggtattacctgtgccaggcttccaacggggtgggaacggatattagtaagagtatgtttttaactgtgaaaatacccgctatgattacaagtcatcccaatactacaatcgccattaaagggcacgcaaaggaactgaactgcaccgccaggggagagcggcctatcatcatccgatgggaaaagggcgacacagtgatcgatcccgatagggtgatgcggtacgccatcgcaacaaaggacaacggggatgaggtcgtcagcacactgaagctcaagccagcagaccggggtgatagcgtgttcttttcttgccacgcaattaacagttatggtgaagatagaggcctgatccagctgacagttcaggagccacccgaccctcctgaactcgaaatccgggaggtcaaagcacgttccatgaatctgaggtggacccagagatttgacggcaatagcatcatcacagggttcgacattgaatataaaaacaagtccgatagttgggattttaagcaaagcacacggaatatctcacctactatcaaccaggccaatattgtggacctgcatcccgcttccgtgtattccattagaatgtattcctttaataaaattggcaggagcgagccatccaaagaattaaccatttctaccgaggaggcggctcctgatggcccaccgatggacgtcactctgcagcccgtaacctctcagagcattcaggtgacatggaaggcacctaaaaaggagctgcagaacggggtaatcagaggctaccagattgggtacagagagaatagcccaggatctaacggccagtactcaattgtcgagatgaaggcaacaggggactctgaggtgtacacactggataaccttaagaaattcgcacagtatggagtggtggtccaagctttcaaccgcgctggaaccgggccatcatcgtcagagattaatgcaactactctggaagatgtaccgagccagccacccgagaacgtgcgggctctctccataaccagtgatgttgctgtgatttcctggtccgaacctccacggtcaaccctcaatggtgtgctcaagggctatcgagttattttttggagcctgtatgtggatggtgaatggggagagatgcaaaacatcacaacaacacgtgaacgcgtggaactacggggaatggagaaatttaccaattattcggtccaagtgctggcatatacccaggccggagacggagtgcggagctccgtcctttatatccagacaaaggaagacgtgcccggtccccctgcaggaattaaagcagttccgtcaagtgctagctctgttgttgtcagttggctgccacctaccaaacccaatggtgtaatacgaaagtataccatcttctgtagctcaccgggaagcggtcaacctgcacccagcgagtatgagacgagtccggagcaactgttctaccgaatagcccaccttaataggggccagcagtacttgctctgggtagcggctgtaacatccgcaggaagaggcaattctagcgagaaggtgaccatcgagccagcgggaaaagcacctgcgaagatcatttccttcggaggcacggtgaccacaccctggatgaaggacgtgaggctaccttgtaactcagtgggcgaccctgctcctgctgtgaagtggaccaaagactcagaggacagtgctatccccgtgtctatggacgggcaccgtctgattcacaccaacgggaccctcctgctcagggctgtaaaggcagaggacagcgggtactatacgtgtactgccaccaacacaggcggattcgataccattatcgtcaacctgctggttcaggttcccccagaccaaccacggctcacagtgtccaaaaccagtgcatcaagtatcacattgacgtggatccctggggacaatggtgggtcgagcatcagaggcttcgtgctccagtatagtgtggataattcagaagagtggaaagatgtgtttataagttcctctgaacggagcttcaagctcgattctctgaagtgcggcacctggtacaaagtgaaacttgctgctaagaattcagtgggatcaggaagaataagcgagatcattgaagctaagacgcatggcagagagccgagcttttctaaggaccagcacctcttcactcatattaactccacccatgcaagactgaatttacaaggctggaacaatggcggatgccccatcacagctatagtcctggagtaccgccctaaaggaacctgggcctggcagggactgcgcgcaaatagtagcggcgaagtgttcctaactgagctccgggaagcaacctggtatgagttgcggatgcgcgcatgtaacagcgcgggatgtggtaatgaaaccgcccagttcgccacattggattatgatggaagcacaataccccctatcaagtccgctcagggagaaggcgatgatgtcaaaaagctgtttactattggctgcccagtcatcctggccaccctaggagtggctctgctcttcattgtgagaaagaaaagaaaggagaagagattgaaacgcctccgagacgctaaatccctggcagagatgcttatatcgaaaaataacaggtcttttgatactccagtaaagggccctccccaggggcctaggctacacattgacatccctagagtccaactgctgattgaggataaagaggggataaagcagctgggcgacgacaaggctacaatccccgtgactgatgccgagttcagccaggcagtgaatccacaatcgttttgcactggggtttctctccatcaccctaccctgatccagagtaccggacccctgatagacatgtccgatatccgacctgggacaaatcctgtgagtcgaaaaaacgttaagagcgctcactccacaagaaatcggtactctagccaatggaccctgaccaaatgtcaggccagcacaccagctagaacactgacgtccgactggagaacggttgggagtcagcacggggtaactgtcacggagtcagatagttattccgcttctctctcccaggatacggataagggtagaaacagtatggtctctaccgagagtgcctcctccacttatgaggagctggctcgggcttatgaacatgccaaactcgaagagcagctccagcacgccaaatttgaaataactgagtgtttcatcagcgattctagctcagaccaaatgaccactggcactaacgagaatgccgacagtatgacaagcatgagcacccccagtgaaccgggtatctgccgttttactgctagccccccaaagcctcaggatgccgatcgagggaaaaatgtcgcagtgccgataccacaccgggcaaataagtcagattactgcaaccttcccctgtatgcaaaaagcgaggccttttttagaaaggctgatggcagggaaccatgccccgtggttccgcctcgagaggcatcaatcaggaatctggcgcgtacctaccatacccaggcacgccacttaactctggacccagcctccaagtccctgggtcttcctcatcctggagctccagccgctgcaagcacagcaactctaccgcagaggacactggcgatgccagctccgccagctgggaccgcccctccagctccaggaccaactccagctgagccgcctactgcgccttccgccgcacccccagctcccagcactgagcccccaagagcaggaggccctcacacgaagatgggaggctctagggactctctacttgaaatgtcaacatcgggagtcggcagaagtcagaagcaaggtgccggtgcttacagtaagtcttatactctggtcta

SEQ ID NO: 205159 - DNA, 6342 bp, Artificial Sequence
  derived and/or modified sequence
atgaccggcgccggcgagcccagaagagaggagccccccccccagcccagcgccggcctgagaagcagagagagcggcgcccccagcgccggcggctgggagagagccgagagaggcagaggcgccgccgccagacccgccaccggccccccccccagaagaatcggccccctgtacggcatgtggctggtgaccttcctgctgctgctggacagcctgcacaaggccagacccgaggacgtgggcaccagcctgtacttcgtgaacgacagcctgcagcaggtgaccttcagcagcagcgtgggcgtggtggtgccctgccccgccgccggcagccccagcgccgccctgagatggtacctggccaccggcgacgacatctacgacgtgccccacatcagacacgtgcacgccaacggcaccctgcagctgtaccccttcagccccagcgccttcaacagcttcatccacgacaacgactacttctgcaccgccgagaacgccgccggcaagatcagaagccccaacatcagagtgaaggccgtgttcagagagccctacaccgtgagagtggaggaccagagaagcatgagaggcaacgtggccgtgttcaagtgcctgatccccagcagcgtgcaggagtacgtgagcgtggtgagctgggagaaggacaccgtgagcatcatccccgagcacagattcttcatcacctaccacggcggcctgtacatcagcgacgtgcagaaggaggacgccctgagcacctacagatgcatcaccaagcacaagtacagcggcgagaccagacagagcaacggcgccagactgagcgtgaccgaccccgccgagagcatccccaccatcctggacggcttccacagccaggaggtgtgggccggccacaccgtggagctgccctgcaccgccagcggctaccccatccccgccatcagatggctgaaggacggcagacccctgcccgccgacagcagatggaccaagagaatcaccggcctgaccatcagcgacctgagaaccgaggacagcggcacctacatctgcgaggtgaccaacaccttcggcagcgccgaggccaccggcatcctgatggtgatcgaccccctgcacgtgaccctgacccccaagaagctgaagaccggcatcggcagcaccgtgatcctgagctgcgccctgaccggcagccccgagttcaccatcagatggtacagaaacaccgagctggtgctgcccgacgaggccatcagcatcagaggcctgagcaacgagaccctgctgatcaccagcgcccagaagagccacagcggcgcctaccagtgcttcgccaccagaaaggcccagaccgcccaggacttcgccatcatcgccctggaggacggcacccccagaatcgtgagcagcttcagcgagaaggtggtgaaccccggcgagcagttcagcctgatgtgcgccgccaagggcgcccccccccccaccgtgacctgggccctggacgacgagcccatcgtgagagacggcagccacagaaccaaccagtacaccatgagcgacggcaccaccatcagccacatgaacgtgaccggcccccagatcagagacggcggcgtgtacagatgcaccgccagaaacctggtgggcagcgccgagtaccaggccagaatcaacgtgagaggcccccccagcatcagagccatgagaaacatcaccgccgtggccggcagagacaccctgatcaactgcagagtgatcggctacccctactacagcatcaagtggtacaaggacgccctgctgctgcccgacaaccacagacaggtggtgttcgagaacggcaccctgaagctgaccgacgtgcagaagggcatggacgagggcgagtacctgtgcagcgtgctgatccagccccagctgagcatcagccagagcgtgcacgtggccgtgaaggtgccccccctgatccagcccttcgagttcccccccgccagcatcggccagctgctgtacatcccctgcgtggtgagcagcggcgacatgcccatcagaatcacctggagaaaggacggccaggtgatcatcagcggcagcggcgtgaccatcgagagcaaggagttcatgagcagcctgcagatcagcagcgtgagcctgaagcacaacggcaactacacctgcatcgccagcaacgccgccgccaccgtgagcagagagagacagctgatcgtgagagtgccccccagattcgtggtgcagcccaacaaccaggacggcatctacggcaaggccggcgtgctgaactgcagcgtggacggctaccccccccccaaggtgatgtggaagcacgccaagggcagcggcaacccccagcagtaccaccccgtgcccctgaccggcagaatccagatcctgcccaacagcagcctgctgatcagacacgtgctggaggaggacatcggctactacctgtgccaggccagcaacggcgtgggcaccgacatcagcaagagcatgttcctgaccgtgaagatccccgccatgatcaccagccaccccaacaccaccatcgccatcaagggccacgccaaggagctgaactgcaccgccagaggcgagagacccatcatcatcagatgggagaagggcgacaccgtgatcgaccccgacagagtgatgagatacgccatcgccaccaaggacaacggcgacgaggtggtgagcaccctgaagctgaagcccgccgacagaggcgacagcgtgttcttcagctgccacgccatcaacagctacggcgaggacagaggcctgatccagctgaccgtgcaggagccccccgacccccccgagctggagatcagagaggtgaaggccagaagcatgaacctgagatggacccagagattcgacggcaacagcatcatcaccggcttcgacatcgagtacaagaacaagagcgacagctgggacttcaagcagagcaccagaaacatcagccccaccatcaaccaggccaacatcgtggacctgcaccccgccagcgtgtacagcatcagaatgtacagcttcaacaagatcggcagaagcgagcccagcaaggagctgaccatcagcaccgaggaggccgcccccgacggcccccccatggacgtgaccctgcagcccgtgaccagccagagcatccaggtgacctggaaggcccccaagaaggagctgcagaacggcgtgatcagaggctaccagatcggctacagagagaacagccccggcagcaacggccagtacagcatcgtggagatgaaggccaccggcgacagcgaggtgtacaccctggacaacctgaagaagttcgcccagtacggcgtggtggtgcaggccttcaacagagccggcaccggccccagcagcagcgagatcaacgccaccaccctggaggacgtgcccagccagccccccgagaacgtgagagccctgagcatcaccagcgacgtggccgtgatcagctggagcgagccccccagaagcaccctgaacggcgtgctgaagggctacagagtgatcttctggagcctgtacgtggacggcgagtggggcgagatgcagaacatcaccaccaccagagagagagtggagctgagaggcatggagaagttcaccaactacagcgtgcaggtgctggcctacacccaggccggcgacggcgtgagaagcagcgtgctgtacatccagaccaaggaggacgtgcccggcccccccgccggcatcaaggccgtgcccagcagcgccagcagcgtggtggtgagctggctgccccccaccaagcccaacggcgtgatcagaaagtacaccatcttctgcagcagccccggcagcggccagcccgcccccagcgagtacgagaccagccccgagcagctgttctacagaatcgcccacctgaacagaggccagcagtacctgctgtgggtggccgccgtgaccagcgccggcagaggcaacagcagcgagaaggtgaccatcgagcccgccggcaaggcccccgccaagatcatcagcttcggcggcaccgtgaccaccccctggatgaaggacgtgagactgccctgcaacagcgtgggcgaccccgcccccgccgtgaagtggaccaaggacagcgaggacagcgccatccccgtgagcatggacggccacagactgatccacaccaacggcaccctgctgctgagagccgtgaaggccgaggacagcggctactacacctgcaccgccaccaacaccggcggcttcgacaccatcatcgtgaacctgctggtgcaggtgccccccgaccagcccagactgaccgtgagcaagaccagcgccagcagcatcaccctgacctggatccccggcgacaacggcggcagcagcatcagaggcttcgtgctgcagtacagcgtggacaacagcgaggagtggaaggacgtgttcatcagcagcagcgagagaagcttcaagctggacagcctgaagtgcggcacctggtacaaggtgaagctggccgccaagaacagcgtgggcagcggcagaatcagcgagatcatcgaggccaagacccacggcagagagcccagcttcagcaaggaccagcacctgttcacccacatcaacagcacccacgccagactgaacctgcagggctggaacaacggcggctgccccatcaccgccatcgtgctggagtacagacccaagggcacctgggcctggcagggcctgagagccaacagcagcggcgaggtgttcctgaccgagctgagagaggccacctggtacgagctgagaatgagagcctgcaacagcgccggctgcggcaacgagaccgcccagttcgccaccctggactacgacggcagcaccatcccccccatcaagagcgcccagggcgagggcgacgacgtgaagaagctgttcaccatcggctgccccgtgatcctggccaccctgggcgtggccctgctgttcatcgtgagaaagaagagaaaggagaagagactgaagagactgagagacgccaagagcctggccgagatgctgatcagcaagaacaacagaagcttcgacacccccgtgaagggccccccccagggccccagactgcacatcgacatccccagagtgcagctgctgatcgaggacaaggagggcatcaagcagctgggcgacgacaaggccaccatccccgtgaccgacgccgagttcagccaggccgtgaacccccagagcttctgcaccggcgtgagcctgcaccaccccaccctgatccagagcaccggccccctgatcgacatgagcgacatcagacccggcaccaaccccgtgagcagaaagaacgtgaagagcgcccacagcaccagaaacagatacagcagccagtggaccctgaccaagtgccaggccagcacccccgccagaaccctgaccagcgactggagaaccgtgggcagccagcacggcgtgaccgtgaccgagagcgacagctacagcgccagcctgagccaggacaccgacaagggcagaaacagcatggtgagcaccgagagcgccagcagcacctacgaggagctggccagagcctacgagcacgccaagctggaggagcagctgcagcacgccaagttcgagatcaccgagtgcttcatcagcgacagcagcagcgaccagatgaccaccggcaccaacgagaacgccgacagcatgaccagcatgagcacccccagcgagcccggcatctgcagattcaccgccagcccccccaagccccaggacgccgacagaggcaagaacgtggccgtgcccatcccccacagagccaacaagagcgactactgcaacctgcccctgtacgccaagagcgaggccttcttcagaaaggccgacggcagagagccctgccccgtggtgccccccagagaggccagcatcagaaacctggccagaacctaccacacccaggccagacacctgaccctggaccccgccagcaagagcctgggcctgccccaccccggcgcccccgccgccgccagcaccgccaccctgccccagagaaccctggccatgcccgccccccccgccggcaccgccccccccgcccccggccccacccccgccgagccccccaccgcccccagcgccgccccccccgcccccagcaccgagccccccagagccggcggcccccacaccaagatgggcggcagcagagacagcctgctggagatgagcaccagcggcgtgggcagaagccagaagcagggcgccggcgcctacagcaagagctacaccctggtgtag

SEQ ID NO: 205160 - DNA, 6899 bp, Artificial Sequence
  derived and/or modified sequence
ggatgacaggagccggggagccgaggagggaggagccgccgccgcagccgagcgctgggctgaggagcagagagagcggggcgccgagtgcgggcggctgggagcgcgctgagcgggggagaggcgctgccgcacggccggccacaggaccacctccccggagaatagggcctctttatggcatgtggctggtaactttcctcctgctcctggactctttacacaaagcccgccctgaagatgttggcaccagcctctactttgtaaatgactccttgcagcaggtgaccttttccagctccgtgggggtggtggtgccctgcccggccgcgggctcccccagcgcggcccttcgatggtacctggccacaggggacgacatctacgacgtgccgcacatccggcacgtccacgccaacgggacgctgcagctctaccccttctccccctccgccttcaatagctttatccacgacaatgactacttctgcaccgcggagaacgctgccggcaagatccggagccccaacatccgcgtcaaagcagttttcagggaaccctacaccgtccgggtggaggatcaaaggtcaatgcgtggcaacgtggccgtcttcaagtgcctcatcccctcttcagtgcaggaatatgttagcgttgtatcttgggagaaagacacagtctccatcatcccagaacacaggttttttattacctaccacggcgggctgtacatctctgacgtacagaaggaggacgccctctccacctatcgctgcatcaccaagcacaagtatagcggggagacccggcagagcaatggggcacgcctctctgtgacagaccctgctgagtcgatccccaccatcctggatggcttccactcccaggaagtgtgggccggccacaccgtggagctgccctgcaccgcctcgggctaccctatccccgccatccgctggctcaaggatggccggcccctcccggctgacagccgctggaccaagcgcatcacagggctgaccatcagcgacttgcggaccgaggacagcggcacctacatttgtgaggtcaccaacaccttcggttcggcagaggccacaggcatcctcatggtcattgatccccttcatgtgaccctgacaccaaagaagctgaagaccggcattggcagcacggtcatcctctcctgtgccctgacgggctccccagagttcaccatccgctggtatcgcaacacggagctggtgctgcctgacgaggccatctccatccgcgggctcagcaacgagacgctgctcatcacctcggcccagaagagccattccggggcctaccagtgcttcgctacccgcaaggcccagaccgcccaggactttgccatcattgcacttgaggatggcacgccccgcatcgtctcgtccttcagcgagaaggtggtcaaccccggggagcagttctcactgatgtgtgcggccaagggcgccccgccccccacggtcacctgggccctcgacgatgagcccatcgtgcgggatggcagccaccgcaccaaccagtacaccatgtcggacggcaccaccatcagccacatgaacgtcacaggcccccagatccgcgacgggggcgtgtaccggtgcacagcgcggaacttggtgggcagtgctgaatatcaggcgcgaataaacgtaagaggcccacccagcatccgggctatgcggaacatcacagcagtcgccgggcgggacacccttatcaactgcagggtcatcggctatccctactactccatcaagtggtacaaggatgccctgctgctgccagacaaccaccgccaggtggtgtttgagaatgggaccctcaagctgactgacgtgcagaagggcatggatgagggggagtacctgtgcagtgtcctcatccagccccagctctccatcagccagagcgttcacgtagccgtcaaagtgccccctctgatccagcccttcgaattcccacccgcctccatcggccagctgctctacattccctgtgtggtgtcctcgggggacatgcccatccgtatcacctggaggaaggacggacaggtgatcatctcaggctcgggcgtgaccatcgagagcaaggaattcatgagctccctgcagatctctagcgtctccctcaagcacaacggcaactatacatgcatcgccagcaacgcagccgccaccgtgagccgggagcgccagctcatcgtgcgtgtgccccctcgatttgtggtgcaacccaacaaccaggatggcatctacggcaaagctggtgtgctcaactgctcggtggacggctaccccccacccaaggtcatgtggaagcatgccaaggggagcgggaacccccagcagtaccaccctgtgcccctcactggccgcatccagatcctgcccaacagctcgctgctgatccgccacgtcctagaagaggacatcggctactacctctgccaggccagcaacggcgtaggcaccgacatcagcaagtccatgttcctcacagtcaagatcccggccatgatcacttcccaccccaacaccaccatcgccatcaagggccatgcgaaggagctaaactgcacggcacggggtgagcggcccatcatcatccgctgggagaagggggacacagtcatcgaccctgaccgcgtcatgcggtatgccatcgccaccaaggacaacggcgacgaggtcgtctccacactgaagctcaagcccgctgaccgtggggactctgtgttcttcagctgccatgccatcaactcgtatggggaggaccggggcttgatccaactcactgtgcaagagccccccgaccccccagagctggagatccgggaggtgaaggcccggagcatgaacctgcgctggacccagcgattcgacgggaacagcatcatcacgggcttcgacattgaatacaagaacaaatcagattcctgggacttcaagcagtccacacgcaacatctcccccaccatcaaccaggccaacattgtggacttgcacccggcatctgtgtacagcatccgcatgtactctttcaacaagattggccgcagtgaaccaagcaaggagctcaccatcagcactgaggaggccgctcccgatgggccccccatggatgttaccttgcagccagtgacctcacagagcatccaggtgacctggaaggcacccaagaaggagctgcagaacggtgtcatccggggctaccagattggctacagagagaacagccccggcagcaacgggcagtacagcatcgtggagatgaaggccacgggggacagcgaggtctacaccctggacaacctcaagaagttcgcccagtatggggtggtggtccaagccttcaatcgggctggcacggggccctcttccagcgagatcaatgccaccactctggaggatgtgcccagccagccccctgagaacgtccgggccctgtccatcacttctgacgtggccgtcatctcctggtcagagcccccgcgcagcaccctcaatggcgtcctcaaaggctatcgggtcatcttctggtccctctatgttgatggggagtggggcgagatgcagaacatcaccaccacgcgggagcgggtggagctgcggggcatggagaagttcaccaactacagcgtccaggtgctggcctacacccaggctggggacggcgtacgcagcagtgtgctctacatccagaccaaggaggacgttccaggtccccctgctggcatcaaagctgtcccttcatcagctagcagtgtggttgtgtcttggctcccccctaccaagcccaacggggtgatccgcaagtacaccatcttctgttccagccccgggtctggccagccggctcccagcgagtacgagacgagtccagagcagctcttctaccggatcgcccacctaaaccgcggtcagcagtatctgctgtgggtggccgccgtcacctctgccggccggggcaacagcagcgagaaggtgaccatcgagcctgctggcaaggccccagcaaagatcatctcctttgggggcaccgtgacaacaccttggatgaaagatgttcggctgccttgcaattcagtgggagatccagcccctgctgtgaagtggaccaaggacagtgaagactcggccattccagtgtccatggatgggcaccggctcatccacaccaatggcacactgctgctgcgtgcagtgaaggctgaggactctggctactacacgtgcacggccaccaacactggtggctttgacaccatcatcgtcaaccttctggtgcaagttcccccggaccagccccgcctcactgtctccaaaacctcagcttcgtccatcaccctgacctggattccaggtgacaatgggggcagctccatccgaggcttcgtgctacagtactcggtggacaacagcgaggagtggaaggatgtgttcatcagctccagcgagcgctccttcaagctggacagcctcaagtgtggcacgtggtacaaggtgaagctggcagccaagaacagcgtgggctctgggcgcatcagcgagatcatcgaggccaagacccacgggcgggagccctccttcagcaaagaccaacacctcttcacccacatcaactccacgcatgctcggcttaacctgcagggctggaacaatgggggctgccctatcacagccatcgttctggagtaccggcccaaggggacctgggcctggcagggcctccgggccaacagctccggggaggtgtttctgacggaactgcgagaggccacgtggtacgagctgcgcatgagggcttgcaacagtgcgggctgcggcaatgaaacagcccagttcgccaccctggactacgatggcagcaccattccacccatcaagtctgctcaaggtgaaggggatgatgtgaagaagctgttcaccatcggctgccctgtcatcctggccacactgggggtggcactgctcttcatcgtacgcaagaagaggaaggagaaacggctgaagcgactccgagatgcaaagagtttggcagaaatgttgataagcaagaacaatagaagctttgacacccctgtgaaagggccaccccagggcccacggctacacattgacatccccagggtccagctgctcatcgaggacaaagaaggcatcaagcaactgggagatgacaaggccaccatccctgtgacagatgctgagttcagccaagctgtcaacccacagagcttctgtactggcgtctccttgcaccacccaaccctcatccagagcacaggacccctcatcgacatgtctgacatccggccaggaaccaatccagtgtccaggaagaatgtgaagtcagcccacagcacccggaaccggtactcaagccagtggaccctgaccaagtgccaggcctccacacctgcccgcaccctcacctccgactggcgcaccgtgggctcccagcatggtgtcacggtcactgagagtgacagctacagtgccagcctgtcccaggacacagacaaaggaaggaacagcatggtgtccactgagagtgcctcttccacctacgaggagctggcccgggcctatgagcatgccaagctggaggagcagctgcagcacgccaagtttgagatcaccgagtgcttcatctctgacagttcctctgaccagatgaccacaggcaccaacgagaacgccgacagcatgacatccatgagcacaccctcagagcctggcatctgccgctttaccgcctcaccacccaagccccaggatgcggaccggggcaaaaacgtggctgtgcccatccctcaccgggccaacaagagtgactactgcaacctgcccctgtatgccaagtcagaggccttctttcgaaaggcagatggacgtgagccctgccccgtggtcccaccccgtgaggcctccatccggaacctggctcgaacctaccacacccaggctcgccacctgaccctggaccctgccagcaagtccttgggccttccccacccaggggcccccgctgccgcctccacagccaccttacctcagaggactctggccatgccagcccccccagccggcacagcccccccagcccccggccccacccctgctgagccacccaccgcccccagcgctgcccctccggcccccagcaccgagcctccacgagccgggggcccacacaccaaaatggggggctccagggactcgcttctcgagatgagcacatcgggggtagggaggtctcagaagcagggggccggggcctactccaaatcctacaccctggtgtagggcccgcaggaagagcagccacgcctggaccgcgccgcgccgcagccccacacgccagctcggctgtttttctgcattatttatattcaactgacagacaaaaaccaaccaacgacaaaacaaaaacccccaatcatgaacgcctgtacatagaactcttttgtacaaatgaaactattttcttcttctccatgaagccagggcacaaagaatttgacagtacaagtcaaatcccccaccccacaaaatatgtgtggagatatatatacatatatagacagacaggaacgcgtccacgagctatatatctatatatttctctcaccctattttgagacagaggcacaaagactcagcaatttttttccctcctcctcaccttccccccagtctaggtggttttgacaaagaccaaaatcccaactcagagacactgcatgcgattttactgttccaagaaaaccaggagttgcttcaatttgcagatgcttatgtgttaatacctttttctatgaaaaaagacccagcgccgtgtgcaataaaggttatgtttct

SEQ ID NO: 205161 - protein, 1221 aa, Artificial Sequence
  derived and/or modified sequence
MLRSTGFFRAIDCPYWSGAPGGPCRRPYCHFRHRGARGSGAPGDGGEAPPAAGLGYDPYNPELPKPPAQRENGTLGLGEEPRPDVLELELVNQAIEAVRSEVELEQRRYRELLETTREHRSAEAPALAPRGPNASPTVGPDEDAFPLAFDYSPGSHGLLSPDAGYQPTPLAAPAEPGSKYSLASLDRGQGRGGGGGGALEYVPKAVSQPRRHSRPVPSGKYVVDNSRPPTDLEYDPLSNYSARHLSRASSRDERAAKRPRGSRGSEPYTPAPKKLCDPFGSCDARFSDSEDEAATVPGNEPTTASTPKARADPEIKATGQPPSKEGLEAEGGGLRETKETAVQCDVGDLQPPPAKPASPAQVQSSQDGGCPKEGKPKKKKTGAPPAPSCKDGAQGKDKTKDKGRGRPVEKPRADKKGPQASSPRRKAERPEGTKKKPSSATPVATSGKGRPDRPARRPSPTSGDSRPAAGRGPPRPLQLPDRKSTKAPSGKLVERKARSLDEGASQDAPKLKKRALSHADLFGDESEDEAAGPGVPSVWPSALPSLSSDSDSDSDSSLGFPEAQGPPKRLKASPPPSPAPSSSSSSSSSTSSAGADVDYSALEKEVDFDSDPMEECLRIFNESTSVKTEDRGRLARQPPKEEKSEEKGLSGLTTLFPGQKRRISHLSKQGQEVEPPRRGPAVPPARPPTAQEVCYLRAQQAQRASASLLQAPARLAEKSPSVHISAPGEKRRIAHIPNPRLAAAPTGAKRTLAASGSQSSNGPEPGGQQLKTRTLSGMASKTTTTIIPKRIAHSPSLQSLKKPIIPKEFGGKVPTVIRQRYLNLFIEECLKFCTSNQEAIEKALNEEKVAYDRSPSKNIYLNVAVNTLKKLRGLAPSAVPGLSKTSGRRVVSHEVVLGGRLAAKTSFSLSRPSSPRVEDLKGAALYSRLREYLLTQDQLKENGYPFPHPERPGGAIIFTAEEKRPKDSSCRTCCRCGTEYLVSSSGRCIRDEECYYHWGRLRRNRVAGGWETQYMCCSAAAGSVGCQVAKQHVQDGRKERLEGFVKTFEKELSGDTHPGIYALDCEMSYTTYGLELTRVTVVDTDVHVVYDTFVKPDNEIVDYNTRFSGVTEADLADTSVTLRDVQAVLLSMFSADTILIGHSLESDLLALKVIHSTVVDTSVLFPHRLGLPYKRSLRNLMADYLRQIIQDNVDGHSSSEDAGACMHLVIWKVREDAKTKR

SEQ ID NO: 205162 - protein, 493 aa, Artificial Sequence
  derived and/or modified sequence
MGSHSPCAHTPCAPPAPTGAKRTLAASGSQSSNGPEPGGQQLKTRTLSGMASKTTTTIIPKRIAHSPSLQSLKKPIIPKEFGGKVPTVIRQRYLNLFIEECLKFCTSNQEAIEKALNEEKVAYDRSPSKNIYLNVAVNTLKKLRGLAPSAVPGLSKTSGRRVVSHEVVLGGRLAAKTSFSLSRPSSPRVEDLKGAALYSRLREYLLTQDQLKENGYPFPHPERPGGAIIFTAEEKRPKDSSCRTCCRCGTEYLVSSSGRCIRDEECYYHWGRLRRNRVAGGWETQYMCCSAAAGSVGCQVAKQHVQDGRKERLEGFVKTFEKELSGDTHPGIYALDCEMSYTTYGLELTRVTVVDTDVHVVYDTFVKPDNEIVDYNTRFSGVTEADLADTSVTLRDVQAVLLSMFSADTILIGHSLESDLLALKVIHSTVVDTSVLFPHRLGLPYKRSLRNLMADYLRQIIQDNVDGHSSSEDAGACMHLVIWKVREDAKTKR

SEQ ID NO: 205163 - DNA, 3666 bp, Artificial Sequence
  derived and/or modified sequence
atgctgaggtctactggcttctttcgggcgatcgactgcccttattggtccggcgcacccggaggtccctgtagaaggccgtactgccattttcgacatcggggcgcgcggggtagcggtgcacccggcgacggcggagaggccccaccagcagccggactcggttatgatccctacaatccagagctgcctaaacctccggctcagcgcgagaatggcacactgggcctcggcgaagagcccaggcccgatgtgctggagctggagctggtcaatcaggccattgaagcggttaggtccgaggtagaattggagcagcggcgataccgggagctgttagaaacaacgagagaacacaggagcgccgaggcgcctgccttggctccccggggaccaaacgcttctcctactgtgggccctgacgaggacgcctttcccctcgcctttgactactctcccggctctcacggactgttgagtcccgacgccggttatcaacccactccgctggcagcacccgcggagcctggcagcaaatactccttggcatccctggatagaggccagggaagggggggaggaggtgggggcgcgttagagtacgtgcctaaggccgtgtcccaaccgcgacgacatagccgccctgtcccaagcggtaagtacgtggtcgataattcaaggccccctacggatttggaatacgaccccctgtcaaattactccgctaggcacttgagccgagcctcatccagggacgagcgggccgcgaagcgaccgagaggctccaggggttcggaaccttacacaccagcacccaagaaattgtgcgatcccttcggctcctgcgacgctagattctccgactctgaggatgaagccgcaacggtgcccggaaatgaacctaccactgcaagcaccccaaaggcccgagcggaccctgagatcaaggctaccggccaaccaccatcaaaagaaggcctcgaggcagaagggggcggtcttagggagaccaaagaaactgccgttcagtgcgacgtgggagacctgcagcccccacccgctaagccagcttcccccgcacaggtgcagtccagtcaggatggcggctgtcccaaagaaggcaaacccaagaagaaaaaaactggcgctcctcccgcgccttcatgtaaggatggcgctcaggggaaggataagaccaaagacaagggcagaggcaggcccgtagaaaaacccagggccgacaagaaagggcctcaggcgtcctctccacggagaaaggctgaacgacccgaggggactaaaaagaagcccagttctgcgacacccgtcgccacttctggaaaaggccgtccagatagaccggctcggcggccatcacctacatcaggtgattctcggcctgctgctgggcgggggccgccccgcccgctgcagctgccggatcgaaagagcacgaaagcaccgagcggcaagctggtggaaagaaaggccaggtctttggacgaaggcgcctctcaggacgctccgaagctcaagaaacgggcgcttagtcacgcggatttgtttggtgacgagagcgaagatgaagcggccggacctggcgtgccttccgtgtggccctccgctctgccgtccctcagcagcgactctgatagtgattccgactccagccttggatttccagaggcacagggaccaccgaaaagactgaaagctagtcctcccccaagccccgcccccagcagcagctcttccagcagttcctcaacatcatccgctggagctgacgtagactacagtgcactggaaaaagaagtggatttcgatagtgatccaatggaagagtgccttagaatcttcaatgaaagcacctcagtcaaaacggaggaccggggtagactggccagacaacctccgaaagaggagaagagtgaagaaaaggggctttctggtctgacaacattattccctggacagaaaagacggatcagccacctgagcaaacaaggacaggaggtcgagccacccaggcgcgggcccgcagtccccccagctcgacctccgacagcccaagaggtgtgctacctgcgcgctcagcaggctcaacgagcctcagccagcctgcttcaggctccggctcgcttggcagagaaatctcctagcgtccacatcagcgctcccggggaaaagcgccggattgcacacatcccaaatcccagacttgccgccgcccccaccggggccaagcgcaccttggctgcatccggtagccagagtagtaacgggcctgaacctggcggacagcaactgaagacacgaaccctgtcaggtatggcaagcaagaccactaccaccatcatccctaaacgcattgcccatagtcccagcctgcagagtctgaagaaacccattattcctaaggagttcgggggcaaggtgccaactgttatacgacagcgctaccttaacctgttcatcgaggaatgcctgaagttctgtacaagcaaccaagaggcgatcgaaaaagctctgaatgaggagaaggttgcgtatgataggtccccctctaaaaatatatatctcaatgtggcggttaacacactcaagaagttgagaggcctcgccccctcagccgtaccaggattatcaaagaccagcggccgccgcgtcgtgagccacgaagtggtcctgggaggcaggctagctgccaagacctctttttccctttcccggccttcctctccaagggtggaggatctaaaaggtgccgccctctattcgcgcctgcgggagtacctgctcacacaagaccagcttaaagagaacggatacccattcccacatcctgaacggccaggtggcgccattatctttaccgcagaagagaagcggccgaaagatagttcttgtcgcacatgctgtcggtgtggcacggagtacctggtctcttcctccggcaggtgtatcagagacgaagagtgttactatcattggggtaggctaagacgaaacagagtcgccgggggttgggaaacccagtatatgtgttgctctgccgccgccggatcggtgggctgtcaagtcgccaagcagcatgtgcaggacggcagaaaggagaggctggaagggttcgttaagactttcgaaaaggagctgagcggagatactcaccctgggatctatgcacttgactgtgagatgtcatacactacatatggactggagctgacccgtgtgaccgttgtcgacacagacgtgcacgtggtctatgacacatttgtcaaacccgacaacgagattgttgattacaacaccaggtttagcggagttaccgaagccgacctcgcggacacatctgtgacccttcgtgatgtgcaggctgtcctcctatccatgttttccgctgataccattctgataggccattctctggagtccgatctgctagctcttaaggtgatacatagcactgtggttgacacctctgtgcttttcccacaccggctcggcctgccctacaaacggagcctgcgtaatctaatggcagattatctgcgccagatcatccaagataacgtggacggacattcctcgtctgaggacgctggagcctgtatgcacctcgtcatctggaaagtgagagaggacgcaaagacaaagagatag

SEQ ID NO: 205164 - DNA, 1482 bp, Artificial Sequence
  derived and/or modified sequence
atggggtctcattctccctgcgcacatacaccatgtgccccacccgctcctacaggtgctaaaaggacattggcagcctccggtagtcagagtagcaatggtccggagccaggtggccagcaattgaaaaccagaaccctaagcggcatggctagcaagacaactacaaccattatcccgaagaggattgcacatagcccttccctgcagtccctcaaaaagccaatcattccgaaggagtttggcgggaaggtccctacagtaattcgccagagatatttaaatctctttatcgaggagtgcctgaagttctgtacttctaaccaagaggctatagagaaggctctgaacgaggagaaggtggcttacgacagatcaccaagcaaaaacatctatttgaatgttgccgtgaataccttaaagaagttgaggggcctcgcacctagcgctgtgcctggcttgtcaaaaacttctggtcgtcgcgtcgtctcccatgaggtcgtgctggggggtcgattggctgctaagacgtctttttcccttagcaggccctcttcgccacgcgttgaagacctgaaaggggctgccctatactccaggttgcgcgaatacttgcttacacaggaccagttgaaggagaacggttaccctttcccccacccagaacgacccggtggggccatcatttttaccgcagaggagaagcggccaaaggacagtagttgcagaacttgctgtaggtgtggtaccgagtatctggtttcatcctcggggcgctgtattcgtgacgaggagtgttactaccattggggtcgtctaagaagaaatcgagttgcaggtggatgggagacacaatatatgtgctgtagtgcggcagctgggtccgtgggctgtcaagtagccaagcagcatgtacaagacggtcgcaaggagcggctggaggggttcgttaagacttttgagaaagagctttccggggacacccacccaggcatatacgctctggactgcgagatgtcttatacaacttatggtctggaattaacaagagtgacagtggttgacaccgatgtgcacgtggtgtacgatacatttgttaagccggataacgaaatagtagactataatacccgtttcagtggagtaactgaagcggacctggccgacacttcagtgactctcagggacgttcaggcagtactgctctctatgttttccgccgatactatcctgattgggcactccctcgaaagcgacctactggcgctgaaggtcattcattcaaccgtggtggatacatctgtattgtttccacaccggctggggctgccctataagaggagcctgcgcaatctaatggccgattacctcaggcaaatcattcaggataacgtggacgggcactcgtcctcagaggacgcaggggcgtgtatgcacctggtcatctggaaggtcagagaggacgctaaaacaaagaggtag

SEQ ID NO: 205165 - DNA, 3666 bp, Artificial Sequence
  derived and/or modified sequence
atgctgcggagcacaggcttcttccgggccatcgactgcccctactggagcggggcccctgggggcccctgcagaagaccctactgccacttccgccacagaggagcccggggcagcggggcccctggagatggaggagaggcccctcctgctgctggcctgggctatgacccctacaaccctgagctgcccaagcccccagcccagagagaaaatggcaccctgggcctgggggaggagcccaggccagatgtgctggagctggagctggtgaaccaggccattgaagctgtgcgctctgaggtggagctggagcagaggcgctaccgggagctgctggagaccacccgggagcacaggtctgctgaggccccagccctggccccccggggccccaatgccagccccaccgtgggcccagatgaagatgccttccccctggcctttgactacagccctggcagccacggcctgctgagcccagatgctggctaccagcccacccccctggccgccccagctgagcccggcagcaagtacagcctggccagcctggaccggggccagggccggggcggcggcggcggcggggccctggagtatgtgcccaaggctgtgtcccagccccggcggcacagcaggcctgtgcccagcggcaagtatgtggtggacaacagccggcccccaacagacctggagtatgaccccctgagcaactacagcgcccggcacctgagccgggccagcagcagagatgaaagagctgccaagaggccccggggcagccggggcagcgagccctacaccccagcccccaagaagctgtgtgaccccttcggcagctgtgatgcccgcttcagtgacagtgaagatgaagctgccaccgtgcctggaaatgagcccaccacagccagcacccccaaggcccgggctgaccctgagatcaaggccaccggccagccccccagcaaggagggcctggaggccgagggcggcggcctgcgggagaccaaggagacagctgtgcagtgtgatgtgggggacctgcagcccccaccagccaagccagccagccctgcccaggtgcagagcagccaggacggcggctgccccaaggagggcaagcccaagaagaagaagacaggagcccccccagcccccagctgcaaggatggagcccagggcaaggacaagaccaaggacaagggccggggccggcctgtggagaagcccagggctgacaagaagggcccccaggccagcagccccaggaggaaggccgagaggcctgagggcaccaagaagaagcccagcagcgccacccctgtggccaccagcggcaagggccgcccagacaggcctgcccggcggcccagccccaccagcggggacagcaggcctgctgctggccggggccccccccggcccctgcagctgcctgacaggaagagcaccaaggcccccagcggcaagctggtggagaggaaggcccggagcctggatgaaggagccagccaggatgcccccaagctgaagaagagggccctgagccatgctgacctgtttggagatgaaagtgaagatgaggccgccggccctggggtgcccagcgtgtggcccagcgccctgcccagcctgagcagtgacagcgacagcgacagcgacagcagcctgggcttccctgaggcccagggcccccccaagaggctgaaggccagccccccacccagccctgcccccagcagcagcagcagcagcagcagcagcaccagcagcgctggagcagatgtggactacagcgccctggagaaggaggtggactttgacagcgaccccatggaggagtgcctgcgcatcttcaatgaaagcacctctgtgaagacagaagatcggggccgcctggcccggcagccccccaaggaggagaagtctgaggagaagggcctgagcggcctgaccaccctcttccctggccagaagaggcgcatcagccacctgagcaagcagggccaggaggtggagcccccaagaagaggccctgctgtgcccccagcccggcccccaacagcccaggaggtgtgctacctgcgggcccagcaggcccagagggccagcgccagcctgctgcaggccccagcccggctggccgagaagagccccagcgtgcacatcagcgcccctggagagaagagaagaattgcccacatccccaacccccggctggccgccgcccccaccggggccaagaggaccctggccgccagcggcagccagagcagcaatggacctgagcccggcggccagcagctgaagaccaggaccctgagcggcatggccagcaagaccaccaccaccatcatccccaagagaattgcccacagccccagcctgcagagcctgaagaagcccatcatccccaaggagtttggaggcaaggtgcccaccgtcatccggcagcgctacctgaacctcttcatcgaggagtgcctgaagttctgcaccagcaaccaggaggccatcgagaaggccctgaatgaggagaaggtggcctatgacaggagccccagcaagaacatctacctgaatgtggccgtgaacaccctgaagaagctgcggggcctggcccccagcgctgtgcccggcctgagcaagaccagcggccggcgggtggtgtcccatgaggtggtgctgggcggccgcctggccgccaagaccagcttcagcctgagccggcccagcagcccccgggtggaggacctgaagggagctgccctgtacagccggctgcgggagtacctgctgacccaggaccagctgaaggaaaatggctaccccttcccccaccctgagaggcctgggggcgccatcatcttcaccgctgaggagaagaggcccaaggacagcagctgcaggacctgctgccgctgtggcacagagtacctggtgagcagcagcggccgctgcatcagagatgaggagtgctactaccactggggccgcctgcggaggaacagagtggccggcggctgggagacccagtacatgtgctgcagcgctgctgctggctctgtgggctgccaggtggccaagcagcacgtgcaggacggcaggaaggagcggctggagggctttgtgaagacctttgagaaggagctgagcggggacacccaccctggcatctatgccctggactgtgagatgagctacaccacctacggcctggagctgaccagggtgacagtggtggacacagatgtgcacgtggtgtatgacacctttgtgaagccagacaatgagatcgtggactacaacacccgcttcagcggcgtgacagaagctgacctggccgacacctctgtgaccctgagagatgtgcaggccgtgctgctgtccatgttttctgctgacaccatcctgattggccacagcctggagagtgacctgctggccctgaaggtgatccacagcacagtggtggacacctctgtgctcttcccccaccggctgggcctgccctacaagaggagcctgaggaacctgatggctgactacctgcggcagatcatccaggacaacgtggatggccacagcagcagtgaagatgctggggcctgcatgcacctggtgatctggaaggtgagagaagatgccaagaccaagaggtag

SEQ ID NO: 205166 - DNA, 1482 bp, Artificial Sequence
  derived and/or modified sequence
atgggcagccacagcccctgtgcccacaccccctgtgcccccccagcccccaccggggccaagaggaccctggccgccagcggcagccagagcagcaatggacctgagcccggcggccagcagctgaagaccaggaccctgagcggcatggccagcaagaccaccaccaccatcatccccaagagaattgcccacagccccagcctgcagagcctgaagaagcccatcatccccaaggagtttggaggcaaggtgcccaccgtcatccggcagcgctacctgaacctcttcatcgaggagtgcctgaagttctgcaccagcaaccaggaggccatcgagaaggccctgaatgaggagaaggtggcctatgacaggagccccagcaagaacatctacctgaatgtggccgtgaacaccctgaagaagctgcggggcctggcccccagcgctgtgcccggcctgagcaagaccagcggccggcgggtggtgtcccatgaggtggtgctgggcggccgcctggccgccaagaccagcttcagcctgagccggcccagcagcccccgggtggaggacctgaagggagctgccctgtacagccggctgcgggagtacctgctgacccaggaccagctgaaggaaaatggctaccccttcccccaccctgagaggcctgggggcgccatcatcttcaccgctgaggagaagaggcccaaggacagcagctgcaggacctgctgccgctgtggcacagagtacctggtgagcagcagcggccgctgcatcagagatgaggagtgctactaccactggggccgcctgcggaggaacagagtggccggcggctgggagacccagtacatgtgctgcagcgctgctgctggctctgtgggctgccaggtggccaagcagcacgtgcaggacggcaggaaggagcggctggagggctttgtgaagacctttgagaaggagctgagcggggacacccaccctggcatctatgccctggactgtgagatgagctacaccacctacggcctggagctgaccagggtgacagtggtggacacagatgtgcacgtggtgtatgacacctttgtgaagccagacaatgagatcgtggactacaacacccgcttcagcggcgtgacagaagctgacctggccgacacctctgtgaccctgagagatgtgcaggccgtgctgctgtccatgttttctgctgacaccatcctgattggccacagcctggagagtgacctgctggccctgaaggtgatccacagcacagtggtggacacctctgtgctcttcccccaccggctgggcctgccctacaagaggagcctgaggaacctgatggctgactacctgcggcagatcatccaggacaacgtggatggccacagcagcagtgaagatgctggggcctgcatgcacctggtgatctggaaggtgagagaagatgccaagaccaagaggtag

SEQ ID NO: 205167 - DNA, 3666 bp, Artificial Sequence
  derived and/or modified sequence
atgctgcggagcaccggcttcttccgggccatcgactgcccctactggagtggtgcccctggcggcccttgccgacgcccgtactgccacttcaggcaccggggtgctcgaggctcaggcgcccccggtgatggcggggaagctcctcccgccgccgggttgggctatgacccatataaccccgaactgccgaaaccgccggcccagagagagaatggaactctaggactgggcgaggagcctaggcctgacgtcctggaactcgagctagtcaaccaggccatagaggcagttcggagtgaggtcgaacttgagcagaggagatacagggagctcctggaaactacaagagaacataggtctgctgaggcccccgcactcgcgcccagaggaccgaacgccagcccgaccgtgggccccgacgaggacgcgtttcctttggcatttgactattccccaggttcccatggcttactgtcacctgatgcaggttaccaacctaccccactggctgcaccggctgaacctggttccaaatactccctggcgtctctcgatcgcgggcaaggcagaggcggcggtggtggcggcgccctggagtacgtgcctaaggccgtcagccaacctcggcgccattctaggccagttccaagcggaaagtatgtcgtcgacaactctcgacctcccaccgacctcgaatatgatccactgtccaactactcggcgcgccatctgagccgcgcgtctagcagggatgaacgcgccgctaaacgtcctcgcggctctcgagggtccgagccctacacgccagcaccaaaaaaactctgcgacccttttggctcctgtgacgctagatttagcgactcggaggacgaggcagcgaccgtgcctggaaacgagcctacaaccgcttctacccctaaggctcgggcagaccctgagattaaggcaacgggccaaccgccttctaaggagggactggaagcagagggtggaggtctgcgggagacgaaggagacagctgtgcagtgcgatgtcggtgatctgcaacctcctcccgctaaaccagcaagtcccgctcaggtgcagagctcccaagatgggggctgtccaaaggagggaaagcccaagaagaagaagaccggagctccccccgccccatcatgcaaagatggagcccaagggaaagacaagaccaaggataaggggagagggcgtccagtggaaaaaccaagagctgacaaaaagggaccacaggccagcagccccaggcggaaggctgagcgtcctgagggaactaaaaagaagccttcctccgctacacctgtagcaacttctggaaagggccggccggatcggcccgctagacggccgagtcccacctctggggatagcagacccgccgcggggaggggccctcctcggccgctccagctgcccgatcgtaagagcactaaagcccctagtgggaaactggtggagaggaaggcccgctccctggacgagggagcaagtcaggacgcccctaagctcaagaagcgggccctaagccatgccgatttgttcggagacgagtctgaagatgaggccgcagggccaggagtcccgtcagtatggccttctgccctccctagcttgtcgtctgacagcgattccgatagtgatagtagcctcggcttccccgaggcgcaagggccacctaagagactcaaggcaagcccacccccgagtcccgcaccatcctcatcgtcctcttcatccagttctaccagctccgccggcgctgacgtggattattctgccctggagaaggaagtcgactttgactcagatccaatggaggaatgcctccggatattcaatgaaagcacctccgtcaaaacggaagatagaggtcgattagcccgacaaccccccaaggaggaaaaatcagaggagaaaggactttcaggtcttacaactctctttccagggcagaaaaggcgcatctctcacctgagtaagcaggggcaggaggtggagcctcctcgtcgcggccctgcggtgccccctgcacgacctcccaccgcccaagaggtttgttatcttagggcccagcaagcacagcgggcttccgccagccttctccaggctcccgcaagactggctgaaaagagcccttctgtccatatatcggcaccaggagagaaacggcgcatcgcccacataccaaaccccagattagctgctgcacccaccggggccaagcgtactctggcagcttctggaagccagagctccaacggaccagaaccaggaggccagcagctcaaaacacgcactttgtctggaatggctagcaaaaccaccaccactatcatccctaagcgaattgcacatagcccaagccttcagagtctgaaaaaaccaattatcccgaaagagtttggaggcaaagttcctacagtgattaggcaacgctatctaaatctttttattgaagagtgccttaagttttgcacctctaaccaggaagcaatagagaaggctttaaacgaggaaaaagtggcatacgaccgcagcccctccaaaaatatttaccttaatgtggcggtgaacacattaaagaagctgagagggcttgcgccatcagcagtgccgggtttgagtaaaacttctggtcgccgcgtagtgtcccatgaagtggtgctcggtggccgcttagcggccaaaaccagcttcagtcttagcaggccatcaagtccacgcgtggaggatcttaagggagcggccctgtatagcagactgcgcgagtatctgctgactcaggatcaattgaaggagaacggctaccccttccctcatcccgaacgcccaggtggagcaatcatctttacggcagaggagaagcgcccaaaggattcatcttgtaggacatgttgtcggtgcggaactgagtacttggtgagcagtagtggaagatgcataagggatgaagaatgttactatcactggggacggcttaggaggaatagggtggccggagggtgggaaactcaatatatgtgttgctccgccgcagctggaagcgtgggttgccaagtcgccaagcagcacgtgcaagacggaagaaaggagagacttgaaggcttcgtcaagaccttcgaaaaggaattaagcggcgatactcacccaggaatttatgctctagactgtgaaatgagttacacaacctacggactcgagctaacacgggtgacagttgtcgacaccgatgtccacgtggtgtacgataccttcgtgaaaccagataacgagattgtagactacaatacacgcttctccggtgttaccgaagctgacctggccgatactagcgttaccttgcgggatgtgcaggcagtgctactgagtatgttcagcgccgatacaattctgatcgggcactctctggagtcagacctgttagccctcaaggtgatccattccacggtggtagacacaagcgtgttgtttcctcatagactggggctgccttataaaagatctctgagaaatttgatggccgactacctcagacagataatccaagataacgtggacgggcacagcagctccgaagacgctggagcctgtatgcatttggtgatctggaaagtgcgcgaggatgcaaaaacaaagcgatag

SEQ ID NO: 205168 - DNA, 1482 bp, Artificial Sequence
  derived and/or modified sequence
atgggcagccacagcccctgcgcccacaccccctgcgccccccccgctcccaccggagcaaagcgtacgctcgctgcatccggctcccagtccagcaatggccccgaacccgggggtcagcaactgaagaccagaacactgagcgggatggcttctaaaacaacaacaactatcatccctaagcgcatcgctcattcaccatctttgcagagcctgaaaaagcccatcattcctaaagagttcggcggcaaagtgcccactgttatccgacagcggtacctgaatctcttcattgaagaatgcctgaagttctgcacctccaaccaagaggcaatcgagaaagcactcaacgaggagaaagtggcctatgaccggtccccaagtaagaatatatacctaaacgtggcagtaaatactctgaaaaagctaagggggttagcaccgtccgcagttcccggcctgtctaagacctctggccggcgcgtggtttcccacgaagttgtgctgggcggacgtctggccgcaaaaacaagctttagcctgtcacgaccctctagtccgcgggtcgaggacctgaagggggcagcactctatagtaggctgagggaatatctgctgacgcaggatcagctgaaagaaaacggctatcctttcccccaccctgagaggcctgggggcgccatcatcttcacagctgaggagaagaggcccaaggattcttcatgtcgtacttgctgccgctgtggaacagaatacttggtttcgtcctctggcagatgtattcgcgatgaggaatgttattaccattggggcaggctgagaaggaaccgcgtggccgggggctgggaaacacagtacatgtgctgtagcgccgccgctggctcagttggctgccaggttgccaaacagcacgtacaagatggacgcaaggagcgcctcgaagggttcgttaaaacattcgaaaaggagctgtccggcgacacacacccaggaatctacgctctggattgcgagatgagttatactacctatggtctcgagctaacacgggtgactgtagttgacactgacgtccacgtggtgtatgacactttcgtgaagcccgacaacgagatcgttgattacaacaccaggttttctggagtcacagaagctgatttggcagatacgagtgtcactctgcgggatgtgcaggcagtgctactctctatgttctctgctgatacaatcctgatagggcattcactcgaaagtgacctactggctctgaaggtgattcattccaccgtcgtggacaccagcgtcctatttcctcaccgcctgggtctgccttacaagaggagcctgcgaaacttaatggcagactaccttcggcagatcatccaggataatgtggacggacatagcagcagcgaggatgctggagcttgcatgcacctcgtgatctggaaggtccgcgaagatgctaagaccaagaggtag

SEQ ID NO: 205169 - DNA, 3666 bp, Artificial Sequence
  derived and/or modified sequence
atgctgagatcaacaggattcttccgtgccatcgactgtccgtattggtcaggggcacccggaggaccatgtcgaagaccgtattgccatttcagacatcgtggcgcacggggatcaggtgcacccggagatggaggcgaagcacctcccgctgccggactgggctatgatccctacaatccagaattgcccaagccccctgcacagagagagaatgggactctgggcctgggagaggagcctcgtccagacgtgctagagctggagctcgtgaaccaggcaatcgaggccgtccggagcgaagtagaactggagcagaggaggtatcgggagctgctagaaacaacccgagaacatcggtctgccgaagctccagcactagcccctagagggccaaatgcttctcctaccgtgggccctgatgaggacgccttcccactagcatttgattactcccccggaagccacgggttgctttcgccagatgccggatatcagccgacgcctctggctgcccctgcagagccaggttccaagtattcactggcaagcctggaccgtggccaaggcaggggaggaggcggagggggtgctctcgagtacgtgcctaaagccgtgtcccagcccaggcggcactcgcgccctgtacccagcggcaagtatgtggtggacaacagcagacccccaactgacttagagtacgatcccctctctaactattctgcacggcacctctcccgagcctcctctcgtgacgaacgcgctgccaaaagacccagaggtagcaggggctccgagccctacacacccgcaccaaagaaactctgtgaccctttcggtagctgtgatgcaagatttagcgatagcgaggacgaggccgcaactgtcccgggaaatgagcccacgacggcaagcacccctaaggctcgagccgaccctgagattaaagcaaccggccagcccccatctaaggaaggcctcgaggccgaggggggtggcctccgcgaaaccaaggaaacagcagtacagtgcgatgtcggtgacttgcagcccccacccgctaagccagcaagtcctgcccaagtgcaaagcagccaggacggaggctgcccaaaggaagggaagccaaaaaagaaaaagaccggggctccgccagccccatcctgtaaagacggagcccagggcaaagacaagacaaaagataagggccgagggaggccagtggagaagccccgtgctgacaagaaagggccacaggcgtcctcaccaagacgcaaggcggagcggcctgaaggaacgaaaaagaaacctagcagcgccacacctgtggctacctctggtaaaggcaggcccgatagacctgccagaaggccttcaccaacttccggtgactcgaggccagccgctggacggggaccacctcggccactacagctccccgacaggaaaagcactaaggccccaagtggtaaattggtagaacgtaaggctaggtccctcgatgaaggcgcaagccaagatgcacccaaactgaaaaagagagctctgtctcatgcggatttgttcggcgacgaatcggaggacgaagctgccggacctggcgttccctccgtctggccctcagctctacctagtctgtctagcgattcagactcagattctgactccagcctcggctttccagaagctcagggacctcctaaaagattgaaggcctctcctccacccagtcctgctccttcttcttcctctagtagcagttcctctacatcctccgctggggctgatgttgattactccgccttggagaaggaagtggattttgactccgatcccatggaagagtgtctaagaatcttcaatgaaagtacttcagtgaagacagaagacaggggaagactggccaggcagccacctaaagaggaaaagtctgaggagaaggggctgtccggattaaccacgctgtttcctggacagaaaagacggatctcacacttgagcaaacagggccaggaggtcgagccccctcgacgtggccctgccgttcccccagctcggccaccaactgcacaagaagtgtgttatctgcgagctcagcaggctcagcgggcttccgccagtttactgcaggctccagccagactggcagagaagagtccaagcgtccacatcagcgctcctggcgagaagaggaggattgcccacatccctaatcccagactcgccgcagccccaacaggagcaaagagaacactggccgcttccggttctcaatctagtaacgggcctgaacctgggggtcaacagctgaagaccagaacgctttcaggcatggcctctaagaccacaactaccatcatacctaaaaggattgcgcattctccgtccctgcagtccctgaagaagcctattattcccaaagaatttggagggaaggtccccaccgtaatcaggcagaggtatctgaacttatttatcgaggagtgtttaaagttttgtacaagtaatcaggaggccattgagaaagcactgaatgaggaaaaagtagcgtacgatagaagcccttcaaaaaacatttatttaaatgtggccgtgaacacactgaaaaagctacgcggtctggccccatctgccgtccctggactaagcaagacttctgggcgtcgtgtagtgtcgcatgaagtggttctgggcggacgacttgctgcaaaaacaagctttagtctgtccagacccagcagtccacgagtggaggacctgaaaggtgctgctctgtacagtcggctgagagaatatctgttgacgcaagatcagctgaaagagaacggctacccttttcctcacccagaaaggcctgggggagccatcatcttcacagcagaggaaaaaagacctaaggacagctcctgccggacgtgttgtcgctgtggcaccgagtatcttgtgtcttcctctggcagatgtattagggacgaggaatgttactaccactgggggaggctgcgcagaaacagggtcgcagggggatgggagacgcagtacatgtgctgtagtgctgctgccggaagcgtcggttgtcaggttgcgaagcaacatgtccaggacgggcgtaaagaaaggctggaaggcttcgtcaaaaccttcgagaaggagttgtctggggacacccacccgggtatttacgccctggactgcgagatgagctatacaacttacggtctcgagctgacccgcgtgacagtggtggacaccgacgtccacgtggtgtacgacacttttgttaaacctgacaacgagatcgtggattacaacacccgattcagcggagtgactgaagctgacctcgccgacacaagcgtgaccctgagggatgttcaggctgtactgctcagtatgttttcagccgataccatcctgattggtcacagcctggaaagcgatttgctggccctcaaggtcatacactcaaccgtagttgacactagcgtgctgtttcctcaccggttaggtcttccttacaagcggtcactgagaaacctcatggccgattatctgcgccagattattcaggacaacgtcgacggacatagcagcagtgaagacgccggagcatgcatgcaccttgtgatatggaaggtccgcgaagatgctaagaccaagaggtag

SEQ ID NO: 205170 - DNA, 1482 bp, Artificial Sequence
  derived and/or modified sequence
atgggtagccattcaccatgtgcacatacaccatgcgcacctcctgccccaacaggagctaagcgaaccctggccgcatccggctcccagtcctctaacggcccagagcctgggggacagcaactgaaaacaaggaccctgagtgggatggcctcaaaaaccacgactaccatcattccaaagaggattgcacattctccaagcctgcagagcctaaagaaacccattatcccaaaggagtttggcggaaaagtccctacggtcatccgccagagatacttgaaccttttcatcgaggaatgtctcaagttttgtacgtcaaaccaagaggctattgagaaggccttgaacgaggagaaggtcgcctacgaccggtccccaagcaaaaatatctacctgaatgtagctgtgaatacactgaaaaagctgcgaggactggcaccctccgcagtccctggcctgtccaaaacctcagggaggcgtgtggtgtcccatgaagtggtgcttggaggacgcttggctgctaagacctcatttagtctgagccgcccaagctcccctagggtagaagaccttaagggagcagccttatactctcggctgcgtgagtacttgttgactcaagaccagctcaaggaaaacgggtatccattcccccacccagaaaggccaggaggagcaatcatatttacggcagaggaaaagcgccctaaggacagtagttgccgcacttgctgtcgatgtggcaccgagtatcttgtttcctcttctggcagatgcattcgggacgaagagtgttactaccactggggtcggttacggcgtaacagagtggcgggtgggtgggagacacagtacatgtgctgcagtgccgctgccggttcagttggctgtcaggttgcgaagcagcacgtgcaagatggtcgcaaggagcgcctggaaggctttgtgaagacctttgagaaagaattgtccggcgatacacatccaggaatatatgctctagactgtgagatgagctacaccacttacggcttggagttgacccgggtgacagtagtcgacacggacgtacatgtcgtttacgacacattcgttaagcccgataacgaaatagtagactacaacaccagattctccggcgtgacagaggcagatctggctgacacaagcgttactctgagggacgtccaagccgtgttgctctcaatgttctctgcagacaccattttaattggccatagtctcgagagtgatttgctggctttgaaagtcatccactccactgtggtggacacttcagtgctcttcccacatcgcctcggactgccatacaagaggagtctgcgcaacctgatggctgactacctgcggcaaatcatccaggacaacgtggacgggcattcgtcttctgaagatgctggcgcttgtatgcatctcgtgatttggaaagtgcgggaagatgcaaaaaccaagcggtag

SEQ ID NO: 205171 - DNA, 4581 bp, Artificial Sequence
  derived and/or modified sequence
ggtccgtgaggcgcgggcggcggcgaccgcggcgccagtgagggggccctggggcccgggcggctccgggccggggccccgccgcgggacggaccatgctacgctccactggcttcttccgggccattgactgcccctattggtctggggcgcccggggggccctgccggcggccctactgccacttccggcaccgcggggcccggggctccggcgcgcccggtgacggcggagaggcgccccccgcagcagggctgggttacgacccctacaaccctgagctgcccaagccccccgcgcagagggagaatggcaccctgggcctgggggaggagccgcgcccggatgtgctggagttggagctggtcaaccaggccatcgaggccgtgcgcagtgaggtggagctggagcagcggcgctaccgggagctgctggagacgacccgtgagcaccgctccgccgaggcccccgccctggcgccccgcggccccaacgccagccccactgtgggcccggacgaggatgccttcccactggccttcgactacagccccggcagccacggcctattaagccctgatgccggctaccagcccaccccactggccgcccctgccgagccgggcagcaagtactcgctggcgtccctggacaggggtcagggcagaggtggagggggtggcggtgccctggaatacgtccccaaggctgtgagccagccccggcggcacagccgccccgttcccagtggcaagtacgtggtggacaactccaggccacccacagacctggagtatgaccctctctccaactactcggcccggcacctcagcagggccagctcccgggatgagcgggccgccaagcggccccggggctcccgcggcagtgagccctacacacctgctcccaagaagctctgtgacccctttggcagttgcgatgcaaggttctcagactcagaagatgaggccgccacggtcccaggtaacgagcccaccacggccagcacccccaaagccagggccgaccctgagatcaaggccaccgggcagccaccctccaaagagggcctggaggccgaggggggcggcctgcgggagaccaaggagacggccgtgcagtgcgacgtgggggacctccagccgcccccagccaagcccgcctccccagcccaggtccagtcctcacaggatgggggctgccccaaggagggaaaacccaagaagaaaaaaaccggggccccacctgcccccagctgcaaagacggggcccaggggaaggacaagaccaaggacaagggccgagggcggcctgtggagaagccccgtgcggacaagaagggcccgcaggccagcagcccccggcgcaaggcagagcggccggaagggaccaagaagaagccatcttcggccactcctgtggccacctcagggaaagggaggcctgaccggccagcgcggcggccgagccccacaagcggggactcccgaccggcggccggcagaggcccaccccgccccctccagctgcccgacaggaagagcaccaaggccccgtcggggaagctagtggagcggaaagcccgctcactagacgagggcgcctcccaggacgcccccaagctgaagaagcgggccctgagccacgccgacctctttggggacgagagtgaggacgaggccgcagggccaggggtgccgagcgtgtggccctctgccctccccagcctcagctcggactcagactccgactcagactccagcctgggcttcccggaggcgcaggggccgcccaagcggctcaaggcctccccgcccccctcccccgccccatcctcctcctcctcctcctcctcctccacctccagcgcgggggcggatgtggactactcggccctggagaaggaggtggactttgactccgaccccatggaggagtgcctgcggatcttcaacgagtccaccagcgtcaagacggaggacagaggccggctggcccggcagccccccaaggaagagaagagtgaggagaaggggctttcgggtctgaccactctgttccccgggcagaagaggaggatctcccacctttccaagcaaggccaggaggtggagcccccgaggaggggtcccgcggtgcccccggcccggcccccgacggcgcaggaggtgtgctacctgcgggcccagcaggcgcagagggcatcggcgagcttgctgcaggcccccgccaggctggcagagaagtcgccctccgtccacatttccgcccctggcgagaagaggaggatcgcccacatccccaacccccgcctggctgcagcccccacaggtgccaagaggacccttgcggccagcggcagccagtcctccaacggccctgagccaggtggccagcagctgaaaacacgcacattgtcggggatggcgtccaagactaccaccaccatcatccctaagcgaatcgcccacagtccatccttacagagtttaaagaaacccattatccccaaagagtttgggggcaaagtccccaccgtcatccgccagcgctatctcaacctgttcatcgaggagtgtctcaagttctgtacctccaaccaggaggccatagagaaggcactgaacgaggagaaggtggcctatgaccgcagccccagcaagaacatctacctgaatgtggccgtgaacaccctcaagaagctcaggggcctggcccccagcgctgtgcccggcctcagcaaaaccagtggccgcagggttgtgtcccacgaggtggtgttggggggcaggttggccgccaagaccagcttctcgctcagccgtccaagcagcccccgggtggaggacctgaaaggggctgccctgtacagccgcctcagggagtacctgctcacccaggaccagctcaaggagaacggctaccccttcccgcacccagagcggcccgggggcgcaatcatcttcacagctgaggagaagaggcccaaggactcttcctgcaggacctgctgccgctgtggcaccgagtacctcgtgtcctcttcaggccgctgcatccgggacgaggagtgttattaccactggggacggctgcgccggaaccgggtggccggaggctgggagacccagtacatgtgctgctcggctgccgccggctctgtcggctgccaagtcgcaaagcaacacgtgcaggatggccggaaggagcgccttgagggcttcgtgaagacctttgagaaagagctctcaggagacacccacccggggatctacgccctggactgcgagatgtcctacaccacatatggcctggagctgacgcgcgtcacggtggtcgacacggacgtgcacgtggtttatgacaccttcgtgaagcctgacaacgagatcgtggactacaacaccaggttttcgggggtgacggaggctgaccttgccgacacaagtgtcacgctgcgtgacgtccaggccgttctgctgagcatgttcagcgctgacaccatcctcatcggacacagcctggagagcgacctcctggccctgaaggtcatccacagcaccgtggtggacacgtctgtgctcttcccccaccgcctgggcctcccctacaagcggtccctgcggaacctcatggccgactacctcagacagatcatccaggacaatgtggatgggcacagctccagcgaggacgccggcgcctgcatgcacctggtgatctggaaggttcgagaagacgccaagaccaagcgatgacgcctgcccgcctcccacccgcctctcctgccgtcccgctggtccttagccccatgcctcttccaaaacagtgcaataaatctccggtaacccgtccacctggccgaggcagcccagagcagcgggatgagctggcggccagagaacgcccagcccagcccacccccgctcacgtcctgccgcacccctccgccggtccccaccctctgccccccagccctctggcgtctctagaaactgctgctgatggagaccaggacagagcccgcccccacccggcccgcagcccctcctgcccctcctgccaggccctccctcccgggtggtggccggcacctctgctcctcacgtgggtcgcggggcgggcttgtcccaggtttgtttgagacagtctttttttattttgtattgttatttttattatttttaatttaaacctgatgacttgcacagcatctttcccaccgggaagagcgggcctgctgccttccctcctgcggggtgggggtgggacagaccccagtgggggccagggccacactcagcgcagtgtgggctggacccgcctctgtgctccaggggctggccggtcttcgggggcgccggcttccaccactcgccgccccacccctgcactccgtgacctctgagaacccagctggcccctcgttagccccagggtctgccgtctagagggagcccaccggcctccggacactgtcttcccgctagagccccgtcctcctctgcggggctctccggacccccttccccctcacctccaggcagggacagaataaatgtttgtatggattttaga

SEQ ID NO: 205172 - DNA, 4348 bp, Artificial Sequence
  derived and/or modified sequence
atgctgccttccagcaccaggctgggttacgacccctacaaccctgagctgcccaagccccccgcgcagagggagaatggcaccctgggcctgggggaggagccgcgcccggatgtgctggagttggagctggtcaaccaggccatcgaggccgtgcgcagtgaggtggagctggagcagcggcgctaccgggagctgctggagacgacccgtgagcaccgctccgccgaggcccccgccctggcgccccgcggccccaacgccagccccactgtgggcccggacgaggatgccttcccactggccttcgactacagccccggcagccacggcctattaagccctgatgccggctaccagcccaccccactggccgcccctgccgagccgggcagcaagtactcgctggcgtccctggacaggggtcagggcagaggtggagggggtggcggtgccctggaatacgtccccaaggctgtgagccagccccggcggcacagccgccccgttcccagtggcaagtacgtggtggacaactccaggccacccacagacctggagtatgaccctctctccaactactcggcccggcacctcagcagggccagctcccgggatgagcgggccgccaagcggccccggggctcccgcggcagtgagccctacacacctgctcccaagaagctctgtgacccctttggcagttgcgatgcaaggttctcagactcagaagatgaggccgccacggtcccaggtaacgagcccaccacggccagcacccccaaagccagggccgaccctgagatcaaggccaccgggcagccaccctccaaagagggcctggaggccgaggggggcggcctgcgggagaccaaggagacggccgtgcagtgcgacgtgggggacctccagccgcccccagccaagcccgcctccccagcccaggtccagtcctcacaggatgggggctgccccaaggagggaaaacccaagaagaaaaaaaccggggccccacctgcccccagctgcaaagacggggcccaggggaaggacaagaccaaggacaagggccgagggcggcctgtggagaagccccgtgcggacaagaagggcccgcaggccagcagcccccggcgcaaggcagagcggccggaagggaccaagaagaagccatcttcggccactcctgtggccacctcagggaaagggaggcctgaccggccagcgcggcggccgagccccacaagcggggactcccgaccggcggccggcagaggcccaccccgccccctccagctgcccgacaggaagagcaccaaggccccgtcggggaagctagtggagcggaaagcccgctcactagacgagggcgcctcccaggacgcccccaagctgaagaagcgggccctgagccacgccgacctctttggggacgagagtgaggacgaggccgcagggccaggggtgccgagcgtgtggccctctgccctccccagcctcagctcggactcagactccgactcagactccagcctgggcttcccggaggcgcaggggccgcccaagcggctcaaggcctccccgcccccctcccccgccccatcctcctcctcctcctcctcctcctccacctccagcgcgggggcggatgtggactactcggccctggagaaggaggtggactttgactccgaccccatggaggagtgcctgcggatcttcaacgagtccaccagcgtcaagacggaggacagaggccggctggcccggcagccccccaaggaagagaagagtgaggagaaggggctttcgggtctgaccactctgttccccgggcagaagaggaggatctcccacctttccaagcaaggccaggaggtggagcccccgaggaggggtcccgcggtgcccccggcccggcccccgacggcgcaggaggtgtgctacctgcgggcccagcaggcgcagagggcatcggcgagcttgctgcaggcccccgccaggctggcagagaagtcgccctccgtccacatttccgcccctggcgagaagaggaggatcgcccacatccccaacccccgcctggctgcagcccccacaggtgccaagaggacccttgcggccagcggcagccagtcctccaacggccctgagccaggtggccagcagctgaaaacacgcacattgtcggggatggcgtccaagactaccaccaccatcatccctaagcgaatcgcccacagtccatccttacagagtttaaagaaacccattatccccaaagagtttgggggcaaagtccccaccgtcatccgccagcgctatctcaacctgttcatcgaggagtgtctcaagttctgtacctccaaccaggaggccatagagaaggcactgaacgaggagaaggtggcctatgaccgcagccccagcaagaacatctacctgaatgtggccgtgaacaccctcaagaagctcaggggcctggcccccagcgctgtgcccggcctcagcaaaaccagtggccgcagggttgtgtcccacgaggtggtgttggggggcaggttggccgccaagaccagcttctcgctcagccgtccaagcagcccccgggtggaggacctgaaaggggctgccctgtacagccgcctcagggagtacctgctcacccaggaccagctcaaggagaacggctaccccttcccgcacccagagcggcccgggggcgcaatcatcttcacagctgaggagaagaggcccaaggactcttcctgcaggacctgctgccgctgtggcaccgagtacctcgtgtcctcttcaggccgctgcatccgggacgaggagtgttattaccactggggacggctgcgccggaaccgggtggccggaggctgggagacccagtacatgtgctgctcggctgccgccggctctgtcggctgccaagtcgcaaagcaacacgtgcaggatggccggaaggagcgccttgagggcttcgtgaagacctttgagaaagagctctcaggagacacccacccggggatctacgccctggactgcgagatgtcctacaccacatatggcctggagctgacgcgcgtcacggtggtcgacacggacgtgcacgtggtttatgacaccttcgtgaagcctgacaacgagatcgtggactacaacaccaggttttcgggggtgacggaggctgaccttgccgacacaagtgtcacgctgcgtgacgtccaggccgttctgctgagcatgttcagcgctgacaccatcctcatcggacacagcctggagagcgacctcctggccctgaaggtcatccacagcaccgtggtggacacgtctgtgctcttcccccaccgcctgggcctcccctacaagcggtccctgcggaacctcatggccgactacctcagacagatcatccaggacaatgtggatgggcacagctccagcgaggacgccggcgcctgcatgcacctggtgatctggaaggttcgagaagacgccaagaccaagcgatgacgcctgcccgcctcccacccgcctctcctgccgtcccgctggtccttagccccatgcctcttccaaaacagtgcaataaatctccggtaacccgtccacctggccgaggcagcccagagcagcgggatgagctggcggccagagaacgcccagcccagcccacccccgctcacgtcctgccgcacccctccgccggtccccaccctctgccccccagccctctggcgtctctagaaactgctgctgatggagaccaggacagagcccgcccccacccggcccgcagcccctcctgcccctcctgccaggccctccctcccgggtggtggccggcacctctgctcctcacgtgggtcgcggggcgggcttgtcccaggtttgtttgagacagtctttttttattttgtattgttatttttattatttttaatttaaacctgatgacttgcacagcatctttcccaccgggaagagcgggcctgctgccttccctcctgcggggtgggggtgggacagaccccagtgggggccagggccacactcagcgcagtgtgggctggacccgcctctgtgctccaggggctggccggtcttcgggggcgccggcttccaccactcgccgccccacccctgcactccgtgacctctgagaacccagctggcccctcgttagccccagggtctgccgtctagagggagcccaccggcctccggacactgtcttcccgctagagccccgtcctcctctgcggggctctccggacccccttccccctcacctccaggcagggacagaataaatgtttgtatggattttaga

SEQ ID NO: 205173 - DNA, 1801 bp, Artificial Sequence
  derived and/or modified sequence
aatgagcaggtgggggcacccgagacccttcggtcctctgtccgggagccagggcctttccctcagacatcgacgccttgggcttggggtcagaacacgtggcagaggcctggaccaccccaccggtgacgtgtcctcagcggcctccgcagcctgacctgtgtcctctgcctcgatggacttgcctgaaggcagctagagcctggtgctccgccacgtggtgatgggcagccactcgccctgtgcccacaccccctgtgccccgccagcccccacaggtgccaagaggacccttgcggccagcggcagccagtcctccaacggccctgagccaggtggccagcagctgaaaacacgcacattgtcggggatggcgtccaagactaccaccaccatcatccctaagcgaatcgcccacagtccatccttacagagtttaaagaaacccattatccccaaagagtttgggggcaaagtccccaccgtcatccgccagcgctatctcaacctgttcatcgaggagtgtctcaagttctgtacctccaaccaggaggccatagagaaggcactgaacgaggagaaggtggcctatgaccgcagccccagcaagaacatctacctgaatgtggccgtgaacaccctcaagaagctcaggggcctggcccccagcgctgtgcccggcctcagcaaaaccagtggccgcagggttgtgtcccacgaggtggtgttggggggcaggttggccgccaagaccagcttctcgctcagccgtccaagcagcccccgggtggaggacctgaaaggggctgccctgtacagccgcctcagggagtacctgctcacccaggaccagctcaaggagaacggctaccccttcccgcacccagagcggcccgggggcgcaatcatcttcacagctgaggagaagaggcccaaggactcttcctgcaggacctgctgccgctgtggcaccgagtacctcgtgtcctcttcaggccgctgcatccgggacgaggagtgttattaccactggggacggctgcgccggaaccgggtggccggaggctgggagacccagtacatgtgctgctcggctgccgccggctctgtcggctgccaagtcgcaaagcaacacgtgcaggatggccggaaggagcgccttgagggcttcgtgaagacctttgagaaagagctctcaggagacacccacccggggatctacgccctggactgcgagatgtcctacaccacatatggcctggagctgacgcgcgtcacggtggtcgacacggacgtgcacgtggtttatgacaccttcgtgaagcctgacaacgagatcgtggactacaacaccaggttttcgggggtgacggaggctgaccttgccgacacaagtgtcacgctgcgtgacgtccaggccgttctgctgagcatgttcagcgctgacaccatcctcatcggacacagcctggagagcgacctcctggccctgaaggtcatccacagcaccgtggtggacacgtctgtgctcttcccccaccgcctgggcctcccctacaagcggtccctgcggaacctcatggccgactacctcagacagatcatccaggacaatgtggatgggcacagctccagcgaggacgccggcgcctgcatgcacctggtgatctggaaggttcgagaagacgccaagaccaagcgatgacgcctgcccgcctcccacccgcctctcctgccgtcccgctggtccttagccccatgcctcttccaaaacagtgcaataaatctccggtaacccgtc

SEQ ID NO: 205174 - DNA, 3666 bp, Artificial Sequence
  derived and/or modified sequence
atgctgagaagcaccggcttcttcagagccatcgactgcccctactggagcggcgcccccggcggcccctgcagaagaccctactgccacttcagacacagaggcgccagaggcagcggcgcccccggcgacggcggcgaggccccccccgccgccggcctgggctacgacccctacaaccccgagctgcccaagccccccgcccagagagagaacggcaccctgggcctgggcgaggagcccagacccgacgtgctggagctggagctggtgaaccaggccatcgaggccgtgagaagcgaggtggagctggagcagagaagatacagagagctgctggagaccaccagagagcacagaagcgccgaggcccccgccctggcccccagaggccccaacgccagccccaccgtgggccccgacgaggacgccttccccctggccttcgactacagccccggcagccacggcctgctgagccccgacgccggctaccagcccacccccctggccgcccccgccgagcccggcagcaagtacagcctggccagcctggacagaggccagggcagaggcggcggcggcggcggcgccctggagtacgtgcccaaggccgtgagccagcccagaagacacagcagacccgtgcccagcggcaagtacgtggtggacaacagcagaccccccaccgacctggagtacgaccccctgagcaactacagcgccagacacctgagcagagccagcagcagagacgagagagccgccaagagacccagaggcagcagaggcagcgagccctacacccccgcccccaagaagctgtgcgaccccttcggcagctgcgacgccagattcagcgacagcgaggacgaggccgccaccgtgcccggcaacgagcccaccaccgccagcacccccaaggccagagccgaccccgagatcaaggccaccggccagccccccagcaaggagggcctggaggccgagggcggcggcctgagagagaccaaggagaccgccgtgcagtgcgacgtgggcgacctgcagcccccccccgccaagcccgccagccccgcccaggtgcagagcagccaggacggcggctgccccaaggagggcaagcccaagaagaagaagaccggcgccccccccgcccccagctgcaaggacggcgcccagggcaaggacaagaccaaggacaagggcagaggcagacccgtggagaagcccagagccgacaagaagggcccccaggccagcagccccagaagaaaggccgagagacccgagggcaccaagaagaagcccagcagcgccacccccgtggccaccagcggcaagggcagacccgacagacccgccagaagacccagccccaccagcggcgacagcagacccgccgccggcagaggcccccccagacccctgcagctgcccgacagaaagagcaccaaggcccccagcggcaagctggtggagagaaaggccagaagcctggacgagggcgccagccaggacgcccccaagctgaagaagagagccctgagccacgccgacctgttcggcgacgagagcgaggacgaggccgccggccccggcgtgcccagcgtgtggcccagcgccctgcccagcctgagcagcgacagcgacagcgacagcgacagcagcctgggcttccccgaggcccagggcccccccaagagactgaaggccagccccccccccagccccgcccccagcagcagcagcagcagcagcagcagcaccagcagcgccggcgccgacgtggactacagcgccctggagaaggaggtggacttcgacagcgaccccatggaggagtgcctgagaatcttcaacgagagcaccagcgtgaagaccgaggacagaggcagactggccagacagccccccaaggaggagaagagcgaggagaagggcctgagcggcctgaccaccctgttccccggccagaagagaagaatcagccacctgagcaagcagggccaggaggtggagccccccagaagaggccccgccgtgccccccgccagaccccccaccgcccaggaggtgtgctacctgagagcccagcaggcccagagagccagcgccagcctgctgcaggcccccgccagactggccgagaagagccccagcgtgcacatcagcgcccccggcgagaagagaagaatcgcccacatccccaaccccagactggccgccgcccccaccggcgccaagagaaccctggccgccagcggcagccagagcagcaacggccccgagcccggcggccagcagctgaagaccagaaccctgagcggcatggccagcaagaccaccaccaccatcatccccaagagaatcgcccacagccccagcctgcagagcctgaagaagcccatcatccccaaggagttcggcggcaaggtgcccaccgtgatcagacagagatacctgaacctgttcatcgaggagtgcctgaagttctgcaccagcaaccaggaggccatcgagaaggccctgaacgaggagaaggtggcctacgacagaagccccagcaagaacatctacctgaacgtggccgtgaacaccctgaagaagctgagaggcctggcccccagcgccgtgcccggcctgagcaagaccagcggcagaagagtggtgagccacgaggtggtgctgggcggcagactggccgccaagaccagcttcagcctgagcagacccagcagccccagagtggaggacctgaagggcgccgccctgtacagcagactgagagagtacctgctgacccaggaccagctgaaggagaacggctaccccttcccccaccccgagagacccggcggcgccatcatcttcaccgccgaggagaagagacccaaggacagcagctgcagaacctgctgcagatgcggcaccgagtacctggtgagcagcagcggcagatgcatcagagacgaggagtgctactaccactggggcagactgagaagaaacagagtggccggcggctgggagacccagtacatgtgctgcagcgccgccgccggcagcgtgggctgccaggtggccaagcagcacgtgcaggacggcagaaaggagagactggagggcttcgtgaagaccttcgagaaggagctgagcggcgacacccaccccggcatctacgccctggactgcgagatgagctacaccacctacggcctggagctgaccagagtgaccgtggtggacaccgacgtgcacgtggtgtacgacaccttcgtgaagcccgacaacgagatcgtggactacaacaccagattcagcggcgtgaccgaggccgacctggccgacaccagcgtgaccctgagagacgtgcaggccgtgctgctgagcatgttcagcgccgacaccatcctgatcggccacagcctggagagcgacctgctggccctgaaggtgatccacagcaccgtggtggacaccagcgtgctgttcccccacagactgggcctgccctacaagagaagcctgagaaacctgatggccgactacctgagacagatcatccaggacaacgtggacggccacagcagcagcgaggacgccggcgcctgcatgcacctggtgatctggaaggtgagagaggacgccaagaccaagagatag

SEQ ID NO: 205175 - DNA, 1482 bp, Artificial Sequence
  derived and/or modified sequence
atgggcagccacagcccctgcgcccacaccccctgcgccccccccgcccccaccggcgccaagagaaccctggccgccagcggcagccagagcagcaacggccccgagcccggcggccagcagctgaagaccagaaccctgagcggcatggccagcaagaccaccaccaccatcatccccaagagaatcgcccacagccccagcctgcagagcctgaagaagcccatcatccccaaggagttcggcggcaaggtgcccaccgtgatcagacagagatacctgaacctgttcatcgaggagtgcctgaagttctgcaccagcaaccaggaggccatcgagaaggccctgaacgaggagaaggtggcctacgacagaagccccagcaagaacatctacctgaacgtggccgtgaacaccctgaagaagctgagaggcctggcccccagcgccgtgcccggcctgagcaagaccagcggcagaagagtggtgagccacgaggtggtgctgggcggcagactggccgccaagaccagcttcagcctgagcagacccagcagccccagagtggaggacctgaagggcgccgccctgtacagcagactgagagagtacctgctgacccaggaccagctgaaggagaacggctaccccttcccccaccccgagagacccggcggcgccatcatcttcaccgccgaggagaagagacccaaggacagcagctgcagaacctgctgcagatgcggcaccgagtacctggtgagcagcagcggcagatgcatcagagacgaggagtgctactaccactggggcagactgagaagaaacagagtggccggcggctgggagacccagtacatgtgctgcagcgccgccgccggcagcgtgggctgccaggtggccaagcagcacgtgcaggacggcagaaaggagagactggagggcttcgtgaagaccttcgagaaggagctgagcggcgacacccaccccggcatctacgccctggactgcgagatgagctacaccacctacggcctggagctgaccagagtgaccgtggtggacaccgacgtgcacgtggtgtacgacaccttcgtgaagcccgacaacgagatcgtggactacaacaccagattcagcggcgtgaccgaggccgacctggccgacaccagcgtgaccctgagagacgtgcaggccgtgctgctgagcatgttcagcgccgacaccatcctgatcggccacagcctggagagcgacctgctggccctgaaggtgatccacagcaccgtggtggacaccagcgtgctgttcccccacagactgggcctgccctacaagagaagcctgagaaacctgatggccgactacctgagacagatcatccaggacaacgtggacggccacagcagcagcgaggacgccggcgcctgcatgcacctggtgatctggaaggtgagagaggacgccaagaccaagagatag

SEQ ID NO: 205176 - protein, 477 aa, Artificial Sequence
  derived and/or modified sequence
MPGSDTALTVDRTYSYPGRHHRCKSRVERHDMNTLSLPLNIRRGGSDTNLNFDVPDGILDFHKVKLTADSLKQKILKVTEQIKIEQTSRDGNVAEYLKLVNNADKQQAGRIKQVFEKKNQKSAHSIAQLQKKLEQYHRKLREIEQNGASRSSKDISKDHLKDIHRSLKDAHVKSRTAPHCMESSKSGMPGVSLTPPVFVFNKSREFANLIRNKFGSADNIAHLKNSLEEFRPEASARAYGGSATIVNKPKYGSDDECSSGTSGSADSNGNQSFGAGGASTLDSQGKLAVILEELREIKDTQAQLAEDIEALKVQFKREYGFISQTLQEERYRYERLEDQLHDLTDLHQHETANLKQELASIEEKVAYQAYERSRDIQEALESCQTRISKLELHQQEQQALQTDTVNAKVLLGRCINVILAFMTVILVCVSTIAKFVSPMMKSRCHILGTFFAVTLLAIFCKNWDHILCAIERMIIPR

SEQ ID NO: 205177 - DNA, 1434 bp, Artificial Sequence
  derived and/or modified sequence
atgcccggcagcgacaccgccctgaccgtggacagaacctacagctaccccggcagacaccacagatgcaagagcagagtggagagacacgacatgaacaccctgagcctgcccctgaacatcagaagaggcggcagcgacaccaacctgaacttcgacgtgcccgacggcatcctggacttccacaaggtgaagctgaccgccgacagcctgaagcagaagatcctgaaggtgaccgagcagatcaagatcgagcagaccagcagagacggcaacgtggccgagtacctgaagctggtgaacaacgccgacaagcagcaggccggcagaatcaagcaggtgttcgagaagaagaaccagaagagcgcccacagcatcgcccagctgcagaagaagctggagcagtaccacagaaagctgagagagatcgagcagaacggcgccagcagaagcagcaaggacatcagcaaggaccacctgaaggacatccacagaagcctgaaggacgcccacgtgaagagcagaaccgccccccactgcatggagagcagcaagagcggcatgcccggcgtgagcctgaccccccccgtgttcgtgttcaacaagagcagagagttcgccaacctgatcagaaacaagttcggcagcgccgacaacatcgcccacctgaagaacagcctggaggagttcagacccgaggccagcgccagagcctacggcggcagcgccaccatcgtgaacaagcccaagtacggcagcgacgacgagtgcagcagcggcaccagcggcagcgccgacagcaacggcaaccagagcttcggcgccggcggcgccagcaccctggacagccagggcaagctggccgtgatcctggaggagctgagagagatcaaggacacccaggcccagctggccgaggacatcgaggccctgaaggtgcagttcaagagagagtacggcttcatcagccagaccctgcaggaggagagatacagatacgagagactggaggaccagctgcacgacctgaccgacctgcaccagcacgagaccgccaacctgaagcaggagctggccagcatcgaggagaaggtggcctaccaggcctacgagagaagcagagacatccaggaggccctggagagctgccagaccagaatcagcaagctggagctgcaccagcaggagcagcaggccctgcagaccgacaccgtgaacgccaaggtgctgctgggcagatgcatcaacgtgatcctggccttcatgaccgtgatcctggtgtgcgtgagcaccatcgccaagttcgtgagccccatgatgaagagcagatgccacatcctgggcaccttcttcgccgtgaccctgctggccatcttctgcaagaactgggaccacatcctgtgcgccatcgagagaatgatcatccccagatag

SEQ ID NO: 205178 - DNA, 1434 bp, Artificial Sequence
  derived and/or modified sequence
atgcccggtagcgatacagcgctgaccgtggaccggacatatagctacccaggtcggcaccaccgatgtaagagtcgcgtggagcgccatgatatgaataccttatccctccctctgaatattcggcgtgggggtagtgacacaaatttgaactttgacgtgccagatggaattctggattttcataaggtaaagttaacagccgattccctgaaacagaagatcctgaaggtgaccgaacaaataaaaatcgagcaaacgagcagggacggaaacgtggcagaataccttaagttagtgaacaacgctgataaacagcaagccggccgaattaagcaggtttttgaaaagaagaaccagaaatccgcccactctatagcacagctgcagaagaaactcgagcaataccacagaaaattgagggaaatcgagcagaatggcgcttcaagaagcagcaaggatatctcaaaggaccacctgaaagatattcatcgttcgctcaaagacgcccatgtgaaatccagaacagcgccccattgtatggagagctcgaaaagcgggatgcctggcgttagcttgacccccccagtctttgttttcaataagagtagagagtttgcgaacctgataagaaataagttcggaagcgctgataacatcgcccatctgaagaactctctagaagaattccgacccgaggcctcagcaagggcttatggggggtccgcaacgatcgtaaataagcccaaatacggctcagacgatgaatgcagctcaggcacgtccggtagtgctgactccaacggaaaccagtccttcggcgctggaggggcaagcaccctggattctcagggtaagctggcagttatacttgaagagctgagggaaattaaggacacccaggctcagctagccgaagatatagaggctttaaaagttcagttcaagagggagtatggattcatctcccagacgttgcaagaagaaagatataggtacgaaagattggaagatcagctgcatgatctcacagatctgcaccagcatgaaactgcgaatctcaagcaagaactggccagcatcgaggagaaggtggcgtaccaagcatatgagcgaagccgcgatatccaagaggcgctcgaatcttgccagaccagaatcagtaaactcgagctgcaccagcaggagcagcaagccctacagactgatactgtgaacgccaaggtccttttaggaaggtgtatcaatgtcatcctcgcttttatgaccgtgatcttggtgtgcgtcagcacaattgcaaagttcgtgtctccaatgatgaaaagccgctgtcacatactcggcacatttttcgccgtgacattgctggccatcttctgcaaaaactgggatcatattctctgcgcaatcgaacggatgatcatcccaaggtag

SEQ ID NO: 205179 - DNA, 1434 bp, Artificial Sequence
  derived and/or modified sequence
atgcctggcagtgacacagccctgactgtggacaggacctacagctacccaggccgccaccaccgctgcaagagccgggtggagagacatgacatgaacaccctgagcctgcccctgaacatccggcggggcggcagtgacaccaacctgaactttgatgtgcctgatggcatcctggacttccacaaggtgaagctgacagctgacagcctgaagcagaagatcctgaaggtgacagagcagatcaagattgagcagaccagcagagatggaaatgtggccgagtacctgaagctggtgaacaatgctgacaagcagcaggccggccgcatcaagcaggtgtttgagaagaagaaccagaagagcgcccacagcatcgcccagctgcagaagaagctggagcagtaccacaggaagctgcgggagattgagcagaatggagccagccgcagcagcaaggacatcagcaaggaccacctgaaggacatccacaggagcctgaaggatgcccacgtgaagagcaggacagccccccactgcatggagagcagcaagagcggcatgcctggggtgtccctgaccccacctgtgtttgtgttcaacaagagccgggagtttgccaacctgatccggaacaagtttggcagcgctgacaacatcgcccacctgaagaacagcctggaggagttccggcctgaggccagcgcccgggcctatggaggcagcgccaccatcgtgaacaagcccaagtatggcagtgatgatgagtgcagcagcggcaccagcggcagcgctgacagcaatggaaaccagagctttggagctggaggagccagcaccctggacagccagggcaagctggccgtcatcctggaggagctgcgggagatcaaggacacccaggcccagctggccgaggacatcgaggccctgaaggtgcagttcaagcgggagtatggcttcatcagccagaccctgcaggaggagcgctaccgctatgagcggctggaggaccagctgcatgacctgacagacctgcaccagcatgaaacagccaacctgaagcaggagctggccagcattgaggagaaggtggcctaccaggcctatgaaagaagccgggacatccaggaggccctggagagctgccagacccgcatcagcaagctggagctgcaccagcaggagcagcaggccctgcagacagacacagtgaatgccaaggtgctgctgggccgctgcatcaacgtcatcctggccttcatgaccgtcatcctggtgtgtgtgtccaccatcgccaagtttgtgagccccatgatgaagagccgctgccacatcctgggcaccttctttgctgtgaccctgctggccatcttctgcaagaactgggaccacatcctgtgtgccatcgagaggatgatcatccccaggtag

SEQ ID NO: 205180 - DNA, 1434 bp, Artificial Sequence
  derived and/or modified sequence
atgcccggcagcgacaccgccctgaccgtggaccggacctacagctatcccggacgacaccacaggtgcaaatctcgcgtggaaagacatgacatgaatactctgtccttgcctctcaatattcgtcgcggaggaagtgatactaatctgaactttgacgtgcccgacggcatcctggattttcataaagtgaagctgaccgcagatagtctaaaacagaagattttaaaagtgactgagcaaatcaagatcgaacaaaccagtagggatggaaatgtggcagagtacctgaagctcgtgaataacgccgataaacagcaggcaggaagaataaaacaagtgttcgagaagaaaaaccagaagagcgcccatagtatagctcagctgcagaagaagttggagcaataccatagaaaattgagggagatcgaacagaatggcgccagtcgttcatccaaggacatatcaaaggaccaccttaaggacattcatagatctttgaaagatgcccacgtgaagtcccggacagcaccacactgcatggagtcatctaagtcagggatgcccggcgtgagcctcactccccccgtctttgtctttaacaaatcccgcgagtttgcgaatctgatcaggaacaagtttggatctgctgacaatattgcacacctaaaaaacagcctggaggaatttcgtccggaggcctcggcacgcgcctacggaggaagcgctaccatcgttaataaaccaaagtatggctcggatgacgagtgcagctccggaacctcaggctccgctgattccaatggcaatcaatcatttggggccgggggagcctccactctggacagccagggaaaactggccgtcatcctcgaagagcttcgtgagatcaaagacacacaggcccagctggcggaagacatcgaagccctgaaggtacagttcaaaagagaatacggcttcataagccagaccctgcaagaggagcgctaccgctacgaacgtctcgaagatcagttgcatgacctgactgacctgcatcaacacgagacagccaacctcaaacaagagctggctagcattgaagaaaaggtggcatatcaggcctacgagaggagtcgtgacatccaagaagccctagagagttgccagacacgcattagcaagctcgaactgcaccaacaagagcagcaggcacttcagaccgatacagtgaacgcaaaggtacttttgggcaggtgtataaatgttattcttgccttcatgacagttattcttgtctgcgtatctacgatcgccaagtttgtatctcccatgatgaaatcacgctgccacatactggggacattttttgcagtgactctattagccattttttgtaagaactgggaccacattttgtgcgctatcgagagaatgataatccctaggtag

SEQ ID NO: 205181 - DNA, 1434 bp, Artificial Sequence
  derived and/or modified sequence
atgccagggtccgacacagcacttacagtggaccggacctactcgtatcccggtcggcaccataggtgtaagtctagagtagaaagacatgacatgaacacactttcgctgccacttaacatccggcgaggcggtagcgacacaaaccttaacttcgacgtcccggatgggatcctggactttcacaaggtgaaactgacagccgactccctgaaacagaagatattgaaagtgactgagcagatcaaaatcgagcaaacctccagagatggtaatgtggccgaatacctgaaactggtgaataatgcagataagcaacaagccggaagaataaagcaagtattcgagaaaaagaatcagaaatcagcacacagcatagcccagctgcaaaaaaaattggagcagtaccacagaaaactcagagaaatcgagcaaaacggtgccagcagaagctccaaggacatcagcaaggaccacctgaaagacattcacagatccttaaaagatgcccacgtgaaatcaaggactgcacctcattgtatggagtcctccaaatcaggcatgcctggagtgtcactgactccccctgtgtttgtatttaacaaatcacgagagttcgcgaatctcatcaggaacaaattcggtagtgccgacaatatcgctcacctgaagaattcactggaggaattccgcccagaagcctctgcaagggcttacggcggatccgctaccatcgtgaacaaaccaaaatacggttcagacgacgaatgtagtagtgggacaagtggctctgccgactcaaacggaaaccagagctttggcgctggtggtgcctccacgctcgattcacaaggtaaactggcggtgatcttagaggaattgagagagataaaagacactcaggcccagctggccgaagacattgaggcgcttaaagtgcagttcaagcgagagtacggtttcatatcccaaaccttgcaggaggagcgctatcgctacgagcgcctggaagaccagctccatgacttgacagatcttcaccagcatgaaactgcaaaccttaaacaggaactggccagtatcgaggagaaggtggcgtaccaggcctacgagaggtcgcgcgacatacaggaggcgctggagtcttgtcagacaagaatctccaagcttgagttgcatcagcaggaacagcaggccttgcagaccgataccgtgaacgccaaggtcctgctcggccgatgcataaatgtgatcctagcctttatgacagttatcttagtttgcgtgtcaacaattgcaaagttcgtgtcccccatgatgaagtctagatgtcacatcctgggcacgttttttgccgtgacattgctagccatattctgtaaaaactgggaccatatcctttgcgccattgaaaggatgattattccgcgatag

SEQ ID NO: 205182 - DNA, 5877 bp, Artificial Sequence
  derived and/or modified sequence
gcaccagaggcaacagctgcagcagccgcgccgccccctcgcccgcggctcccagggtgatcccgagcacagccggtggctcgcggcgcggcagccccagaagacgggaaagttcgcggccggagcgcggagatgccgggcagcgacacggcgctcaccgtggaccggacctactcgtaccccggccggcaccaccgctgcaagagccgggtagaacgtcatgacatgaataccttaagcctgcccctgaacatacgccgaggggggtcagacaccaacctcaactttgatgtcccggatggcatcctggacttccacaaggtcaaactcactgcagacagcctgaagcaaaaaattctaaaggtaacagagcagataaaaattgagcaaacatcgcgcgatgggaatgttgcggagtatctgaaactagtgaacaacgcagacaagcagcaggcgggacgtatcaagcaagtctttgagaagaagaatcagaaatcagctcactccatcgcccagctgcagaagaagttagagcagtatcatcgaaagctcagagagatcgagcagaatggagcctctaggagctcaaaggacatttccaaagaccacctgaaggatatacatcgctctttgaaagatgcccacgtgaaatctcgaactgccccccattgcatggagagcagcaaatcgggcatgccaggggtctcacttactccacctgtgttcgttttcaataagtccagagagtttgccaacctgatccggaataagtttggcagcgccgacaacattgctcacttgaaaaattccttagaggagtttaggccagaggcgagtgccagggcctacgggggcagcgctaccatcgtgaacaaacccaagtatggcagtgatgatgaatgttcgagtggcacgtcaggctcggccgacagtaacggaaaccagtcgtttggggctggtggagccagcacactggacagccagggcaagctcgccgtgatcctggaggaactgagggagatcaaggatacccaagctcagctggctgaggacatcgaggcactgaaggtgcagtttaagagagaatatggttttatttctcagaccctgcaagaggaaagatacaggtatgagcgactggaggaccagctgcatgacctgacggacctgcatcagcatgagacagccaacctgaagcaggagctggccagcattgaggagaaggtggcctaccaggcctacgagcgctcgcgggacatccaggaagccttggaatcctgccagactcgcatttctaagctggagctccaccagcaagagcagcaagctctgcagacagacaccgtgaatgctaaagttctcctggggaggtgcatcaacgtgatcctggccttcatgactgtcatcttagtgtgtgtgtccaccatcgcgaagttcgtctcacccatgatgaagagtcgctgccacattcttggcaccttctttgccgtgactcttcttgctatattttgtaaaaactgggaccatatcctgtgtgccatagaaaggatgataataccaagatgaagccactggttcctgccttcaagttctttcaagtttttattttaaagaaaactctgtgcatactaccaaattttacagtgaatgattgtgcggactcgtgtgtaagaaaaactaggactgtgtggtgtaaataactacaattctcttaactccgtagcagttgccaactcagtccttgtacttcgttaacacgaatctgtttcagagctctcctaccttgctcactgccttaatcagaccgatttcctgcccacctgaccagcccagcgtggtaaacctctgtatattgagaccttggcataattggtgatcctgaagaaagaggtctctctcctaagtctctgtcagaattgagcttcacaattgctaatggttgttttctgtgagtcctataaaaagcaaggatatgcatgattcagggaatgaagaatcacaggcttgggcagtgttaaacactgtggcctatggtccccgtgtgatccaccctgcttctctccaggggaccataggtcccgtcatgtactcagtgtccacagcagtcagtcgtgtatgaccctgtaacgtggaaatcttatcacacacctgttatccaacaagtctacctgaggggttttgttacactttaaatgggaaggcatagggatttatgaatggggctttcaccttctcatacccaggcaaccaacacctgattttgtctcaactggctagcaaatgcccagccttcagagtgtgcaggaatgttttcaaatccctcatcagactgtgactttaacattaatttggaatcctgtgagcactactctgaaggtttgtgttttggcaaatcttttttcttttttgagacagggctctgctaaatattgctcaggctggttgcaaactccttgcttcaagggatcctcccacctcagcctcccaagcagccgggactgcaggcacaagccaccatgcctggctgttttttggcaaatcttgattgtgataagcccccctggaggatatgattcactttatgtgattcatcttattcacaggtctgtgagggactgcaaagcttactcaggaaatgaaaacaaatgatggtcatgttgcagttttttccttgaaggacaaccgaaccatagcctctaaagttcaagtgcactgaggtgtcggaacgctgaaagcatgaggaaacgaggacgtagggtgtgactgaatggtggctagattagtgggagcagttcacctggatgaagattgagagcatcgtctttgagaagtgaaagactagcaagaataaaataaattaagtccagtgtttgagccaaggttgccacctgtctcttaacatctcactgaacataagtcctgaggtattaggacgaccatactgcctctgagctgaaaacattcaaaagttcacatccctgtttgggggataccattcaccgccttcagcccagatgatactttcctttaaatctgtgtctctgtgtgtataacaaagaggaagatggaaacaatgttcatggaaactgctgttgagccccttgtcccaccactcccgccatctgctgcaggcaggaaggcatgtgagtgtacgttttcttccaggagacatcaggtccccctggattcaaattaagtgcaatattttgcaaacagctcttcttagggaaatctcctgaaggaaaaaaatgtgacagaatgttccatagtctgagagaatggaatcgttgagcatttagtacaagtccagtgtgtgtgagcgggacttaggcagctcaagcttgcttttttttttaagcgtacaattgagtggttttagtaaattcacaaacttgttcaaccatcaccactatctaattccagactcacgcttttttaaacaataaatgtcatttcatgaaatctttggtgataaagtattttggattcagagaagagctcccttaccagtcccaccctgatctcatggctgtctctcctttcattgtcagactccccctggtctaccgcgttgatgtgtatacactgatctttcaagtctgggagacagataaggaggccaggtgcaaggcagggaggcagagagaatgttgtgcttcctttagcttttgtatttcgatggccagcattaccctttacctgtgggcatcagactcagcgtgggctgagtgctgagtgtaacttacactcctaaatcaagctggggcctgggtgggcccctcttggtatctgtgaatctttccaagcaccacttcggacacaccagggattgagtgctgctgttagtttagagaaggagagatgtctaacccttgaggtgaagggctctgggagggtccaagaagacgtaggcttcattttcacaccagcccacaccattccagtgctcagcctagcaaatgtgctttaatgcacacttctcagacctgtgatccgtgtatcttctccccagtgacagaagtagagaagagaatggaaagcagcacactccgtcccctctagtctggagctgttaacagaatctgctagaaactagctttattctaacataccgtaggatctaaatcctcctacctggatcatgaattcctttgaaataattcatattttcattgactctcactaaatgtcaaataaccttgttttcacttggataggctcaacctacctggcatatttattttgcagtcttgttgaaagttcatgaaactttgtactttttaataagatgatacactcgaaggaaacttttaatctctgcagtttattctctcttaaggaataaacactcccactgtttgttctcttcaatgtgtaaggagattaaatgacattttagaaatattacaattaaaaatagtgatgtagctgtaacatatgctggaattggatatttaatttatgtttgtgtcaactataatcctttccccacccctttcatttatggtaaacatcttgggcaaacccaaagatggaaagtgcttgttgggtgggtaagcaccacctggtctctcagcaaacactcctgagtggttgaagatgctggacattggattctagcactgggtttatctggtgacatagtctcctgtgggtcttgagttggttatttcaagctcaaactctgaatatgattaaaccagaacaccccacccccaactgccaaaaaaaaaaaaaaaaaatggaaatccataatgaaacagcaaaaaagtactccgttgctgggtttggacaatgaacatgggattagtcccaagtttgtagcttggaacggtagcatttttgcctgcgtgatccttgtcagctattcacagaaggaaatcttccgaaactccgtctttcatttcagccggtgaggctgttatccttctctgtcaattagcattcatgtggttttcgctctttccagctctgtcactcttgttttcatttaaatattgccccactctgtgtttattgccttgccatttctctagcatatcaggtttaattatgggctcagtaataatgaggaactagcttccctcaggcaactaattacttttgtcttttttggtcggattgtaccaaattattttgcattgaatgggaatgtttttgcagtgaatccagatatagttgtattggtttggaaaaacatttaaatatatttattcatatgaacatgtgtgattaaacaacctattttacatatttctgtaattctgaggagtgggctgggggtaggaagaaatggcaccacttaaaattcagggcttatatgaagaggtgttttaaggttagcacatgcacaaaggaacgagttggtttaaaaagataaatcactgcaaagaatgaaattggcttattcacatcaaaactagataagatgctaaaaaaaaaagatatgaaacagaactaacctatagtttcctgaaatcagtacagtttaatttataagaagctagaaagtaatgcaccttgattgttttaggaatgatttatgtgttgcaattttaatttatttaaagcatgtctactgtgtttgtcctaagagaaatatttcaacaaaacgtgctctgtgtttaagatatgtttaggcagtagttagcaactctgaaagtagaaactggaaatgtttattgtgaggcttgttgcagaatttccattttgtgagttactacttagtttcatgtcagcctaaaattgtaaattccctgtagatcttcaccccattgtggtgtcatcaatgaatccaaagcaggtgccattatttttttaaataaacacttgatgttagctttggtgttaaataaagaggtagatttcttaaatttt

SEQ ID NO: 205183 - protein, 514 aa, Artificial Sequence
  derived and/or modified sequence
MLTRVKSAVANFMGGIMAGSSGSEHGGGSCGGSDLPLRFPYGRPEFLGLSQDEVECSADHIARPILILKETRRLPWATGYAEVINAGKSTHNEDQASCEVLTVKKKAGAVTSTPNRNSSKRRSSLPNGEGLQLKENSESEGVSCHYWSLFDGHAGSGAAVVASRLLQHHITEQLQDIVDILKNSAVLPPTCLGEEPENTPANSRTLTRAASLRGGVGAPGSPSTPPTRFFTEKKIPHECLVIGALESAFKEMDLQIERERSSYNISGGCTALIVICLLGKLYVANAGDSRAIIIRNGEIIPMSSEFTPETERQRLQYLAFMQPHLLGNEFTHLEFPRRVQRKELGKKMLYRDFNMTGWAYKTIEDEDLKFPLIYGEGKKARVMATIGVTRGLGDHDLKVHDSNIYIKPFLSSAPEVRIYDLSKYDHGSDDVLILATDGLWDVLSNEEVAEAITQFLPNCDPDDPHRYTLAAQDLVMRARGVLKDRGWRISNDRLGSGDDISVYVIPLIHGNKLS

SEQ ID NO: 205184 - DNA, 5748 bp, Artificial Sequence
  derived and/or modified sequence
gctgcagctgcagccgcctgggcgctcctggagcgcgcggtgactcccccggtcggcccgctccatgcagctccgttgcggaagtgtagcggggggaggcggcggccaccgcggcactaagcacgagaggccggggctcggccccctgcagcactaggctctgggagccgcgcgcggcgcgtcccagtggcccgactcgccgtgcgcccggcgcccaccgcagcctgcatgccccgcgctgcgccttgcccggcccccgccgcctcctgctcgcaccgctgcagccgggcgccggagtaatatgctcactcgagtgaaatctgccgtggccaatttcatgggcggcatcatggctggcagctcaggctccgagcacggcggcggcagctgcggaggctcggacctgcccctgcgtttcccctacgggcggccagagttcctggggctgtctcaggacgaggtggagtgcagcgccgaccacatcgcccgccccatcctcatcctcaaggagactcggcggctgccctgggccactggctacgcagaggttatcaatgccgggaagagcacacacaatgaagaccaagccagctgtgaggtgctcactgtgaagaagaaggcaggggccgtgacctcaaccccaaacaggaactcatccaagagacggtcctcccttcccaatggggaagggctgcagctgaaggagaactcggaatccgagggtgtttcctgccactattggtcgctgtttgacgggcacgcggggtccggggccgcggtggtggcgtcacgcctgctgcagcaccacatcacggagcagctgcaggacatcgtggacatcctgaagaactccgccgtcctgccccctacctgcctgggggaggagcctgagaacacgcccgccaacagccggactctgacccgggcagcctccctgcgcggaggggtgggggccccgggctcccccagcacgccccccacacgcttctttaccgagaagaagattccccatgagtgcctggtcatcggagcgcttgaaagtgcattcaaggaaatggacctacagatagaacgagagaggagttcatataatatatctggtggctgcacggccctcattgtgatttgccttttggggaagctgtatgttgcaaatgctggggatagcagggccataatcatcagaaatggagaaattatccccatgtcttcagaatttacccccgagacggagcgccagcgacttcagtacctggcattcatgcagcctcacttgctgggaaatgagttcacacatttggagtttccaaggagagtacagagaaaggagcttggaaagaagatgctctacagggactttaatatgacaggctgggcatacaaaaccattgaggatgaggacttgaagttcccccttatatatggagaaggcaagaaggcccgggtaatggcaactattggagtgaccaggggacttggggaccatgacctgaaggtgcatgactccaacatctacattaaaccattcctgtcttcagctccagaggtaagaatctacgatctttcaaaatatgatcatggatcagatgatgtgctgatcttggccactgatggactctgggacgttttatcaaatgaagaagtagcagaagcaatcactcagtttcttcctaactgtgatccagatgatcctcacaggtacacactggcagctcaggacctggtgatgcgtgcccggggtgtgctgaaggacagaggatggcggatatctaatgaccgactgggctcaggagacgacatttctgtatatgtcattcctttaatacatggaaacaagctgtcatgaaaatggcccaggggattgggaggacagaggggaagaaagctgggatgcctcttggcaggacggaactgggaagtgccccagctgagttccaagtgatgcagtctcttcccagcccaagcggggagttcatggccaaaagactatgcttcaagatgaccctttggtttccatttcttctttagtaacaggtcaactcaacaagagcaaaacacaaaggctgctaccaagtgttgttgtatttcagttcctttcataggcctccgaggtggccattgactatttggggtatatatgtcatatttattttatctagagtagctggggcagccattttcaggtgtaaatggcagaggactcttcagcctgtcaagctgccagcttatctacgggttaaaaagtgctgcattggaaagtagggggtcatgcctcaaaatgtaagtaagtgcccaccttctaggaagcctgaggtttatttcagggattgccgtctgccccccgccccccttctctttttttcttctctgtttctattcttttatggcagtggtggagtgaggcagggatttttttttttttttttcgtgtttttgacattccttgaatctgttttttattccccttccacagaacaggcctgggactttccaacaccctgctaaggaagttctgtgtccaagtcccacccaggctgggttgtccccacctcctccagcccacacagcccaggcagcatccgggccagtgccctgcatgacagagggtctttgttgtgtaatgtttgttcccaagttgcattttctaaccgaatcagtgtgttttcatgaaactgagtgtttctgtggaccagtagttcctctgttgtcttcagtggtcttcctgtgtggctcaagggttctctgtgagagtctggattttcatttctggaatggctggccccatcccacttttctgtatcatggggacacatataaagcagtgtttaatagagcagtttaagaagttgcttgcatctgttggttcaccatggctcatctggggaccattttggattcatgtttcatggcttgtgactgtccccaagcccactccaaacaaagtgtaaggatcagagttctgtcaaggagcagcagttctgctctccccatcatctttgtgcaaggcccctcggggggcactttaataaaagaatttgaaatgggttgactggccattctcatgctgtgctccctgtctcttctcttctctaaagaatcatgtcccagctcctcaaggtccctctatggttccacatctgagtgttcgccacaagagcagcagcagcaggcacagtgcatgccatatctacctgctgcttctctgctgggaggaatggccaagtagattataaaactcacttctgtctcttaggcagacttgtacggccacaaaattacctagtcttcttcctgctgagctactgaggtattgccaccattttgacaactttgagtaattaaaacactcttctgacccaaaaaggaaaaaaggtcactgacgtgacccccccagcatgctagagagctaattccagttctcatatttgtttgaatttcttcccagaggagaggataggaacctctcctccagggcagtaaatcacctgcatttctggagttgtcggtattgtattcgaaaaggcctggagcccctcctgctcaggaaagaactcattccagggtgtggagacagtgccgtctggcaggtgaaatactgtgggaattcacgccaccaggtgtttgtgcaagtgttggcctgggaagaatgggacttcggccttgtcaggagttgtcttcatctgcagcacgtttcttcctcctgcagtagatcttagctaccccagatatctctatggagagaagtttgtggaaaatgctttgcttcgtggcagagtctgatgctgtaggaaaaccttcgggcatgtgacagcagtgtggtccactccctgttctgccctggcactcagagtcatgtgtaagtaggaaacctgagcaagtcttccgtggaggaccctgagctgccgtctttgggatccttcctgtgtccccaccgtctttcatttatttgctttcctgggcctctatctgggccctaccttgagcttctccagttttattcaagccaccagagtaagaatttgggtgtagatgtcacaactaccttctactcaattcaccaattcatttactgctatggcacgtctcaggaataactctagaaacctctaaatcgaaatattataaaatcttgagcacttagtcctgctggttttagttagaaaggcatccaggaattgttttcctacgcccccttgagtggaaagatcttagttagaagataaagtcaagtttgtgttcaggggatgggaggaagactataaataagatgaagaaatcaaaagtaggaaacatgatgtaaacgaagcatggcagatctgtccagcactgatattgctctataaattgagcttactcagttttggccttatttttttacccaggccccatgtcacccagtcctaaaacagtaaccgtgtctacataacgggttggcccctggtgcatccctggaaaagtcaaaggacgcacacttcgaaattctgcagaacgtatttatacatggttcagaaatcttgcgtatctgacttatagccaaatctgcttgctcgaatagcctcagaggaagtcttgtttaataaaaaccttttgatttcctagtcaagtctttatggttgtctcgaggggtgtgtggctactttaatgaaaggctttcctgctctaaatctctttgctgggctgggcctcttcagactatctggtgaaactcctttccttagaacaaactcagtccgtccatgctctgtggcattttgctagatgataaccaaagccttattcctgtagccagtgtcagcagtcagagaggtggagggtgtgttctgctgtggttatgcatacctatctgctgttcttgaggtgtaaaaggaaaggtgaaaatcgggccaggccaagtactcagctgtcttaataggatgaagccttaagcagtggaaatttcagttattttccacagtattccattttggaggatttggggtgtttactttttaaattcttgaacaacttaacctccatgaggctttgtgaagtcagctgtgaccaccctcctcttactgtgttctcagtattcattcacttccagggaagaatgacagccacagggagatggtggtgggcaagaatgagagtcccaggatccagatttagcctcagatcttccccattcaggaagggttttccatttaacaagagcactagtatgaaaacattagggacaaatctcccatgtctttgaaattcggattctcctcttgagatccccttcctcacctgccaatcaactttataaggccacaagtggtcactggttttccttccacaggtttgaggttctcagctttccttaagcgacccagcagctccgctgttttcagagtgaatatgttaagctttgatgagattctattttcagtaagttagtgcttctgggacacttggagaaagctgtgagagtcattgtctacgcaaagaacaacgaagctgatcctaaaagtgatccaatctaagaaaatggtaaaacgagctctggccacagcacagaattttatgtgaggaactcagatttttgaagacttaacaattgcagagaaaggttgcagcctgcacaccatagcccacctctctgagcagactttggttttgtgtggtgacgtggcacatgtttgtacactgggatttttcaaaggacgctacgcgagcagactgacttgcctcttctgtgagcactgtggcttttgtcagatggag

SEQ ID NO: 205185 - DNA, 1545 bp, Artificial Sequence
  derived and/or modified sequence
atgctcacccgcgtgaagagcgcagtggccaattttatgggaggtatcatggctgggtcaagcggaagcgagcatgggggcgggtcctgcggaggtagcgatctgccactgcgattcccctatggtcggccagagttcctgggcttaagccaggatgaagtcgaatgtagcgctgatcatatcgctcgaccgatccttattctaaaagagacaagaagacttccttgggctaccgggtatgctgaagtgataaatgctgggaaatcgacacacaacgaggatcaggcctcttgtgaagtactcaccgtcaagaagaaggcaggcgcggtcacctcaacccccaatagaaactcctccaagaggaggagtagcctaccaaacggtgaaggactccagctcaaggaaaattctgaatccgaaggagtcagctgtcactactggtccctgttcgacggccatgccggctctggagccgctgtggtagcatcgcgcctgttgcaacaccatattacagagcagctacaggacattgtggatatactcaaaaacagtgcagtgttgccaccaacctgcctcggggaagaaccagaaaatacccccgctaactctagaacactgacacgcgctgctagtttgaggggtggagtgggcgcgcccggcagtccctcaacaccaccaacacgcttcttcacagagaagaagataccacacgaatgtcttgtgattggcgcgctggaaagtgccttcaaggagatggacctgcaaattgagagagagcggtcatcctacaatatttctggaggctgcacagccctgatagtgatttgcctccttgggaagctctatgtggcaaacgccggtgacagccgcgcaatcatcatccggaatggggagatcattcccatgtcctccgaatttactccagagaccgaacggcagagactgcaatacctcgcgttcatgcaaccacatctgctgggcaatgaatttactcacttagagttcccacgccgtgtgcagaggaaagagcttggcaagaagatgctgtatcgggacttcaacatgacagggtgggcgtacaagaccattgaagatgaggatctcaagttcccactgatttacggggaggggaaaaaggctcgcgttatggctaccattggagtgacgaggggcttgggtgaccatgaccttaaggttcacgactccaacatttatatcaagcctttcctgtcttctgcgccagaagtgaggatttacgatcttagcaaatatgaccatggttctgatgatgtcctgattctcgctactgatggactatgggatgtgctgagcaatgaggaagtcgctgaggccataactcagttcctacccaattgcgatccagacgaccctcatcgttacacgctggccgcccaagacctcgtgatgagggcccgaggggttctcaaagataggggctggcggatttccaacgaccgcctcggcagtggggatgacatatccgtgtacgtgatacccctgattcacgggaataaactgagctag

SEQ ID NO: 205186 - DNA, 1545 bp, Artificial Sequence
  derived and/or modified sequence
atgctgaccagggtgaagtctgctgtggccaacttcatgggcggcatcatggccggcagcagcggcagcgagcacggcggcggcagctgtggcggcagtgacctgcccctgcgcttcccctacggccggcctgagttcctgggcctgagccaggatgaggtggagtgcagcgctgaccacatcgcccggcccatcctgatcctgaaggagacccggcggctgccctgggccaccggctatgcagaggtgatcaatgctgggaagagcacccacaatgaagaccaggccagctgtgaggtgctgactgtgaagaagaaggccggggctgtgaccagcacccccaacagaaacagcagcaagagaagaagcagcctgcccaatggagagggcctgcagctgaaggaaaattctgagagcgagggcgtgtcctgccactactggagcctgtttgatggccacgccggcagcggggctgctgtggtggccagccggctgctgcagcaccacatcacagagcagctgcaggacatcgtggacatcctgaagaacagcgctgtgctgccccccacctgcctgggggaggagcctgagaacaccccagccaacagcaggaccctgaccagggctgccagcctgcggggcggcgtgggcgcccctggcagccccagcaccccacccacccgcttcttcacagagaagaagatcccccatgagtgcctggtgattggagccctggagagcgccttcaaggagatggacctgcagatcgagcgggagaggagcagctacaacatcagcggcggctgcacagccctgattgtcatctgcctgctgggcaagctgtatgtggccaatgctggggacagccgggccatcatcatcagaaatggagagatcatccccatgagcagcgagttcaccccagagacagagcggcagaggctgcagtacctggccttcatgcagccccacctgctgggcaatgagttcacccacctggagttccccaggagagtgcagaggaaggagctgggcaagaagatgctgtacagagacttcaacatgacaggctgggcctacaagaccattgaagatgaggacctgaagttccccctcatctacggggagggcaagaaggcccgggtgatggccaccatcggcgtgacccggggcctgggggaccatgacctgaaggtgcatgacagcaacatctacatcaagcccttcctgagcagcgcccctgaggtgcgcatctatgacctgagcaaatatgaccacggcagtgatgatgtgctgatcctggccacagatggcctgtgggatgtgctgagcaatgaggaggtggccgaggccatcacccagttcctgcccaactgtgaccctgatgacccccaccgctacaccctggccgcccaggacctggtgatgagggcccggggcgtgctgaaggaccggggctggaggatcagcaatgaccggctgggcagcggagatgacatctctgtgtatgtgatccccctcatccacggcaacaagctgtcctag

SEQ ID NO: 205187 - DNA, 1545 bp, Artificial Sequence
  derived and/or modified sequence
atgctgacccgggtgaagagcgccgtggccaacttcatgggcggcatcatggccggctcctccgggagtgagcacggtggtggtagctgtggcggttcagatctgccgcttcggtttccatatggtagaccagagtttttgggtctttctcaagacgaggtggaatgtagcgccgatcacatcgcccgcccaatactgatccttaaagaaacccgtcgattgccttgggctaccggatatgctgaggtgattaatgcaggcaagtcaactcataatgaggatcaggcatcttgcgaagtcctgacagttaaaaagaaggccggtgcagtgacctccacaccaaaccggaactcaagcaaacgacgaagcagcctgcctaatggagaaggattgcaactgaaagagaattccgagtccgagggggtgagctgccactactggtcgttgttcgacggacatgccggctccggcgccgccgtcgtggcgagtagattacttcagcatcacatcactgaacaactacaggacattgtagatatcctgaaaaattccgcagtgctgccccctacctgcctgggtgaagaacccgaaaatactcccgccaactcaaggacccttacacgcgccgccagccttagggggggcgtcggggccccaggctccccatctactccccccacgcggttcttcaccgaaaaaaaaattccacacgagtgtctggtgatcggcgcccttgagtccgcatttaaggagatggacctccagattgagcgagaaagatctagttacaatatctctgggggctgcaccgctctcatagttatttgcctactggggaagctttacgtagccaatgcaggagatagcagagctatcatcatacgtaatggagaaatcatccccatgtcatctgagttcacacctgaaacagaaagacagcgcctgcagtatctggccttcatgcagccccatctcctggggaatgaatttacccacctggaattcccgcgccgggttcagaggaaagaactgggaaagaagatgctgtatagggatttcaacatgacagggtgggcctacaagacgatcgaagacgaagacctgaaattccccctcatttacggggaaggtaagaaagcccgtgtgatggcaacgatcggggtgacaagaggtctgggcgaccatgacctgaaagtgcatgacagcaacatctacattaaaccttttctgagttccgccccggaagtacggatctatgatctttcaaagtacgaccatggctccgatgatgtcctaattctcgcgacggatggcctctgggatgtcctgagcaacgaggaggtagccgaagccatcactcagttcctcccaaactgcgatcccgacgacccgcaccgatacacgcttgcagcgcaggatttggtgatgcgcgcacgaggtgtgttgaaagaccgaggctggcggattagtaacgataggcttggttccggagacgatatctcagtgtacgttattcccctgattcacggcaataaactgagctag

SEQ ID NO: 205188 - DNA, 1545 bp, Artificial Sequence
  derived and/or modified sequence
atgctcactcgtgtaaagtccgccgttgcgaactttatggggggaataatggctggctccagcgggagcgaacacggcggtggaagctgcgggggatccgacttgccccttcgcttcccatacgggcgacctgagtttctgggcttaagccaggatgaagttgagtgttctgccgatcatatagcacgccctatccttatcttgaaggagaccagaaggttgccttgggccaccgggtacgccgaagtgataaacgccggaaagtcaacacataacgaggaccaggcctcgtgcgaggtgctgacagtgaagaagaaagctggcgcagtgacatcaacgccaaacagaaattcctctaaacgaagatcctccctgcctaatggcgagggtctgcagttaaaggagaactccgaatcggaaggtgtaagctgccattactggtccctgttcgacggacacgcgggttcaggcgcagccgttgtggcatcgcgattgttacagcaccatatcactgagcagctccaggacatcgtcgatatcctcaagaacagcgcagtgctgccacctacctgcctgggcgaggaaccagagaatactcctgcgaattccaggaccctcacccgtgccgcttctctgagaggcggtgtcggggctcccggatcaccgagtacaccacccaccagattctttacagagaagaagattccccacgagtgcctggtcatcggggctctggaatctgcatttaaagagatggatctgcagatcgaacgtgaaaggtcttcatataatataagcgggggttgtaccgctctgatcgtgatatgtttattgggcaaactttatgtggcgaatgccggtgacagccgggctatcattatcagaaatggcgaaatcatccctatgtctagcgagttcacacccgagacagaacggcagcgtttacaatacctcgcgtttatgcagccccacttgctcggcaatgagtttactcacctggaattccctcgtcgagtacaaaggaaagaactgggcaagaagatgctctacagagacttcaatatgacaggctgggcctacaagactatcgaagacgaagacctcaaatttcccctgatctatggcgaaggaaaaaaggcaagggtaatggcgaccatcggagttacacgcggtctgggtgaccacgatcttaaggtccacgactcaaacatctacatcaagcctttcctctcttcagcccctgaagtgcgtatatacgacctgtctaaatatgaccacggaagtgacgatgttctcatcctggcgaccgatggcctatgggatgtgctgtctaatgaggaagttgcagaagctatcacccaattcttacctaactgcgatcctgatgaccctcaccgttatactttagctgcacaggatctcgtcatgcgtgctcgtggcgtactgaaggacagaggatggcgcattagcaacgacaggctcgggagtggagacgacatatctgtgtatgtcattcctcttatccacggaaataaactaagttag

SEQ ID NO: 205189 - DNA, 1545 bp, Artificial Sequence
  derived and/or modified sequence
atgctgaccagagtgaagagcgccgtggccaacttcatgggcggcatcatggccggcagcagcggcagcgagcacggcggcggcagctgcggcggcagcgacctgcccctgagattcccctacggcagacccgagttcctgggcctgagccaggacgaggtggagtgcagcgccgaccacatcgccagacccatcctgatcctgaaggagaccagaagactgccctgggccaccggctacgccgaggtgatcaacgccggcaagagcacccacaacgaggaccaggccagctgcgaggtgctgaccgtgaagaagaaggccggcgccgtgaccagcacccccaacagaaacagcagcaagagaagaagcagcctgcccaacggcgagggcctgcagctgaaggagaacagcgagagcgagggcgtgagctgccactactggagcctgttcgacggccacgccggcagcggcgccgccgtggtggccagcagactgctgcagcaccacatcaccgagcagctgcaggacatcgtggacatcctgaagaacagcgccgtgctgccccccacctgcctgggcgaggagcccgagaacacccccgccaacagcagaaccctgaccagagccgccagcctgagaggcggcgtgggcgcccccggcagccccagcaccccccccaccagattcttcaccgagaagaagatcccccacgagtgcctggtgatcggcgccctggagagcgccttcaaggagatggacctgcagatcgagagagagagaagcagctacaacatcagcggcggctgcaccgccctgatcgtgatctgcctgctgggcaagctgtacgtggccaacgccggcgacagcagagccatcatcatcagaaacggcgagatcatccccatgagcagcgagttcacccccgagaccgagagacagagactgcagtacctggccttcatgcagccccacctgctgggcaacgagttcacccacctggagttccccagaagagtgcagagaaaggagctgggcaagaagatgctgtacagagacttcaacatgaccggctgggcctacaagaccatcgaggacgaggacctgaagttccccctgatctacggcgagggcaagaaggccagagtgatggccaccatcggcgtgaccagaggcctgggcgaccacgacctgaaggtgcacgacagcaacatctacatcaagcccttcctgagcagcgcccccgaggtgagaatctacgacctgagcaagtacgaccacggcagcgacgacgtgctgatcctggccaccgacggcctgtgggacgtgctgagcaacgaggaggtggccgaggccatcacccagttcctgcccaactgcgaccccgacgacccccacagatacaccctggccgcccaggacctggtgatgagagccagaggcgtgctgaaggacagaggctggagaatcagcaacgacagactgggcagcggcgacgacatcagcgtgtacgtgatccccctgatccacggcaacaagctgagctag

SEQ ID NO: 205190 - protein, 680 aa, Artificial Sequence [sequence omitted]

SEQ ID NO: 205191 - protein, 160 aa, Artificial Sequence
  derived and/or modified sequence
FLPDNFSPAKPKPSKDLKPLLGSAVLGLLLVLAAVVAWCYYSVSLRKAERLRAELLDLKAGGFSIRNQKGEQEPQPFVTSDVYSSDAAFGGILERYWLSSRAAAIKVNDSVPFHLGWNSTERSLRLQARYHDTPYKPPAGRAAAPELSYRVCVGSDVTSI

SEQ ID NO: 205192 - DNA, 2043 bp, Artificial Sequence
  derived and/or modified sequence
atgtacaccttcctgcccgacaacttcagccccgccaagcccaagcccagcaaggacctgaagcccctgctgggcagcgccgtgctgggcctgctgctggtgctggccgccgtggtggcctggtgctactacagcgtgagcctgagaaaggccgagagactgagagccgagctgctggacctgaaggccggcggcttcagcatcagaaaccagaagggcgagcaggtgttcagactggccttcagaagcggcgccctggacctggacagctgcagcagagacggcgccctgctgggctgcagcctgaccgccgacggcctgcccctgcacttcttcatccagaccgtgagacccaaggacaccgtgatgtgctacagagtgagatgggaggaggccgcccccggcagagccgtggagcacgccatgttcctgggcgacgccgccgcccactggtacggcggcgccgagatgagaacccagcactggcccatcagactggacggccagcaggagccccagcccttcgtgaccagcgacgtgtacagcagcgacgccgccttcggcggcatcctggagagatactggctgagcagcagagccgccgccatcaaggtgaacgacagcgtgcccttccacctgggctggaacagcaccgagagaagcctgagactgcaggccagataccacgacaccccctacaagccccccgccggcagagccgccgcccccgagctgagctacagagtgtgcgtgggcagcgacgtgaccagcatccacaagtacatggtgagaagatacttcaacaagcccagcagagtgcccgcccccgaggccttcagagaccccatctggagcacctgggccctgtacggcagagccgtggaccaggacaaggtgctgagattcgcccagcagatcagactgcaccacttcaacagcagccacctggagatcgacgacatgtacacccccgcctacggcgacttcgacttcgacgaggtgaagttccccaacgccagcgacatgttcagaagactgagagacgccggcttcagagtgaccctgtgggtgcaccccttcgtgaactacaacagcagcagattcggcgagggcgtggagagagagctgttcgtgagagagcccaccggcagactgcccgccctggtgagatggtggaacggcatcggcgccgtgctggacttcacccaccccaaggccagagactggttccagggccacctgagaagactgagaagcagatacagcgtggccagcttcaagttcgacgccggcgaggtgagctacctgcccagagacttcagcacctacagacccctgcccgaccccagcgtgtggagcagaagatacaccgagatggccctgcccttcttcagcctggccgaggtgagagtgggctaccagagccagaacatcagctgcttcttcagactggtggacagagacagcgtgtggggctacgacctgggcctgagaagcctgatccccgccgtgctgaccgtgagcatgctgggctaccccttcatcctgcccgacatggtgggcggcaacgccgtgccccagagaaccgccggcggcgacgtgcccgagagagagctgtacatcagatggctggaggtggccgccttcatgcccgccatgcagttcagcatccccccctggagatacgacgccgaggtggtggccatcgcccagaagttcgccgccctgagagccagcctggtggcccccctgctgctggagctggccggcgaggtgaccgacaccggcgaccccatcgtgagacccctgtggtggatcgcccccggcgacgagaccgcccacagaatcgacagccagttcctgatcggcgacaccctgctggtggcccccgtgctggagcccggcaagcaggagagagacgtgtacctgcccgccggcaagtggagaagctacaagggcgagctgttcgacaagacccccgtgctgctgaccgactaccccgtggacctggacgagatcgcctacttcacctgggccagctag

SEQ ID NO: 205193 - DNA, 483 bp, Artificial Sequence
  derived and/or modified sequence
ttcctgcccgacaacttcagccccgccaagcccaagcccagcaaggacctgaagcccctgctgggcagcgccgtgctgggcctgctgctggtgctggccgccgtggtggcctggtgctactacagcgtgagcctgagaaaggccgagagactgagagccgagctgctggacctgaaggccggcggcttcagcatcagaaaccagaagggcgagcaggagccccagcccttcgtgaccagcgacgtgtacagcagcgacgccgccttcggcggcatcctggagagatactggctgagcagcagagccgccgccatcaaggtgaacgacagcgtgcccttccacctgggctggaacagcaccgagagaagcctgagactgcaggccagataccacgacaccccctacaagccccccgccggcagagccgccgcccccgagctgagctacagagtgtgcgtgggcagcgacgtgaccagcatctag

SEQ ID NO: 205194 - DNA, 2043 bp, Artificial Sequence
  derived and/or modified sequence
atgtacacttttctgcccgacaatttcagccccgccaaacctaagcccagcaaggatttgaaacccttattgggatcggctgtcctcggtctgttactagtcctggccgctgtggtggcctggtgctactattcagtcagcctgcggaaggccgaacgactgagagctgaactgcttgatctcaaagcaggcggctttagcattcgcaatcaaaaaggcgaacaggtattccgccttgcctttaggagtggagcactggatttggattcctgcagcagggatggcgcattactcggctgttcacttaccgcggacggtctcccgcttcacttttttattcagacggttagaccgaaagacacagtgatgtgctaccgcgtgcggtgggaggaagccgccccgggtcgggcagttgagcacgccatgttcctcggcgacgccgcggcccattggtatggaggcgccgagatgagaactcagcactggcccattcgcctggatggtcaacaggaaccgcaaccctttgttacctcggacgtttacagctccgacgcagcctttgggggtatactcgagcgatactggttgtcctcgcgtgccgccgcaatcaaagtgaacgactctgtccctttccatctgggatggaatagtacagaaagaagtttacggttgcaggctaggtaccacgacaccccatacaaacctcctgctggcagggctgctgcccccgaactatcctaccgggtgtgtgtcggctctgatgtgacatcaattcataaatacatggtgagacggtactttaataaacccagtagagtacccgctcccgaagctttccgcgatccaatttggtccacctgggctttatatggccgcgccgtggatcaagacaaggtgctgaggtttgctcagcaaattcggctgcaccacttcaacagcagtcaccttgagatcgacgacatgtacaccccggcttatggtgacttcgattttgacgaggttaaatttcctaacgcatccgacatgttcaggaggctgagagatgccggcttcagagtgactttgtgggtgcacccattcgtgaattataatagcagtagatttggcgaaggcgtcgaacgagaactgttcgtccgcgagcccaccggaagacttccagctctggtcaggtggtggaatgggatcggtgcagtattggactttacccacccaaaggcgagggactggttccaaggacacttgcgcaggctgcggtcgagatactcagtggcttctttcaaattcgatgctggtgaggtgtcttatttacctcgtgattttagcacctataggcctctaccggatccgtctgtttggagtcgtcgttacaccgagatggcccttcccttctttagtctggccgaagtcagggtgggttaccaatcccagaatatttcttgcttttttcgactggtggatcgcgactcagtctggggctatgatttgggtttgagaagccttatacccgctgtacttacagtgagcatgctcggctacccctttatcctgcccgacatggtgggaggcaacgccgtgcctcagagaacggcaggcggggacgttccggagagagagttatacatccgatggttggaggttgccgccttcatgcccgcaatgcagtttagtattccaccatggaggtatgatgctgaagtcgtggccattgcgcaaaaattcgctgccctccgagcgagtctggtcgcccctctgcttctggagttagccggggaagttactgacacaggcgatcctatcgtgcggcctctctggtggatcgccccaggcgatgagacagcccacagaattgacagccagtttctcataggggataccttgctggtggcccctgtgctcgaacctggcaaacaggagagggacgtctatctcccagctggaaagtggcgttcatacaagggcgaactattcgataaaacaccagttctgctgaccgattatccagtagacctggacgaaatcgcatactttacgtgggcttcctag

SEQ ID NO: 205195 - DNA, 483 bp, Artificial Sequence
  derived and/or modified sequence
tttcttcctgataacttttcacccgctaagccaaagccttcaaaggaccttaaacctctgttgggttctgctgtgctgggactgctgctggtgcttgccgcggtagtggcgtggtgttactacagcgtgtccttaaggaaggctgaacgactcagggccgaactcctggatttgaaagcgggcgggttttcaatacggaaccagaagggggagcaggaacctcagccgttcgtgacgagcgacgtgtacagctcggacgcggccttcggggggatcctcgagagatactggctgtctagtcgggcagccgctataaaagtgaatgacagcgtccccttccatctgggatggaacagcactgagagatccctcaggttacaggctagatatcatgataccccgtacaagccccctgccggccgagccgcagctcctgagctcagttacagagtgtgcgtgggatctgacgttacatctatctag

SEQ ID NO: 205196 - DNA, 2043 bp, Artificial Sequence
  derived and/or modified sequence
atgtacaccttcctgcctgacaacttctccccagccaagcccaagcccagcaaggacctgaagcccctgctgggcagcgctgtgctgggcctgctgctggtgctggccgctgtggtggcctggtgctactacagcgtgtccctgaggaaggccgagcggctgcgggcagagctgctggacctgaaggccggcggcttcagcatccggaaccagaagggggagcaggtgttccggctggccttccgcagcggggccctggacctggacagctgcagcagagatggagccctgctgggctgcagcctgacagcagatggcctgcccctgcacttcttcatccagacagtgcggcccaaggacacagtgatgtgctacagagtgcgctgggaggaggccgcccctggccgggctgtggagcacgccatgttcctgggagatgctgctgcccactggtacggcggcgctgagatgaggacccagcactggcccatccggctggatggccagcaggagccccagccctttgtgaccagtgatgtgtacagcagtgatgctgcctttggaggcatcctggagcgctactggctgagcagcagagctgctgccatcaaggtgaatgacagcgtgcccttccacctgggctggaacagcacagagaggagcctgcggctgcaggcccgctaccatgacaccccctacaagcccccagctggccgggctgctgcccctgagctgagctacagagtgtgtgtgggcagtgatgtgaccagcatccacaagtacatggtgcggcgctacttcaacaagcccagccgggtgcctgcccctgaggccttccgggaccccatctggagcacctgggccctgtatggccgggctgtggaccaggacaaggtgctgcgctttgcccagcagatccggctgcaccacttcaacagcagccacctggagattgatgacatgtacaccccagcctacggggactttgattttgatgaggtgaagttccccaatgccagtgacatgttccggcggctgagagatgctggcttccgggtgaccctgtgggtgcacccctttgtgaactacaacagcagcagatttggagaaggagtggagcgggagctgtttgtgcgggagcccaccggccgcctgcctgccctggtgcgctggtggaatggaattggagctgtgctggacttcacccaccccaaggcccgggactggttccagggccacctgcggcggctgcggagccgctacagcgtggccagcttcaagtttgatgctggggaggtgtcctacctgccccgggacttcagcacctaccggcccctgcctgaccccagcgtgtggagccgccgctacacagagatggccctgcccttcttcagcctggccgaggtgcgggtgggctaccagagccagaacatcagctgcttcttccggctggtggaccgggacagcgtgtggggctatgacctgggcctgcggagcctcatcccagctgtgctgactgtgtccatgctgggctaccccttcatcctgcctgacatggtgggcggcaatgctgtgccccagaggacagctggaggagatgtgcctgagcgggagctgtacatccgctggctggaggtggccgccttcatgcctgccatgcagttcagcatccccccctggaggtatgatgctgaggtggtggccatcgcccagaagtttgctgccctgcgggccagcctggtggcccccctgctgctggagctggccggggaggtgacagacacaggagaccccatcgtgcggcccctgtggtggatcgcccctggagatgaaacagcccacagaattgacagccagttcctgattggagacaccctgctggtggcccctgtgctggagcccgggaagcaggagagagatgtgtacctgcctgctgggaagtggaggagctacaagggggagctgtttgacaagacccctgtgctgctgacagactaccctgtggacctggatgaaattgcctacttcacctgggccagctag

SEQ ID NO: 205197 - DNA, 483 bp, Artificial Sequence
  derived and/or modified sequence
ttcctgcctgacaacttcagccctgccaagcccaagcccagcaaggacctgaagcccctgctgggcagcgctgtgctgggcctgctgctggtgctggccgctgtggtggcctggtgctactacagcgtgtccctgaggaaggccgagcggctgcgggcagagctgctggacctgaaggccggcggcttcagcatccggaaccagaagggggagcaggagccccagccctttgtgaccagtgatgtgtacagcagtgatgctgcctttggaggcatcctggagcgctactggctgagcagcagagctgctgccatcaaggtgaatgacagcgtgcccttccacctgggctggaacagcacagagaggagcctgcggctgcaggcccgctaccatgacaccccctacaagcccccagctggccgggctgctgcccctgagctgagctacagagtgtgtgtgggcagtgatgtgaccagcatctag

SEQ ID NO: 205198 - DNA, 2043 bp, Artificial Sequence
  derived and/or modified sequence
atgtacaccttcctgcccgacaacttcagccccgccaagcccaagccatccaaagacctcaaacctttgctgggaagcgcagtgttaggccttctactcgttctggccgccgtggttgcgtggtgttattattcagtaagcctgagaaaggcagagcgactgcgagccgagctcttagatctgaaagcaggcggcttttctatacggaatcaaaaaggagagcaggtgtttcggttagcctttcggagtggagcactggaccttgattcatgcagtcgggatggcgcactcctgggatgttcactgacggccgatggcttgcccctgcatttctttatccagacagtgcgccctaaagacacagtgatgtgctatcgggtaagatgggaggaagcggcccctggcagagctgtcgaacacgccatgtttcttggggacgcagctgcccactggtatggcggagccgagatgcgcacccagcattggcctatccgccttgacggccagcaagagccgcagccgttcgtgacctccgatgtttattccagtgatgccgcttttgggggcatccttgagcgatattggctgtccagtcgagccgcggcaataaaagtgaacgacagcgtccccttccacctgggatggaattctacggagaggagtctgagacttcaggcaaggtaccatgacaccccctacaagcccccagccgggcgggctgccgctcccgagctgtcgtatcgcgtatgtgttggcagcgatgtgacctctatccataaatatatggtcagacggtatttcaataaaccgagccgagtgcccgcacccgaagcatttcgggatcccatttggtctacttgggccttgtatgggcgggcagtggatcaggacaaggtgctgcgctttgctcagcagattaggttgcatcactttaattcttcacaccttgagatcgatgatatgtacacgcccgcctacggagactttgactttgacgaggttaagttccctaacgcatctgacatgtttaggcgactgagggatgccggcttccgggttacactttgggttcacccattcgtaaactacaattctagtcgctttggggaaggggtcgaacgggaattatttgttagggaaccaacaggcagattaccggcactggtgaggtggtggaacggtatcggcgctgtactggactttactcatcccaaggcccgcgactggttccagggacacctccgaagacttaggtcccgttacagtgtggcctcttttaagtttgacgctggtgaggttagctacctcccccgcgattttagcacttatcggcctttgcctgatccaagtgtgtggtcaaggagatatacagagatggccctgcccttcttcagtctggcggaggtccgcgtgggctaccagtcacagaacatctcatgctttttccgtctggttgatcgggactccgtgtgggggtatgacctcggcctcagatcattgatccccgccgttcttaccgtgtctatgctgggctatcccttcatcttgcctgacatggttggaggaaacgcagtacctcaaagaactgccggaggagacgtgcctgagagggaactctatatcaggtggttggaggtcgcagcatttatgcctgctatgcaatttagcatcccaccttggaggtatgacgcagaggtagtggccatagcccagaaatttgccgcactgcgcgcctccctggtggctcccttgctgctcgagctggcaggggaggtcacggatacgggcgatcctatcgtcagaccgctgtggtggattgcccctggagacgagacagctcacagaatcgattcccagttcttaattggagacaccctgctggtagcccctgtcctcgagccaggtaaacaggaaagagatgtttatctgccggccgggaagtggcgcagctataagggagagctgtttgataagactccagtgctgctgacagattatccagtggatcttgacgaaattgcttacttcacatgggcgagctag

SEQ ID NO: 205199 - DNA, 483 bp, Artificial Sequence
  derived and/or modified sequence
ttcctgcccgacaacttcagccccgccaagcccaagcccagcaaggatctgaagcccctcctgggcagtgcggtgctgggcttgttgcttgtgctggccgccgttgtggcttggtgctactactccgtgtctttgcgcaaggccgagcggctacgggccgagctgctggacctcaaagccggaggcttttccattcgtaatcagaaaggtgaacaagagccccagccattcgtaacctctgacgtctactcttccgatgcagcttttggcggtatcctggaaagatactggctgtcatcaagagccgcagcgatcaaggtgaatgatagcgtcccattccacctgggttggaattcaaccgaacggtctttacgcctgcaggctaggtatcatgacaccccttacaaacctcccgctggtagggccgccgcaccagagctgtcctaccgggtctgtgtcggatctgatgtcacttccatctag

SEQ ID NO: 205200 - DNA, 6398 bp, Artificial Sequence
  derived and/or modified sequence
gcgcaggggatcggcgggaagctctttcacccccgcttctgccgggctgtaactgcaatggagcaggttgagatgaactcagtcagatggccccacggcccgctcctttcttagcagcccactaatgctccagaaccctcaggagaagagccaggcctacccccgccgccgccggcctggctgctacgcatagcgtcagaaccccgaggccatcgcagccgcagctatgtacaccttcctgcccgacaacttctcacctgccaagcccaagccttccaaagacctgaagccgctgctgggctccgcggttctggggctgctgcttgtgctggccgcggtggtggcctggtgctactacagcgtctccctacgcaaggcggagcgacttcgcgcggagctgctggacctgaaagctggcggcttctccatccgcaatcagaagggagagcaggtcttccgcctggccttccgctccggcgcgctggaccttgactcctgcagccgcgatggcgccctgctgggctgctcgctcacggccgacgggctgccgctgcacttcttcatccagactgtgcggcccaaggacacggtcatgtgctaccgcgtgcgctgggaggaggcagcgccgggccgggccgtggagcacgccatgttcttgggcgacgcggcggcccactggtatggtggcgccgagatgaggacgcaacactggcccatccgcctggatggccagcaggagccccagccgttcgtcaccagcgatgtctactcctccgacgccgcgtttgggggcatcctcgagcgctactggctatcttcgcgcgcggccgccatcaaagtcaatgactcagtgcccttccacctgggctggaacagcacggagcgctcgctgcggcttcaggcgcgctaccacgacacgccctacaagccacccgccggccgcgccgcagcgccagagctgagctaccgagtgtgcgtgggctcagacgtcacctccatccacaagtacatggtgcgtcgctacttcaacaagccgtcaagggtgccagcacccgaggccttccgagaccccatttggtccacatgggcgctgtacgggcgcgccgtggaccaggacaaggtgctgcgttttgcccaacagatccgcctgcaccacttcaacagcagccacctggaaatcgacgacatgtacacacctgcttatggcgacttcgacttcgatgaggtcaaattccccaacgccagcgacatgttccgccgcctgcgcgacgccggcttccgcgtcacgctctgggtgcacccttttgtcaactacaactcgtcgcgcttcggcgagggcgtggagcgcgagctgttcgtgcgcgaacccacgggccggttacctgcgctggtgcgctggtggaacggcatcggcgcggtgctagacttcacgcacccaaaggcccgcgactggttccagggacacctgcggcggctgcgctctcgctactccgtggcttccttcaagttcgacgcgggcgaggtcagctacctgccgcgggacttcagcacctaccggccgctgccggaccccagcgtctggagccggcgctacactgagatggcgctgcccttcttctcgctggcggaggtgcgcgtaggctaccagtcacagaacatctcctgcttcttccgcctggtggatcgcgactctgtgtggggctacgacctggggttgcgctcactcatccccgcggtgctcaccgtcagcatgctgggctacccattcatcctacccgatatggtgggcggcaacgccgtgccccagcggacagccggcggcgatgtgcccgagcgcgagctctacattcgctggctggaagtggccgcctttatgccggccatgcagttctctatcccgccctggcgctacgacgcggaagtggtggccatcgcgcagaagttcgccgccctgcgggcctcgcttgtggcaccgctgttgcttgagctggcgggcgaggtcaccgacacgggtgaccctatcgtgcgccccctttggtggattgcgcccggcgacgagacagctcaccgtatcgactcgcagttccttattggggacacgctgcttgtggccccggtgctggagccaggcaagcaggagcgcgacgtctatttgcccgccggcaagtggcgcagctacaagggtgagcttttcgacaagacgccggtgctgctcaccgattacccggtcgacctggatgagatcgcctactttacctgggcgtcctgacccagcccagggcccggtaaccgcaaagcccccagtcttcatgcagaccttgaaccctccgtcacacccgcaccatgtactcccaggaacctcccacctctataccacccattaagtggctgctgacttaaatgtgctggaaccagctgctgaaggtggggcctagggagggggcactgaagcaatctcctgctccaacgcacaatccttactgtgccctttccacccccacactcacaccaatctgcagaaacctcttccctggggtggaagccagagagcttagaggaaaaaggtcagctctcttcctgttatacatggttatacatggttggggtttaaaagcacaaagagaaacctccccctcctggctttcgtggccatctttgtccatcttaggtggggacttgatcttatttaaggtctccaaatagcccccaccacacttagaacgtgtgttttcttagtgttagaagccaggccctgagtccccagcactcacctgaactgtggctgatttggtcccagtccagctggggaggtgtttggctgacaaggaggcaagagatcccctcccagggaacaggaggactgggcttagcacagagccatcatcatgttcccaatttgtgaagagactcctaacactgcactaacccatttgtgtacatacatgggctcagccctgggccaaatgtgcctgatgggaacagacttgcagggccatgcaggccagacttcgtgccttaactgaagagtgtgcgtgtgtgtgtgtgagagagagagagagagagaaacacgcatcatgggtccctgatctatgaaatgaacacaacctctctgaggctggatgatctggaggaagggggcatggagcaaatttgaggctctgattgctgagccagcctcctcccaggcggtttccccaggactctcgtaggaaataaatagccctttcaagattcctcagctgcctcaccccctgcacatgtgcctggggtgtggcctagaagggagtgatgttcttactctggtggtctgtgcttctgaacacaggctacatgcacacactgacaactaccaataaacagacaggggaaggtctttcatctcagccattttctcttccccccgcccccccttagatggagtcttgctctgtcacccaggttggagtgcagtggcacaatcagctcactgcaacccctcctcctaggttcaagcgattgagtagctgagattacaggcatgcatcactatgcctggctttttgtattttttagtagagatggggtttaccatgttggccaggctagtctcaaactcctgacctagtgatgcacccaccttggcctcccaaagtgttgggattacaggcatgagccaccacgccagccattttctctttctaagaagagcaacctcagccggagtgagttttttctgactttgcagctgagtctggagaaaagtggcatgccagagcgggtcggtgggaaacagggtgaactttagcttccatcaacagctctggtagcaaaaccagtcccctaccccctagagaatgcatccgtttccccacctgatatggtttggctgtgtccccacctaaaactcatcttgaattgtagctcccataattgccatgtgttgtgggaaggacccagtgggagataattgaaatatgggggcagtttccgccatactgttctggtgatagtgaatagatctcatgagagctgatgattttataagaggtttccccttttgcttagttctcattctctcttgcctgccgccatgtaagacgtgcctttctgtcatgcttgtgaggcctccccagccacgtggagctgtgagttcattaaacctctttttctttataaattacccagtcttggttatgtctttatcagcactgtgaaaatgaacctatacagtaaattggtaccagtagagtggggcgctgctgtaaatacccaaaaatgtggaagcaactttggaactgggtaacaggcagaggttggaacagtttggagggatcagaagacaggaaaatgtgggaaagtttgggacttcctagagacttgttaaatggctttgaccaaaatgctgataatgattgggacatgaaatccaggctgagttggtctcagatagcgatgaggaacttgtttggtactggagtaaaggtgactcttgctatattttagcaaagagactggctgcattttgcccctgccctagagatttgtggaactttgaactcgagggagatgatttagggtatctggcagaagaaatttctaagcagcaaagcattcatgaggtgacttgggtgctgttaaaagcattcagttttaaaagggaaacagactataaaagtttggaaaatttgcagcctgatgatgagatagaaaagaaaaacccattttctgaggataaattcaagccccctgcagaaatttgcataagtaacaaggagccaaatgttaatcactaagacatggggaaaatgtctgcagggcatgtcagagacctttgcagcagtgcctcccatcacaggcctggaggcctaggagggaaaaaatggttttgtgggccaggcccaaggtccccttgctgtgtgcagcccagggacttggtaccatgcatcccagctgctctagtcatggctaaaaggggccaagatacagctcaggccttggcttcagagggtgcaagccccaagtcttggcatcttccacgtagtgttgagcctgcaggtgcacagaagtcaagaactgaggtttgggaacctctgcctagatttcagagaatgtatggaaatgcatgtatgtccaggcagaagtttgctacaggagtgaggccctcatggagaacctctgttaaggcaatgtggaaggggaagcccccacacagagaccccactgggacactgcctagtagagctgtcagaagaaggccaccgtcctccagacatcagaatggtatatccactgacagcttgcaccatgcacctggaaaagccacagacactcaacgccagcctgtaaaagcaaccgagaagtaggctgtaccctgcaatgccataggggtggagctgcccaagaccatgggaacccacctcctgcatcagtgtgacctggatgtgagacatggagtcaaaggagaccattttggagctttaagatttaactgccctgctggatttcagacttgcatggggcctttagccacttcgttttggccaacttctcccacttgaaatgggtgtatttagccaatgcctgtacctccgttgtatctaggaagtaactaactagcctttgattttacaggctcataggtggaagggacttgccttgtttcagatgagactttggagtatggacttttgagttaatgctgaaatgagttaagactttgggggactgttgggaaggcatgattgatttttaaatgagaggacatgagatttgggaggggccagggagagaatgatatggtttggctgtgtccccatccaaatatcaccttaaattgtagctcccataattgtgggagggacctggtgggagataattgaatcataggggcagtttctcccatactgttctggtggtagtgaataagtctcacgagatctgatggtttaataaggggtttccccttttgcttggctctcattctctcttgtctgctgccatgtaagatgtgccttttgccttccaccatgattgtgaggcctcccagccacatggaactgtgagttcattaaacctctttttcttcataaattacccagtctcgggtatgtctttatcagcagtgtgaaaacagactaatacaccactcctctaccttctttattttctcagtgtggaaaatgcctgatgaaagctttggggccctcacagatgcacaactcaagtgctgattctatcacttatctaccagctctgtgaccttgaacaagccgcttaaccttgctaagcctctgttttctcatatgtcaaatggtgataataatgcctacctcccgaggttgttgtaagaattataagcacaaatgtatgtaaagtgcctggcacaaagtaggtgctcaataaatggtagctattataat

SEQ ID NO: 205201 - DNA, 482 bp, Artificial Sequence
  derived and/or modified sequence
ttcctgcccgacaacttctcacctgccaagcccaagccttccaaagacctgaagccgctgctgggctccgcggttctggggctgctgcttgtgctggccgcggtggtggcctggtgctactacagcgtctccctacgcaaggcggagcgacttcgcgcggagctgctggacctgaaagctggcggcttctccatccgcaatcagaagggagagcaggagccccagccgttcgtcaccagcgatgtctactcctccgacgccgcgtttgggggcatcctcgagcgctactggctatcttcgcgcgcggccgccatcaaagtcaatgactcagtgcccttccacctgggctggaacagcacggagcgctcgctgcggcttcaggcgcgctaccacgacacgccctacaagccacccgccggccgcgccgcagcgccagagctgagctaccgagtgtgcgtgggctcagacgtcacctccatcca

SEQ ID NO: 205202 - DNA, 2043 bp, Artificial Sequence
  derived and/or modified sequence
atgtatacgtttctccccgacaatttctctcccgcaaagccaaagccaagtaaagacctcaagcccctccttggctccgccgtactcggtctcctgctggttttggcagcagtggttgcttggtgctactactccgtgtcactcaggaaagctgagcgtcttcgcgctgaactgctggatctgaaagctggcggatttagcatccgcaatcaaaaaggcgagcaggtgtttcgcctggcgtttagaagtggcgcactcgacctagattcttgttcccgtgacggagccctgctcggctgtagtctgaccgcagatgggttgcccctccacttttttattcagacagtgcggcctaaggacaccgtcatgtgttacagagtcaggtgggaggaggctgcccctggccgagccgtggagcacgcaatgtttctcggggatgcagcagctcactggtatggtggagccgagatgaggacccagcactggccgattaggctggacgggcagcaggagcctcaaccattcgttacaagtgacgtgtactctagtgacgccgcttttgggggaattcttgaacggtactggctgagttctagggctgccgctattaaagttaatgactctgttccatttcatctaggctggaactcaacagagaggtccttgcggcttcaggcgagatatcatgatacgccgtacaaacccccagctggaagggccgctgctccagaattgagctatagggtatgcgtaggcagcgatgtgacgagcatccacaagtacatggttagacgttactttaataaaccgtcacgagtcccagcccctgaggcttttcgggatccaatctggtctacatgggccctgtacggacgggcagtggatcaggacaaggttcttagattcgctcagcagatcaggctgcaccacttcaactcgagccaccttgagattgacgatatgtatacgcccgcttatggggatttcgactttgatgaagtgaagttcccgaatgcgtctgacatgtttagacggctacgggacgccggatttagggtaactctctgggtccacccatttgtaaactacaacagcagcaggttcggagaaggagtggagcgtgaactttttgtgcgagagccaactggaaggttgcctgcactggtgaggtggtggaacggcattggggctgtgcttgactttacacatcctaaagccagagattggtttcagggccatctgcggagactaaggagccgctatagtgtggcctccttcaaattcgatgccggagaggtgagctatctgcctcgggatttctccacttatcggcctctgccagatccctcagtttggtcccgacgctacaccgagatggctctgccatttttttctctggccgaggtgagagtgggataccagtcccaaaacatttcttgctttttcagactcgtagatcgggacagcgtgtggggttacgaccttggccttcggtccctcatccctgccgtgctgacggtgtcaatgctgggctatccatttatcctgccagacatggtgggcggaaatgctgtgccacagaggaccgccggaggggacgtccctgagcgggagctatatatccgctggctggaagtcgccgcatttatgccagctatgcaattttccattccaccctggcgatacgacgcagaggtggtcgccatcgcccagaagttcgcagcactccgcgcttcactggtggcacccttgcttctcgagttggccggtgaggttaccgacacaggggaccccatagtgaggcctttgtggtggattgcacctggcgatgagactgcacaccggatcgattctcaattcttgatcggggacactctgttggtggccccagtactcgagcctggaaaacaggagcgcgatgtgtacctgcctgccggaaaatggcgatcttacaagggcgagctgttcgacaagactcctgttctgttaaccgactaccctgtggacctcgatgaaatcgcttatttcacctgggcctcatag

SEQ ID NO: 205203 - DNA, 483 bp, Artificial Sequence
  derived and/or modified sequence
tttctccctgacaacttctcaccagccaagcctaaaccatctaaggacctgaagcctctgctcggttccgcagtgctgggtctcttgctcgtgctggccgctgttgtagcctggtgttactattcggtatctctccgcaaagccgagcgactcagggcggaactgcttgatttaaaggctggtgggttcagtatccggaatcaaaagggagaacaggaaccacagccgtttgtcacatctgacgtgtattcaagcgacgcagccttcggaggaattcttgagcggtattggctcagcagtcgcgcagctgctatcaaggtcaacgactccgttcccttccatctgggctggaatagtactgaacgctctctgcgcctccaggcacgttatcacgacacaccctataaacctcccgctggacgtgcggctgctcctgaactttcttacagggtgtgtgtgggttccgacgttacctctatatag

SEQ ID NO: 205204 - protein, 553 aa, Artificial Sequence
  derived and/or modified sequence
MDSPGYNCFVDKDKMDAAIQDLGPKELSCTELQELKQLARQGYWAQSHALRGKVYQRLIRDIPCRTVTPDASVYSDIVGKIVGKHSSSCLPLPEFVDNTQVPSYCLNARGEGAVRKILLCLANQFPDISFCPALPAVVALLLHYSIDEAECFEKACRILACNDPGRRLIDQSFLAFESSCMTFGDLVNKYCQAAHKLMVAVSEDVLQVYADWQRWLFGELPLCYFARVFDVFLVEGYKVLYRVALAILKFFHKVRAGQPLESDSVKQDIRTFVRDIAKTVSPEKLLEKAFAIRLFSRKEIQLLQMANEKALKQKGITVKQKRQFVHLAVHAENFRSEIVSVREMRDIWSWVPERFALCQPLLLFSSLQHGYSLARFYFQCEGHEPTLLLIKTTQKEVCGAYLSTDWSERNKFGGKLGFFGTGECFVFRLQPEVQRYEWVVIKHPELTKPPPLMAAEPTAPLSHSASSDPADRLSPFLAARHFNLPSKTESMFMAGGSDCLIVGGGGGQALYIDGDLNRGRTSHCDTFNNQPLCSENFLIAAVEAWGFQDPDTQ

SEQ ID NO: 205205 - DNA, 210 bp, Artificial Sequence
  derived and/or modified sequence
atgatggtgctgacccccttctggctgggccgggactgccccagccgaggacagcctaccctgagagagggcaaggggttatcggtgccatttacatgtaagttgaataacccacagcgttatctcctgtatctgactcacactccccgaaggcaatatagtcctgcatggtaccttcctgggaagctgggaataactttgactgtgtag

SEQ ID NO: 205206 - DNA, 1662 bp, Artificial Sequence
  derived and/or modified sequence
atggacagccccggctacaactgcttcgtggacaaggacaagatggacgccgccatccaggacctgggccccaaggagctgagctgcaccgagctgcaggagctgaagcagctggccagacagggctactgggcccagagccacgccctgagaggcaaggtgtaccagagactgatcagagacatcccctgcagaaccgtgacccccgacgccagcgtgtacagcgacatcgtgggcaagatcgtgggcaagcacagcagcagctgcctgcccctgcccgagttcgtggacaacacccaggtgcccagctactgcctgaacgccagaggcgagggcgccgtgagaaagatcctgctgtgcctggccaaccagttccccgacatcagcttctgccccgccctgcccgccgtggtggccctgctgctgcactacagcatcgacgaggccgagtgcttcgagaaggcctgcagaatcctggcctgcaacgaccccggcagaagactgatcgaccagagcttcctggccttcgagagcagctgcatgaccttcggcgacctggtgaacaagtactgccaggccgcccacaagctgatggtggccgtgagcgaggacgtgctgcaggtgtacgccgactggcagagatggctgttcggcgagctgcccctgtgctacttcgccagagtgttcgacgtgttcctggtggagggctacaaggtgctgtacagagtggccctggccatcctgaagttcttccacaaggtgagagccggccagcccctggagagcgacagcgtgaagcaggacatcagaaccttcgtgagagacatcgccaagaccgtgagccccgagaagctgctggagaaggccttcgccatcagactgttcagcagaaaggagatccagctgctgcagatggccaacgagaaggccctgaagcagaagggcatcaccgtgaagcagaagagacagttcgtgcacctggccgtgcacgccgagaacttcagaagcgagatcgtgagcgtgagagagatgagagacatctggagctgggtgcccgagagattcgccctgtgccagcccctgctgctgttcagcagcctgcagcacggctacagcctggccagattctacttccagtgcgagggccacgagcccaccctgctgctgatcaagaccacccagaaggaggtgtgcggcgcctacctgagcaccgactggagcgagagaaacaagttcggcggcaagctgggcttcttcggcaccggcgagtgcttcgtgttcagactgcagcccgaggtgcagagatacgagtgggtggtgatcaagcaccccgagctgaccaagcccccccccctgatggccgccgagcccaccgcccccctgagccacagcgccagcagcgaccccgccgacagactgagccccttcctggccgccagacacttcaacctgcccagcaagaccgagagcatgttcatggccggcggcagcgactgcctgatcgtgggcggcggcggcggccaggccctgtacatcgacggcgacctgaacagaggcagaaccagccactgcgacaccttcaacaaccagcccctgtgcagcgagaacttcctgatcgccgccgtggaggcctggggcttccaggaccccgacacccagtag

SEQ ID NO: 205207 - DNA, 1662 bp, Artificial Sequence
  derived and/or modified sequence
atggattcaccagggtataactgtttcgttgacaaagacaaaatggacgcggccatccaggacctggggccgaaagaattgtcgtgtaccgagctgcaggaactaaaacaactggctcgccaaggctactgggcgcagtctcacgccctgagaggcaaagtgtatcagcggttaatcagagatatcccctgccgcaccgtaacacctgatgccagtgtatattcggacattgtcggtaaaattgttggcaagcatagctcctcatgtttgcctctgcctgaatttgtggataacactcaggtgccttcttactgcctcaacgctcggggggaaggagctgtgaggaagatactgttgtgtctggcgaatcagtttcctgatatctcattctgccccgcactgcccgctgtcgtcgcactgctcttacattacagcattgacgaagcagagtgttttgaaaaagcttgtcgtatcttggcctgtaatgatcctggacgtagactgattgatcagtcgttcctggcctttgagagtagctgtatgacttttggtgatctggtcaacaaatattgccaagccgctcataagctgatggtggcagtgtccgaggacgtactgcaggtctacgctgattggcaaaggtggcttttcggggaactccctttgtgctatttcgccagagtgtttgacgtgtttttagtggaggggtacaaagtgctgtacagagtcgctctggcaatccttaaattttttcataaggtccgagcaggccagccactggagagcgattcagtgaaacaagacatacgaacttttgtgagggatattgccaagaccgtgtccccagaaaaactgctggaaaaggcatttgcaattagactgttcagtagaaaagaaatccagcttctgcagatggcaaacgagaaagccctgaagcagaaaggtataactgtgaaacagaagcgtcaattcgtccatctggcagtgcacgccgaaaattttcggagcgagatcgtgtctgtccgcgagatgcgagatatctggtcttgggtacccgaaagatttgctctgtgtcagccactgttgctgtttagctctctacagcacgggtatagccttgcaaggttttactttcagtgcgaggggcatgaaccaacgttgctcttgataaaaactactcagaaagaagtctgcggcgcttacctaagtaccgactggtcagaaagaaacaagtttggcggtaaactcggattcttcgggactggtgagtgcttcgtgtttcgcctgcagccggaggtgcagcggtacgaatgggtggtcattaagcaccccgagctaacaaaaccaccacccctgatggccgccgaaccaactgcgcccctcagccacagcgccagcagtgacccagctgaccgcttgagcccttttctggctgctagacattttaacctcccatcgaagaccgaatctatgtttatggccggaggaagcgactgtctgattgtcggcgggggcggcggacaggccctgtacattgacggagatctgaacagaggtcgcacctctcattgcgacacttttaataatcagcccctgtgctcggaaaacttcctgatcgccgcagttgaagcatggggattccaagatccagacacacagtag

SEQ ID NO: 205208 - DNA, 1662 bp, Artificial Sequence
  derived and/or modified sequence
atggacagccccgggtacaactgttttgtggataaagataagatggatgcagctattcaggatctcggccctaaggaactctcgtgcacagagctgcaggaacttaaacagttagctcgacaggggtactgggcacagtcccacgctctgcgtgggaaagtgtatcagagattgatccgcgacatcccttgtagaaccgtgaccccggatgcgagtgtctatagtgatattgtaggcaagattgtcggcaagcactcctccagctgtcttcccctaccggaatttgtcgacaatacccaagtcccgtcatattgtctgaacgcgcgaggagaaggtgcggtgcgtaagatattgctgtgtttggccaaccaatttcccgacatctcgttctgcccagccttaccggccgtggttgccctactattacactactcaattgatgaagcagaatgtttcgagaaggcctgtaggatcttggcgtgtaatgacccaggacgccgcttgattgatcagtcgttcttagccttcgaatcttcatgcatgactttcggagatctggtcaataagtactgccaggccgcgcataaactgatggttgcagtcagtgaggatgtgttgcaggtgtatgctgattggcaacggtggctgttcggagagctccccctgtgctactttgcgagagtttttgacgtgttcctggtggaaggctacaaggtgctgtaccgagtagcccttgccatcctgaagttctttcataaagtgcgtgccggccagcccctggagtctgatagcgtgaagcaagacatacgcacttttgttcgggacattgcaaagacagtatctccggagaagctcttagaaaaagcctttgctatccgtctcttctcccggaaggaaattcagctgctgcagatggccaacgagaaggcgctgaaacagaagggcattacagtcaaacagaaaaggcagtttgttcaccttgcggtacacgccgagaacttcaggagtgagatcgtttcagtcagggagatgagggatatatggagctgggttccagaacggttcgccctttgccagccgttgcttctgttttctagcctccagcatgggtatagtctggcccggttctacttccagtgcgaaggccacgaaccaaccctgttacttatcaaaaccacacaaaaggaggtttgcggcgcctatctctccaccgattggtccgagagaaacaagtttggagggaaactaggtttcttcggaaccggggagtgttttgtgtttcgacttcaacccgaagtccagcgctatgaatgggtagtgatcaagcaccccgagctgaccaagccaccacccctgatggccgccgagcccaccgcacccctgtcccatagcgctagtagcgatcccgccgaccggctatcccctttcctcgcagcccggcactttaatttgccgagcaaaacagaaagcatgtttatggccggtggaagcgactgtctcatcgtgggggggggcgggggccaagcactgtacatcgacggggacctcaatcgcggaagaacatcacactgtgacacctttaacaatcagccgttatgcagtgaaaatttcctgattgcagccgttgaggcttggggtttccaggatcctgatacccagtag

SEQ ID NO: 205209 - DNA, 1662 bp, Artificial Sequence
  derived and/or modified sequence
atggacagccctggctacaactgctttgtggacaaggacaagatggatgctgccatccaggacctgggccccaaggagctgagctgcacagagctgcaggagctgaagcagctggcccggcagggctactgggcccagagccacgccctgcggggcaaggtgtaccagaggctcatccgggacatcccctgcaggacagtgaccccagatgcctctgtgtacagcgacatcgtgggcaagatcgtgggcaagcacagcagcagctgcctgcccctgcctgagtttgtggacaacacccaggtgcccagctactgcctgaatgcccggggggagggcgctgtgaggaagatcctgctgtgcctggccaaccagttcccagacatctccttctgcccagccctgcctgctgtggtggccctgctgctgcactacagcattgatgaagctgagtgctttgagaaggcctgccgcatcctggcctgcaatgaccccggccggcggctgattgaccagagcttcctggcctttgagagcagctgcatgacctttggagacctggtgaacaagtactgccaggccgcccacaagctgatggtggccgtgtctgaagatgtgctgcaggtgtatgctgactggcagcgctggctgtttggagagctgcccctgtgctactttgcccgggtgtttgatgtgttcctggtggagggctacaaggtgctgtacagagtggccctggccatcctgaagttcttccacaaggtgcgggccggccagcccctggagagtgacagcgtgaagcaggacatccgcacctttgtgcgggacatcgccaagacagtgtccccagagaagctgctggagaaggcctttgccatccgcctcttcagcaggaaggagatccagctgctgcagatggccaatgagaaggccctgaagcagaagggcatcaccgtgaagcagaagaggcagtttgtgcacctggccgtgcatgctgagaacttccgctctgagatcgtgtctgtgcgggagatgagggacatctggagctgggtgcctgagagatttgccctgtgccagcccctgctgctcttcagcagcctgcagcacggctacagcctggcccgcttctacttccagtgtgagggccacgagcccaccctgctgctgatcaagaccacccagaaggaggtgtgtggggcctacctgagcacagactggagcgagaggaacaagtttggaggcaagctgggcttctttggaactggagaatgttttgtgttccggctgcagcctgaggtgcagagatatgagtgggtggtgatcaagcaccctgagctgaccaagcccccacccctgatggctgctgagcccacagcccccctgagccacagcgccagcagtgaccctgctgaccggctgagccccttcctggccgcccggcacttcaacctgcccagcaagacagagagcatgttcatggccggcggcagtgactgcctgattgtgggcggcggcggcggccaggccctgtacattgatggagacctgaacagaggccgcaccagccactgtgacaccttcaacaaccagcccctgtgcagcgagaacttcctgattgctgctgtggaggcctggggcttccaggaccctgacacccagtag

SEQ ID NO: 205210 - DNA, 1662 bp, Artificial Sequence
  derived and/or modified sequence
atggacagccccggctacaactgcttcgtggacaaggacaagatggatgccgccattcaggacttggggcctaaagaactctcctgtaccgagctgcaagaactgaaacagctcgcccggcaggggtactgggcccaaagccacgctttgcgtggaaaagtttatcagcggctaattagagacatcccctgcagaaccgtgactcctgacgctagtgtctactctgacatcgtgggcaaaatagtgggcaagcactcatctagctgcctgccactgccggagttcgtggacaatacccaggttcccagctactgcttgaatgccagaggagaaggagcagtccgaaagatacttttgtgtcttgcaaaccagttccctgatatatctttctgtccggccctccctgccgttgtcgccctcctgcttcactattccatcgacgaagctgagtgttttgagaaagcatgtcggatccttgcatgtaatgatcctggacggaggctcatcgaccagtcatttcttgccttcgaatcctcatgtatgacgttcggtgacttggtgaacaaatattgccaggctgcacacaaactgatggtagctgtctccgaagacgtgctgcaggtgtatgcggactggcagcgctggctgttcggcgagttaccactgtgctactttgcaagagtgttcgacgttttcctggtggaaggatataaggtcttatatcgtgtagccctcgctattctcaagttctttcacaaggtgcgcgccggtcagccacttgagtccgacagtgtgaaacaggacatcaggacctttgtgagagatatcgctaaaacggtgagtccagagaaactgctcgagaaggctttcgcgatccggcttttttctcgtaaagaaatccagctcctacagatggctaatgagaaagccctgaagcagaaggggatcactgttaagcagaaacgacagttcgtccatctggccgtgcacgccgaaaacttccgcagcgaaatcgtctccgttcgcgaaatgagggatatctggtcctgggtcccagaacggttcgctctgtgccaacccctgttgttgttcagctcactgcagcacgggtactctttggcacggttctactttcagtgcgaaggacacgaacctacacttttactgatcaaaacaacccagaaagaagtgtgcggcgcatacttaagcaccgactggtctgagaggaacaaattcggcggaaagttggggtttttcggcacgggtgaatgttttgtttttaggctacagccggaggtccagcggtatgagtgggtggtgatcaagcatccagagttgacaaaacctccgccattaatggccgctgagcctaccgcaccattgagccacagtgcctcaagcgaccctgccgaccggctcagccctttcctcgccgctagacattttaatttaccttcaaagactgagtcgatgtttatggcagggggatctgattgccttatcgtcggaggggggggggggcaagccctgtacatagacggtgacctgaacaggggcagaacatcccattgcgacacattcaacaaccagccgttgtgctcggaaaattttctgatcgcagctgtggaggcttgggggtttcaggaccccgacactcagtag

SEQ ID NO: 205211 - DNA, 1662 bp, Artificial Sequence
  derived and/or modified sequence
atggacagccccggctacaactgcttcgtggacaaggacaagatggatgccgccattcaagacctgggacccaaagagctaagctgtacagagctgcaggaactgaagcagctggcgcgccaaggatattgggcacaaagccacgccctgcgcggtaaggtataccagagattaattagggacattccctgtaggacggtgacgccagacgcctcggtgtatagtgatattgtgggaaaaattgtcggaaagcacagcagctcttgcctaccactgcccgagttcgtcgacaatacccaggtcccctcgtactgcttgaacgccagaggggagggagccgtgaggaagatccttctgtgtcttgctaatcaatttccagatatcagcttttgtccagccctccctgccgtggtggcactgttactgcattactcaattgacgaagccgaatgcttcgagaaggcatgcagaatcctggcatgtaatgatcctggccggcgactcatcgaccaatcatttttggcattcgagtcctcatgtatgacctttggagacctggtgaataaatattgccaggccgcgcacaagctgatggtagccgtgtccgaagacgttctccaggtctacgcagactggcagcgatggttgttcggagaacttcctctgtgttacttcgcccgcgttttcgatgtttttctggttgaggggtataaagtgttgtaccgcgtggccttggccattcttaagttttttcacaaagtgagggccggccagcctctggaaagcgattccgttaagcaagatattcgtacctttgtacgagatattgccaaaacggttagtccagaaaagctcctcgaaaaagccttcgccattaggctgttctctaggaaagaaatccagctactgcaaatggcaaacgagaaagctttgaaacagaagggcataaccgtgaagcagaaaaggcagttcgtgcatttggccgtgcatgccgaaaatttccgtagcgagattgtttctgtgcgagaaatgcgtgatatttggtcttgggtccctgagcgtttcgcgctctgtcaaccactcctcctgtttagtagcctacaacatggctatagtcttgcccggttttactttcagtgcgagggacatgaaccgacccttctcttgattaaaaccactcagaaggaggtctgcggcgcttacctgtctaccgattggagcgagcgcaacaagttcggcggcaagctgggctttttcggaacaggagaatgctttgtgttcaggcttcaacctgaggtacagagatacgagtgggtggtgatcaaacatcccgagctgaccaagcctccaccactgatggccgcggagccaactgctcctctgagtcactcagcttcgtctgacccagcagaccggctgtccccatttctggcagctcgccacttcaacttgcctagcaagactgagtccatgttcatggctgggggatcggactgtctgatagtaggcggcgggggcgggcaggctctctacatagacggggatcttaatcgcggccgcacctcacattgcgacaccttcaacaaccagcccctgtgttctgaaaatttcctgatcgccgccgtggaagcttggggttttcaagaccctgatacccagtag

SEQ ID NO: 205212 - DNA, 1662 bp, Artificial Sequence
  derived and/or modified sequence
atggattctcctggctacaactgtttcgtggacaaggacaagatggacgcagccattcaggacctcggccctaaagaattatcctgtacagagctgcaggagctgaaacagctggcaagacaaggatactgggcccagagccatgcccttcggggtaaggtctaccaaaggcttatccgcgatatcccttgtcgtacggtgacgcccgatgcgtctgtctacagtgacattgtcggcaagattgtgggaaaacattcatcctcgtgtctacctctccccgaatttgtcgataatacacaggtccccagctattgcctgaatgcaaggggagagggggcagtccggaagatcctcctgtgtctggctaatcagttcccggacatttcgttttgcccagcgctgccagcggttgtagccctgctgttgcactacagcattgacgaagcggagtgcttcgagaaggcatgtagaatcctagcctgtaatgatcccggaaggcggctcatcgaccaatctttcctggccttcgagtcctcctgtatgacctttggagatctggtgaacaaatattgtcaggctgcccataaacttatggtcgctgtttcggaggacgttctgcaggtatacgccgactggcaacgttggctttttggagaactgcccctttgttacttcgctcgggtgttcgatgtgttcttggtcgagggctacaaggtgctttatagggtagccctggccatccttaagtttttccataaggtacgcgctggacagcctctggaatcggactccgtaaagcaggacatcagaacttttgtgagggacatcgcaaaaaccgtgtccccagaaaagctgctggagaaagcattcgccattcgccttttctccagaaaagaaatacagctgcttcaaatggccaatgagaaggccctgaagcaaaaaggaatcacggtgaagcaaaaacggcaatttgtccatctcgcagtccacgccgaaaacttccggtctgaaatcgtctctgtgcgcgaaatgcgtgatatctggtcatgggtgccggaaagatttgctttgtgccagcccctgctgctgttttcttccctccagcatgggtactccttagcacggttttattttcagtgtgaggggcatgagcccaccttgctgctcattaaaaccacccagaaggaggtgtgtggcgcttacctgtcaacagactggagtgaacggaataaatttggcggtaagctgggcttttttggcactggggaatgctttgtgtttcgtctccagcccgaggtacagcgctacgaatgggtggttatcaaacaccctgagctgacaaaaccgccacccctgatggcagctgagcctactgccccactctcccattctgccagttccgatccggctgacagactgagtccattcttggctgcccgacattttaatttaccttccaagacggaaagcatgtttatggccggaggatcagactgcctgatcgtgggtgggggtgggggacaggctctgtatattgatggcgatttgaatcgtggccgtacatcacactgcgacacctttaacaatcagccgctgtgtagcgagaattttcttatagcagccgttgaagcctgggggttccaggatcccgacacacaatag

SEQ ID NO: 205213 - DNA, 1662 bp, Artificial Sequence
  derived and/or modified sequence
atggattctcccggttacaattgcttcgtggacaaggataagatggacgccgctatccaggacctaggaccgaaggagctgtcttgtaccgaactgcaggagctaaagcagctggctagacagggctactgggcacaatctcacgccttacgcggaaaagtctaccagcggctcattagagatattccttgtcgcacagtgactccggatgccagcgtgtactctgatatcgtcggtaaaatcgttggcaaacattcttcatcatgcctgcctttgccggagttcgtggataatacccaggtgccctcttactgtttaaacgcccgaggggaaggagcagtgcggaaaatccttctctgcctcgccaaccagtttcccgacatttcgttctgtcccgcactgcctgccgtggtggctctgctgcttcattactccattgacgaagccgaatgttttgagaaggcctgccgtatactggcctgtaatgaccccggacggaggctgatagaccagagcttcttggctttcgaatcctcctgtatgacctttggtgatctcgtgaacaagtactgccaggccgcacacaaactgatggtggcagtgtccgaagatgtgctccaggtctatgcagactggcagcgctggctgtttggagaattgccactgtgctacttcgcgcgagtgtttgatgtttttttagtggagggatataaggtgttgtatcgggtcgctctggccatcctgaagttcttccataaagtgagagctggccagcctttagagtcggacagtgtgaagcaggatattagaacctttgtgagggatatcgccaaaactgtctcaccggaaaagctgctagaaaaggctttcgccattcgccttttcagcagaaaggagatccagttgctccagatggcgaacgagaaagctcttaaacagaagggcatcaccgttaagcagaagcggcagtttgttcatcttgcggtgcacgccgaaaatttcagatcagagattgtgagcgtacgtgaaatgagagatatttggtcttgggtcccagaacgattcgcactgtgtcagcccttactgctgttttccagcttacaacacggatattccctggccagattctactttcagtgtgagggacatgagcctactttgctccttatcaagaccacacaaaaagaagtctgcggagcttatctgagtacagactggagcgagcgcaataaatttgggggtaagctggggttctttggaaccggtgagtgttttgtgtttcggcttcagcctgaggtacagagatacgagtgggttgtgatcaagcaccccgagcttaccaagccgcctcccctgatggccgctgagccgaccgcacctttgtctcacagtgcctctagcgacccagccgatcggctgtcgccttttttagcagccaggcatttcaaccttcctagcaaaactgagtcaatgtttatggcgggaggatccgattgcctcatcgtgggcggaggcggaggacaagccttatacatcgatggagatctgaaccgaggccgtacttcccattgcgacacattcaacaatcaaccgttgtgttctgagaatttcctgattgccgctgtggaagcttggggttttcaagatccagatacgcagtag

SEQ ID NO: 205214 - DNA, 6578 bp, Artificial Sequence
  derived and/or modified sequence
gctgaggagaaagcggcgcgcggagggtgtgagatggcagacaggtttgcaggaaaccctcagaaagggggctggaggatttagccactctgtcctccccttccggcagtccagggcctcctcccgagcacagcggcgctatggactctccaggatacaactgcttcgtggacaaagacaagatggacgctgccatccaggacctggggcccaaggagctgagctgcactgaactgcaggaactgaagcagctggcgcgccagggctactgggcccaaagccacgccctgcggggaaaggtgtaccagcgcctgatccgggacattccctgccgcacggtcacgcctgacgccagcgtgtacagcgacatcgtgggcaagatcgtgggcaagcacagcagcagctgcctgccgctgcccgagttcgtggacaacacgcaggtgcccagctactgcctgaatgcacgcggcgagggggccgtgcgcaagatcctcctgtgcctggccaaccagttccccgacatctccttctgccccgccctgccggccgtggtggccctgctgctgcactacagcatcgacgaggccgagtgcttcgagaaggcctgccgcatcctggcctgcaatgaccccggcaggaggctgatcgaccagagcttcctggcctttgagtcgtcctgcatgacgtttggggacctggtgaacaagtactgccaggcggcccacaagctgatggtggccgtgtcggaggatgtcctgcaggtctatgcggactggcagcgctggctgtttggggagctgcccctctgctacttcgcccgggtctttgacgtcttcctggtggagggctacaaggtgctgtaccgcgtggcgctggccatcctcaagttcttccacaaggtgagggccgggcagccgctggagtcggacagcgtgaagcaggacatccgcacgttcgtcagagacatcgcgaagacggtgtcccctgagaagctgctggagaaagcgttcgccatccgcctcttctcccgcaaggagatccagctcctgcagatggccaatgagaaagccctgaagcagaagggcatcaccgtgaagcagaagaggcagtttgtacacttggccgtccatgcagagaacttccgctcggagatcgtcagcgtgagggagatgagagacatctggtcctgggtccccgagcgctttgccctgtgccagccccttctgctgttctcctccctgcagcacgggtacagcctggccaggttctacttccagtgtgaaggacatgagcctaccctcttgctcatcaagaccacgcagaaggaggtgtgtggtgcttacctgtccacagactggagtgagagaaataagtttggaggcaaactgggcttctttgggaccggagaatgctttgtgtttaggctgcagcctgaggtgcagcgctacgagtgggtggtgatcaagcaccccgagctgaccaagcccccacccttgatggctgccgagcccaccgccccactcagccactccgcctcctcagaccccgctgaccgcctctcgcccttcctggccgctcgccacttcaacctgccctccaagaccgagtccatgttcatggcggggggcagcgactgcctcatcgtcgggggaggaggcggccaggcgctctacatcgatggggacctgaaccggggccgcacaagccactgcgacaccttcaacaaccagcccctctgctccgagaacttcctcattgctgccgtggaggcctggggcttccaggaccctgacacccagtgacggcctgtgccacggtgactgagccgtggtggggcggtgggccgaggctgggctgccgcctcgggcagcagagagcagatgaaacccccatgtggtaggcagggttgggggacggcaggaccccatggccaagcctggcgttgcctggacctgctgctgcctctacctggggtttgggctgggcttccccagtccacctgcatctgggtcagagctggagggcctgctgtgcccccagccccacccagagctggcataggaagtaccttcctcctccgtggaggcttccatagcccaaggccttgggagtgtctgggtcttgctgcccctgagcctctctaggcagcctgagcccctggggtgggagtacaacggcagtgggaacgtgcagctaagggtgggcctgtggtgccccctgctggtgccgcatagcatcgcgccctcctgagcagggccctgcagcctggctggctggcgactgaatcccagcgtagatcccgagaacagactggcacccttgggcctgccccctggcggaccccaccccctgtcctgggcgtttgccccagttccctccccaggcctcctgggccacctctcacattaacccttcttggctgcctctgaggctcccctgggctgcgtttgggagctgctgggtgggaggaggagggtgggatttgtgctgggctccacccccagggagggtgggagctggagggggatgtcacatgtccttgtgtttctgcagagcctgaagcttttgctgggcctccctgcgtgttcccatctgaagaggtagccccgggagaggccctcagggaccgacccagaccagcaagctccatttccaggggtctgcccagagaagcctggacccagggggcttctcagctcccctcccttccagcccaggcctccttgagctcctgtagcctctgcagctgcccatttcacctctttgtcattgcaatgacctggggcccagggtcacgcccaagcccctctttgtggcatgctcatctcagtgcagccccaactgcttctctgcaccaggccccgtgccctcccctggccctggccacacagcacctccttggccaccttgcatggatgcatgtcctccctctgtccctcttgtggtgctgtggctggccacgtgtcagggttttctgtgagcctctcaccttacagcctttgggcccctgggcccctgccctgcctgagccctgcgctggccagacgcaggtaggtgccaggggaggccttgcctctgggcactatagggggcagccccctgccttgtgacctccctccatgccccatgacctccttcaactcgtcttgagggtctggtcaccacggaggggagaagggagacacagaggcccaagtggctgttctgggaccatggaagcctgggtcacagaggcaggtaccagcagtcctgcccccacccccgtccctgctggcctccagccagtgccacttggagtcccctgcaccgtgccactttccatccccacaccattgcctgctcctcccatggggctttagcctcccctgaccatctgctcatgtagcctctgactgggcgcacagtggtgcaggaggaaggaccgggaaccctgtgtggctttgggcaagctgacaaacccgtctggaactcagtttccccagctgtgaaatggggccagtccccatgccctgctgtcctcctcacaggactgttgagaggctcgcagggggatggggtgaatccctctcacggggagaggtatgggagggaagtcgccactcatctcagcccaccgcagccctccaggcccccgcctgagcccctgaggccctcatctgtaccgccagctttggtgttcattaaacatggtcttgctgcatcaactccagggctccaagctgagtctgatctcttcagccagaggggcctccgggggcttcctgggcctacagccaagcaggtgtgggaggctgcccgctgtagtgctcacccacattctatgactggaatgctgcaagcctcttccagagggagccctccaggagcagggaagtcatatccgtggaccatttgtaggtttccctctgcaaacttcctgaactgggtggtgatttttctggcgagttaagtccagcaggttctgcgtggctgcccccagggggccccacccgggccttccagtgatctggaccaggaagacggattgctgctgggtcatgatttccacatcatgagcgaagttctttgttttttgtgtgcatgcaaaatattgtttctttaaatttaatatcttttcctaacttttctactaacctagaaggtatgtgtgattattatcttttttattcttatcactgtacttgttagtatctgatattaggtattcccaaatagaacataatttattttgttaatgttctctatttcttcttgattatttattagctttggatgttaaaaattagccaaaagtggctgctctgcctatgaagtagccattctttgtttaaaaaaaaaaaaagccaacatttgttgaaactgcataataaattatcatttgtttttagaaacattcaaagaattattttttgattttttttttttttgggacagagtcacccaggctggagtgcagtggcatgatcttggctcactgcaacctccgcctcctgggttcaagcgattctcctgcctcagcctcctgagtagctgggattacaggcatacgccaccacgcccagctaaattttttttgtatttttagtagaggcagggtttcactgtgttggtcaggctggtcttgaactcctgacctcgtgatccacccccccctcagcctcccaaagtgctgggattacaggcgtgagccaccgcgcctagcctattttttaatttttttgaatagaccactttgtgctgaataaatgtttaacatttatttttaaaacaacaattgcacctaatttaaaatagtttattaaatgaattcattaaagcagattatatgcctttggggcttcagaaaatcagtttaagcaaaagaacttatgagagtaagtcatttgtacttgaattttttcagagttttaatgaactaaagtattttaatttttctatttttgtaagccgcatacttcattttttgagtttttcagtggaatttgttttaaaacgttttgaagatttcagaggccttcatatttctcttatccactttctgaacccataaagcctttgcagtctccttgagtagtttatatttagtaatttagttgtgtacctttttattttgaagtaatttttgatttgcagaagagttgcagagacggtacagggtttccatgtaccctcaccttcccccaagtcaatatcaaaacaaagaaataagcattgttgcattgctgttaactaaaccacaggcctattgagattgtcccttttttttttttttttttttttgagacagagtctcgctctgtcgcccaggctggagtgcagtggcgcgatctcggctcaccgcaagccccgcctcccggattcacgccattctcctgcctcagcctcctgagtagctgggactacaggcacctgctaccacacccggctaatttttttatatttttagtagagatggggtttcaccgtgttagccaggatggtcttgatctcctgacctcgtgatctgccctcctcggcctcccaaagtgctgggattacaggcgtgagcaaccgcgcccagccgagattgccccgtttttttcccactgtccaggaatcgatttaatttttacagttgtttactttctcacatttttactaagtccagaatatcatcaaactcacaaaaccactggtcaaaaaaacccaaatggccactaattaggcaatacagcacctgcctcaaatttgggttcatatagatttttttcctccctttttgtggagaacatagtcttgctgtgttgcccaggctagtcttgaactcctggactcaagcaatcctcccgcctctgcctccctaaattctgggattacaggcgtgagctgctgtgcccagctcatccagattcttgctggttctctttctcagcctaaatgtcttgtttgcgtggagaaattatcaaatgaagcaggagtgccaaacaagcctcataggctcttcaccctacaacatctatgttaggtagaaaagtatgtggatttttaaaaatcatctggtataaagagtttttaagaactatcttcatcatcttagtatcagattgtgcttgagaagttaggtacaatgtaatgtgattcattgctaaaaacaaaatgcctcccacaattgcagactcactcattttaccaaactatggaatttgtcaacaccttttcttgggaccaaggaagcaaagtcagtggataccgtgtcctgtagacatgtcacttgtgataaggcacggacaacatgaactggcaaaaacattggcatttggtcaaatgcttatgagctaaggatagaagggaaaaaatagttgtgtgaatgattttacctcttagttcttacgaaggatggttatcgggctggaaaaatgtttattggactgatgctttggagcctctcaatgaatgtaataaaaaaaatgtgtagtgagcacaaatgtatggatttgcagcacaatccaactttgaaaatgtgaaaataagtgagttagtgatatgtttggttggtgttaatttgagtcctaaataaaatcgagaactggtaaaagaag

SEQ ID NO: 205215 - DNA, 4329 bp, Artificial Sequence
  derived and/or modified sequence
gctgaggagaaagcggcgcgcggagggtgtgagatggcagacaggtttgcaggaaaccctcagaaagggggctggaggatttagccactctgtcctccccttccggcagtccagggcctcctcccgagcacagcggcgctatggactctccaggatacaactgcttcgtggacaaagacaagatggacgctgccatccaggacctggggcccaaggagctgagctgcactgaactgcaggaactgaagcagctggcgcgccagggctactgggcccaaagccacgccctgcggggaaaggtgtaccagcgcctgatccgggacattccctgccgcacggtcacgcctgacgccagcgtgtacagcgacatcgtgggcaagatcgtgggcaagcacagcagcagctgcctgccgctgcccgagttcgtggacaacacgcaggtgcccagctactgcctgaatgcacgcggcgagggggccgtgcgcaagatcctcctgtgcctggccaaccagttccccgacatctccttctgccccgccctgccggccgtggtggccctgctgctgcactacagcatcgacgaggccgagtgcttcgagaaggcctgccgcatcctggcctgcaatgaccccggcaggaggctgatcgaccagagcttcctggcctttgagtcgtcctgcatgacgtttggggacctggtgaacaagtactgccaggcggcccacaagctgatggtggccgtgtcggaggatgtcctgcaggtctatgcggactggcagcgctggctgtttggggagctgcccctctgctacttcgcccgggtctttgacgtcttcctggtggagggctacaaggtgctgtaccgcgtggcgctggccatcctcaagttcttccacaaggtgagggccgggcagccgctggagtcggacagcgtgaagcaggacatccgcacgttcgtcagagacatcgcgaagacggtgtcccctgagaagctgctggagaaagcgttcgccatccgcctcttctcccgcaaggagatccagctcctgcagatggccaatgagaaagccctgaagcagaagggcatcaccgtgaagcagaagaggcagtttgtacacttggccgtccatgcagagaacttccgctcggagatcgtcagcgtgagggagatgagagacatctggtcctgggtccccgagcgctttgccctgtgccagccccttctgctgttctcctccctgcagcacgggtacagcctggccaggttctacttccagtgtgaaggacatgagcctaccctcttgctcatcaagaccacgcagaaggaggtgtgtggtgcttacctgtccacagactggagtgagagaaataagtttggaggcaaactgggcttctttgggaccggagaatgctttgtgtttaggctgcagcctgaggtgcagcgctacgagtgggtggtgatcaagcaccccgagctgaccaagcccccacccttgatggctgccgagcccaccgccccactcagccactccgcctcctcagaccccgctgaccgcctctcgcccttcctggccgctcgccacttcaacctgccctccaagaccgagtccatgttcatggcggggggcagcgactgcctcatcgtcgggggaggaggcggccaggcgctctacatcgatggggacctgaaccggggccgcacaagccactgcgacaccttcaacaaccagcccctctgctccgagaacttcctcattgctgccgtggaggcctggggcttccaggaccctgacacccagtgacggcctgtgccacggtgactgagccgtggtggggcggtgggccgaggctgggctgccgcctcgggcagcagagagcagatgaaacccccatgtggtaggcagggttgggggacggcaggaccccatggccaagcctggcgttgcctggacctgctgctgcctctacctggggtttgggctgggcttccccagtccacctgcatctgggtcagagctggagggcctgctgtgcccccagccccacccagagctggcataggaagtaccttcctcctccgtggaggcttccatagcccaaggccttgggagtgtctgggtcttgctgcccctgagcctctctaggcagcctgagcccctggggtgggagtacaacggcagtgggaacgtgcagctaagggtgggcctgtggtgccccctgctggtgccgcatagcatcgcgccctcctgagcagggccctgcagcctggctggctggcgactgaatcccagcgtagatcccgagaacagactggcacccttgggcctgccccctggcggaccccaccccctgtcctgggcgtttgccccagttccctccccaggcctcctgggccacctctcacattaacccttcttggctgcctctgaggctcccctgggctgcgtttgggagctgctgggtgggaggaggagggtgggatttgtgctgggctccacccccagggagggtgggagctggagggggatgtcacatgtccttgtgtttctgcagagcctgaagcttttgctgggcctccctgcgtgttcccatctgaagaggtagccccgggagaggccctcagggaccgacccagaccagcaagctccatttccaggggtctgcccagagaagcctggacccagggggcttctcagctcccctcccttccagcccaggcctccttgagctcctgtagcctctgcagctgcccatttcacctctttgtcattgcaatgacctggggcccagggtcacgcccaagcccctctttgtggcatgctcatctcagtgcagccccaactgcttctctgcaccaggccccgtgccctcccctggccctggccacacagcacctccttggccaccttgcatggatgcatgtcctccctctgtccctcttgtggtgctgtggctggccacgtgtcagggttttctgtgagcctctcaccttacagcctttgggcccctgggcccctgccctgcctgagccctgcgctggccagacgcaggtaggtgccaggggaggccttgcctctgggcactatagggggcagccccctgccttgtgacctccctccatgccccatgacctccttcaactcgtcttgagggtctggtcaccacggaggggagaagggagacacagaggcccaagtggctgttctgggaccatggaagcctgggtcacagaggcaggtaccagcagtcctgcccccacccccgtccctgctggcctccagccagtgccacttggagtcccctgcaccgtgccactttccatccccacaccattgcctgctcctcccatggggctttagcctcccctgaccatctgctcatgtagcctctgactgggcgcacagtggtgcaggaggaaggaccgggaaccctgtgtggctttgggcaagctgacaaacccgtctggaactcagtttccccagctgtgaaatggggccagtccccatgccctgctgtcctcctcacaggactgttgagaggctcgcagggggatggggtgaatccctctcacggggagaggtatgggagggaagtcgccactcatctcagcccaccgcagccctccaggcccccgcctgagcccctgaggccctcatctgtaccgccagctttggtgttcattaaacatggtcttgctgcatcaactccagggctccaagctgagtctgatctcttcagccagaggggcctccgggggcttcctgggcctacagccaagcaggtgtgggaggctgcccgctgtagtgctcacccacattctatgactggaatgctgcaagcctcttccagagggagccctccaggagcagggaagtcatatccgtggaccatttgtaggtttccctctgcaaacttcctgaactgggtggtgatttttctggcgagttaagtccagcaggttctgcgtggctgcccccagggggccccacccgggccttccagtgatctggaccaggaagacggattgctgctgggtcatgatttccacatcatgagcgaagttctttgttttttgtgtgcatgcaaaatattgtttctttaaatttaatatcttttcctaacttttctactaacctagaaggtatgtgtgattattatcttttttattcttatcactgtacttgttagtatctgatattaggtattcccaaatagaacataatttattttgttaatgttctctatttcttcttgattatttattagctttggatgttaaaaattagccaaaagtggctgctctgcctatgaagtagccattctttgttt

SEQ ID NO: 205216 - protein, 1147 aa, Artificial Sequence
  derived and/or modified sequence
MDAVNAFNQELFSLMDMKPPISRAKMILITKAAIKAIKLYKHVVQIVEKFIKKCKPEYKVPGLYVIDSIVRQSRHQFGTDKDVFGPRFSKNITATFQYLYLCPSEDKSKIVRVLNLWQKNGVFKIEIIQPLLDMAAGTSNAAPVAENVTNNEGSPPPPVKVSSEPPTQATPNSVPAVPQLPSSDAFAAVAQLFQTTQGQQLQQILQTFQQPPKPQSPALDNAVMAQVQAITAQLKTTPTQPSEQKAAFPPPEQKTAFDKKLLDRFDYDDEPEAVEESKKEDTTAVTTTAPAAAVPPAPTATVPAAAAPAAASPPPPQAPFGFPGDGMQQPAYTQHQNMDQFQPRMMGIQQDPMHHQVPLPPNGQMPGFGLLPTPPFPPMAQPVIPPTPPVQQPFQASFQAQNEPLTQKPHQQEMEVEQPCIQEVKRHMSDNRKSRSRSASRSPKRRRSRSGSRSRRSRHRRSRSRSRDRRRHSPRSRSQERRDREKERERRQKGLPQVKPETASVCSTTLWVGQLDKRTTQQDVASLLEEFGPIESINMIPPRGCAYIVMVHRQDAYRALQKLSRGNYKVNQKSIKIAWALNKGIKADYKQYWDVELGVTYIPWDKVKPEELESFCEGGMLDSDTLNPDWKGIPKKPENEVAQNGGAETSHTEPVSPIPKPLPVPVPPIPVPAPITVPPPQVPPHQPGPPVVGALQPPAFTPPLGIPPPGFGPGVPPPPPPPPFLRPGFNPMHLPPGFLPPGPPPPITPPVSIPPPHTPPISIPNSTIAGINEDTTKDLSIGNPIPTVVSGARGNAESGDSVKMYGSAVPPAAPTNLPTPPVTQPVSLLGTQGVAPGPVIGLQAPSTGLLGARPGLIPLQRPPGMPPPHLQRFPLMPPRPMPPHMMHRGPPPGPGGFAMPPPHGMKGPFPPHGPFVRPGGMPGLGGPGPGPGGPEDRDGRQQPPQQPQQQPQPQAPQQPQQQQQQQPPPSQQPPPTQQQPQQFRNDNRQQFNSGRDQERFGRRSFGNRVENDRERYGNRNDDRDNSNRDRREWGRRSPDRDRHRDLEERNRRSSGHRDRERDSRDRESRREKEEARGKEKPEVTDRAGGNKTVEPPISQVGNVDTASELEKGVSEAAVLKPSEELPAEATSSVEPEKDSGSAAEAPR

SEQ ID NO: 205217 - DNA, 1515 bp, Artificial Sequence
  derived and/or modified sequence
atgggcatcaagaccgccctgcccgccgccgagctgggcctgtacagcctggtgctgagcggcgccctggcctacgccggcagaggcctgctggaggccagccaggacggcgcccacagaaaggccttcagagagagcgtgagacccggctgggagtacatcggcagaaagatggacgtggccgacttcgagtgggtgatgtggttcaccagcttcagaaacgtgatcatcttcgccctgagcggccacgtgctgttcgccaagctgtgcaccatggtggcccccaagctgagaagctggatgtacgccgtgtacggcgccctggccgtgatgggcaccatgggcccctggtacctgctgctgctgctgggccactgcgtgggcctgtacgtggccagcctgctgggccagccctggctgtgcctgggcctgggcctggccagcctggccagcttcaagatggaccccctgatcagctggcagagcggcttcgtgaccggcaccttcgacctgcaggaggtgctgttccacggcggcagcagcttcaccgtgctgagatgcaccagcttcgccctggagagctgcgcccaccccgacagacactacagcctggccgacctgctgaagtacaacttctacctgcccttcttcttcttcggccccatcatgaccttcgacagattccacgcccaggtgagccaggtggagcccgtgagaagagagggcgagctgtggcacatcagagcccaggccggcctgagcgtggtggccatcatggccgtggacatcttcttccacttcttctacatcctgaccatccccagcgacctgaagttcgccaacagactgcccgacagcgccctggccggcctggcctacagcaacctggtgtacgactgggtgaaggccgccgtgctgttcggcgtggtgaacaccgtggcctgcctggaccacctggaccccccccagccccccaagtgcatcaccgccctgtacgtgttcgccgagacccacttcgacagaggcatcaacgactggctgtgcaagtacgtgtacaaccacatcggcggcgagcacagcgccgtgatccccgagctggccgccaccgtggccaccttcgccatcaccaccctgtggctgggcccctgcgacatcgtgtacctgtggagcttcctgaactgcttcggcctgaacttcgagctgtggatgcagaagctggccgagtggggccccctggccagaatcgaggccagcctgagcgtgcagatgagcagaagagtgagagccctgttcggcgccatgaacttctgggccatcatcatgtacaacctggtgagcctgaacagcctgaagttcaccgagctggtggccagaagactgctgctgaccggcttcccccagaccaccctgagcatcctgttcgtgacctactgcggcgtgcagctggtgaaggagagagagagaaccctggccctggaggaggagcagaagcaggacaaggagaagcccgagtag

SEQ ID NO: 205218 - DNA, 738 bp, Artificial Sequence
  derived and/or modified sequence
atggtggcccccaagctgagaagctggatgtacgccgtgtacggcgccctggccgtgatgggcaccatgggcccctggtacctgctgctgctgctgggccactgcgtgggcctgtacgtggccagcctgctgggccagccctggctgtgcctgggcctgggcctggccagcctggccagcttcaagatggaccccctgatcagctggcagagcggcttcgtgaccggcaccttcgacctgcaggaggtgctgttccacggcggcagcagcttcaccgtgctgagatgcaccagcttcgccctggagagctgcgcccaccccgacagacactacagcctggccgacctgctgaagtacaacttctacctgcccttcttcttcttcggccccatcatgaccttcgacagattccacgcccaggtgagccaggtggagcccgtgagaagagagggcgagctgtggcacatcagagcccaggccggcctgagcgtggtggccatcatggccgtggacatcttcttccacttcttctacatcctgagccccgccaccagcagcagccccaccgccagccagaccgtgcccagcgccggcctggcctacagcaacctggtgtacgactgggtgaagggcagacccctgtggtgctgccagcactggcacgccagcaccacctggacccaccccccccccaagtgcatcaccgccctgtacgtgttcgccgagacccacttctag

SEQ ID NO: 205219 - DNA, 696 bp, Artificial Sequence
  derived and/or modified sequence
atgggcatcaagaccgccctgcccgccgccgagctgggcctgtacagcctggtgctgagcggcgccctggcctacgccggcagaggcctgctggaggccagccaggacggcgcccacagaaaggccttcagagagagcgtgagacccggctgggagtacatcggcagaaagatggacgtggccgacttcgagtgggtgatgtggttcaccagcttcagaaacgtgatcatcttcgccctgagcggccacgtgctgttcgccaagctgtgcaccatggtggcccccaagctgagaagctggatgtacgccgtgtacggcgccctggccgtgatgggcaccatgggcccctggtacctgctgctgctgctgggccactgcgtgggcctgtacgtggccagcctgctgggccagccctggctgtgcctgggcctgggcctggccagcctggccagcttcaagatggaccccctgatcagctggcagagcggcttcgtgaccggcaccttcgacctgcaggaggtgctgttccacggcggcagcagcttcaccgtgctgagatgcaccagcttcgccctggagagctgcgcccaccccgacagacactacagcctggccgacctgctgaagtacaacttctacctgcccttcttcttcttcggccccatcatgaccttcgacagattccacgcccagtag

SEQ ID NO: 205220 - DNA, 1515 bp, Artificial Sequence
  derived and/or modified sequence
atgggcatcaaaactgccttgcccgcggcagagttgggactctatagtctggtgctgagtggcgctctggcttacgctggtagaggtctgctggaagcctcccaggatggagctcatcgcaaagcattcagagagtccgtgaggcccgggtgggaatatataggacgcaaaatggatgtagctgactttgaatgggttatgtggttcacctcttttagaaatgtcattatattcgccttatccggccacgtgctgttcgcaaaactgtgtacaatggtagcaccaaagctccgtagctggatgtacgccgtttatggcgctttggctgtaatgggtactatggggccttggtacctcctcctgctattgggacattgcgttggcctttacgtggcctcactgttaggccagccctggttatgcctgggcttgggactcgctagcctggccagtttcaagatggaccctctcatcagctggcagtccggttttgtgaccgggacttttgaccttcaggaggttctatttcacggaggatcatcatttaccgtgctccgctgcacatcattcgctctggaaagctgtgcccacccggacaggcactacagtctggcagatcttctgaagtacaatttttatctgcctttttttttctttgggccgattatgaccttcgacaggtttcacgcgcaagtgagccaggtagaaccagtgcggcgcgagggcgagctctggcatatcagggctcaagctggcctcagcgttgtggccattatggccgttgatatctttttccatttcttctatattttaactatccccagtgacctgaagtttgccaatagactaccagattctgcgctcgcgggactagcgtactccaatttggtgtatgactgggtgaaggcggccgtgctgtttggggttgtgaacaccgttgcttgcctggaccacctggaccctccgcagccacccaaatgcattactgcactctacgtattcgcagaaactcacttcgacagggggattaacgattggctgtgtaaatacgtttataaccacatcgggggagagcactctgctgttatcccagagctggcagctactgtcgctacatttgcaataactactctctggctgggcccctgtgacatcgtgtacctttggagtttccttaattgtttcggcctgaatttcgaattatggatgcagaaactcgcagagtggggtcccctggcaaggattgaggcctcgctcagcgtccaaatgtcccgtcgagtgcgcgcactttttggagccatgaatttttgggccatcattatgtacaatctggtgtcattgaattccctcaaatttaccgaactggtagcccgtcgactactgctgaccggcttccctcagacaacgctcagcattttattcgtaacttattgcggcgtacagttagtcaaagaacgagagcggactctggcccttgaggaggagcagaagcaggataaagaaaagcctgagtag

SEQ ID NO: 205221 - DNA, 738 bp, Artificial Sequence
  derived and/or modified sequence
atggttgcgccgaagctgaggtcatggatgtacgcggtttacggggcactggctgtcatggggaccatggggccttggtatctgctcctccttctcgggcattgtgtcggcttgtatgtggcctcacttctgggtcagccttggctttgcctgggcctgggactggcatcattagcgtccttcaagatggatcccctaattagttggcagtctggatttgtgactggaacgtttgatcttcaggaggtgctctttcacgggggtagttcatttacagtgctcaggtgcacgtcctttgcccttgagtcttgcgcccatccagacagacactactcgctagcagatctgctgaagtataatttttacctgcccttcttctttttcggacctataatgacattcgacagattccatgcccaggtgtctcaggtggaaccggtccgacgcgaaggtgagctatggcacatccgggctcaagcggggctgtcagtggtggccatcatggcagtggacattttttttcatttcttctatatcttatcacccgcaacatcctcctcacctactgcaagccagactgtgcccagtgcaggtttagcctattctaatctcgtgtatgactgggtgaaaggaagaccgctgtggtgttgtcaacactggcatgctagcactacctggactcaccctcctcccaaatgcatcacggcactgtacgtcttcgccgaaacccatttctag

SEQ ID NO: 205222 - DNA, 696 bp, Artificial Sequence
  derived and/or modified sequence
atgggcattaaaactgcgttacccgctgccgagttgggtctgtattctctggttctgagcggtgctctggcctatgccggccgcgggctcctcgaagcctcacaagatggagcccataggaaggcctttagggaaagcgttaggcccggctgggaatacatcggacgcaaaatggacgtggccgatttcgaatgggttatgtggtttacaagcttccgcaacgtgataatctttgctttaagtggccacgtattatttgccaaattatgcactatggtcgccccgaaactccgttcttggatgtatgccgtgtacggtgctctggccgtaatgggtactatgggaccatggtacctcttgctgctgttgggccactgcgtgggcctgtatgtagcatcactgctcggacagccttggctgtgtctgggactcggattggcatccctggcctcctttaaaatggatccacttatatcctggcagtctgggttcgtcactggcaccttcgacctacaggaagtgctgttccatggtggatcctcgtttaccgtgttgcgctgtaccagcttcgcactagagtcatgcgcccatccagataggcactatagccttgccgatctgcttaaatacaacttctacctgccatttttcttctttgggccaatcatgaccttcgatagattccatgcccagtag

SEQ ID NO: 205223 - DNA, 1515 bp, Artificial Sequence
  derived and/or modified sequence
atggggattaaaacagccctacccgctgcagagctggggttgtacagtttagtccttagtggagcccttgcctatgctgggcggggactactggaagccagtcaggacggcgcccaccggaaggcctttagggagtctgtccgtcccggctgggaatacatcggcaggaaaatggatgttgccgacttcgagtgggtgatgtggtttacctcatttcgcaatgtgataatttttgctttgagcggacatgtactgttcgccaagctttgcactatggtcgcccctaagctgcgaagctggatgtatgcagtgtatggggcacttgccgtgatggggaccatgggcccatggtacctattgctgctgctcggacattgcgtaggcctctacgtcgcatccctcttgggccagccttggctgtgcctgggacttgggttggcgtctctggctagcttcaagatggacccactgatttcttggcagtcaggcttcgtgacaggcacattcgatctgcaggaggttctgtttcacggtggatccagctttaccgttctcaggtgtacttcctttgccttagaaagttgtgcccaccccgaccgtcattattcactagccgatctcctcaagtataacttttaccttccattcttcttcttcgggccaattatgacctttgatcgtttccacgcgcaggtgtcccaggtagaaccggtgcggcgagagggggaactatggcacatcagagcccaggcaggactatccgtcgtcgccattatggccgtagacatcttttttcactttttttacatacttaccattcccagcgacttgaagttcgccaaccgcttgcctgattcagcgctggccggtctagcatacagcaaccttgtgtacgattgggttaaagcggccgtcctgttcggagtggtcaatactgtggcatgcctggatcacctggacccacctcagccccccaaatgtataacggcactctacgtgttcgctgaaacccactttgacaggggtattaacgattggttgtgtaagtacgtgtacaaccacattggaggggagcatagtgccgtgatcccagaactggctgccacggtagccacatttgctatcaccaccctctggttaggaccgtgtgatatagtgtacctgtggtcctttctgaactgttttggtcttaacttcgaactttggatgcagaagcttgccgagtggggccctcttgcgcggatagaggccagccttagtgtgcagatgtctcggcgtgtgcgggcattgtttggcgccatgaacttttgggccatcatcatgtacaacctggtctcactgaactcccttaaatttactgagctggtcgcccgcaggctgctgctaactgggttccctcaaaccacactgtccatcctgttcgtgacatattgtggagtgcagctcgtgaaagaacgcgaacgtacactcgctttagaggaggaacaaaagcaggacaaagaaaagcctgaatag

SEQ ID NO: 205224 - DNA, 1515 bp, Artificial Sequence
  derived and/or modified sequence
atgggcatcaagacagccctgcctgctgctgagctgggcctgtacagcctggtgctgagcggggccctggcctatgccggccggggcctgctggaggccagccaggatggagcccacaggaaggccttccgggagagcgtgcggcccggctgggagtacatcggcaggaagatggatgtggccgactttgagtgggtgatgtggttcaccagcttcagaaatgtcatcatctttgccctgagcggccacgtgctgtttgccaagctgtgcaccatggtggcccccaagctgcgctcctggatgtatgctgtgtatggagccctggccgtgatgggcaccatgggcccctggtacctgctgctgctgctgggccactgtgtgggcctgtatgtggccagcctgctgggccagccctggctgtgcctgggcctgggcctggccagcctggccagcttcaagatggaccccctcatctcctggcagagcggctttgtgacaggcacctttgacctgcaggaggtgctcttccatggaggcagcagcttcaccgtgctgcgctgcaccagctttgccctggagagctgtgcccacccagacagacactacagcctggccgacctgctgaagtacaacttctacctgcccttcttcttcttcggccccatcatgacctttgaccgcttccacgcccaggtgtcccaggtggagcctgtgagaagagaaggagagctgtggcacatccgggcccaggccggcctgtctgtggtggccatcatggctgtggacatcttcttccacttcttctacatcctgaccatccccagcgacctgaagtttgccaaccggctgcctgacagcgccctggccggcctggcctacagcaacctggtgtatgactgggtgaaggctgctgtgctgtttggagtggtgaacacagtggcctgcctggaccacctggaccccccccagccccccaagtgcatcacagccctgtatgtgtttgctgagacccactttgaccggggcatcaatgactggctgtgcaagtatgtgtacaaccacatcggcggggagcacagcgctgtgattcctgagctggccgccaccgtggccacctttgccatcaccaccctgtggctgggcccctgtgacatcgtgtacctgtggagcttcctgaactgcttcggcctgaactttgagctgtggatgcagaagctggccgagtggggccccctggccagaattgaggccagcctgtctgtgcagatgagcagaagagtgcgggccctgtttggagccatgaacttctgggccatcatcatgtacaacctggtgtccctgaacagcctgaagttcacagagctggtggcccggcggctgctgctgaccggcttcccccagaccaccctgagcatcctgtttgtgacctactgcggcgtgcagctggtgaaggagcgggagaggaccctggccctggaggaggagcagaagcaggacaaggagaagccagagtag

SEQ ID NO: 205225 - DNA, 738 bp, Artificial Sequence
  derived and/or modified sequence
atggtggcccccaagctgcgctcctggatgtatgctgtgtatggagccctggccgtgatgggcaccatgggcccctggtacctgctgctgctgctgggccactgtgtgggcctgtatgtggccagcctgctgggccagccctggctgtgcctgggcctgggcctggccagcctggccagcttcaagatggaccccctcatctcctggcagagcggctttgtgacaggcacctttgacctgcaggaggtgctcttccacggcggcagcagcttcaccgtgctgcgctgcaccagctttgccctggagagctgtgcccacccagacagacactacagcctggccgacctgctgaagtacaacttctacctgcccttcttcttcttcggccccatcatgacctttgaccgcttccacgcccaggtgtcccaggtggagcctgtgcggcgggagggggagctgtggcacatccgggcccaggccggcctgtctgtggtggccatcatggctgtggacatcttcttccacttcttctacatcctgagccctgccaccagcagcagccccacagccagccagacagtgcccagcgctggcctggcctacagcaacctggtgtatgactgggtgaagggccggcccctgtggtgctgccagcactggcacgccagcaccacctggacccaccccccacccaagtgcatcacagccctgtatgtgtttgctgagacccacttctag

SEQ ID NO: 205226 - DNA, 696 bp, Artificial Sequence
  derived and/or modified sequence
atgggcatcaagacagccctgcctgctgctgagctgggcctgtacagcctggtgctgagcggggccctggcctatgccggccggggcctgctggaggccagccaggatggagcccacaggaaggccttccgggagagcgtgcggcccggctgggagtacatcggcaggaagatggatgtggccgactttgagtgggtgatgtggttcaccagcttcagaaatgtcatcatctttgccctgagcggccacgtgctgtttgccaagctgtgcaccatggtggcccccaagctgcgctcctggatgtatgctgtgtatggagccctggccgtgatgggcaccatgggcccctggtacctgctgctgctgctgggccactgtgtgggcctgtatgtggccagcctgctgggccagccctggctgtgcctgggcctgggcctggccagcctggccagcttcaagatggaccccctcatctcctggcagagcggctttgtgacaggcacctttgacctgcaggaggtgctcttccatggaggcagcagcttcaccgtgctgcgctgcaccagctttgccctggagagctgtgcccacccagacagacactacagcctggccgacctgctgaagtacaacttctacctgcccttcttcttcttcggccccatcatgacctttgaccgcttccacgcccagtag

SEQ ID NO: 205227 - DNA, 1515 bp, Artificial Sequence
  derived and/or modified sequence
atgggcatcaagaccgccctgcccgccgccgagctgggcctgtacagcttagtgctttccggcgcattagcatacgcggggcggggactgctcgaagcatcacaggacggtgcacatcgcaaggccttcagggagtccgttaggcccggatgggaatatattggcaggaagatggatgtggctgactttgaatgggtcatgtggttcacttcttttcgcaacgtgatcatatttgctttgagtggacatgttctcttcgccaagctttgcaccatggtggccccaaaactccggtcttggatgtacgcggtctatggtgcattagccgtgatgggcacaatggggccttggtatctcctgctcctgctcgggcattgcgttggactctacgtggctagcctgctgggtcagccctggctatgtttaggtctcggcctggccagcttggccagcttcaaaatggatcctcttatttcttggcagagcggttttgttacgggaacattcgatctgcaggaagtcctcttccacggcggttcaagcttcactgtcctcagatgtacgtcttttgccttggaatcatgcgcccatcctgaccggcattacagtttagccgacctgctgaagtataacttttacctgcccttcttctttttcggacccatcatgactttcgaccggtttcacgcgcaggtgtcgcaggtagaacctgttagacgggaaggagagttgtggcacatccgggcccaggcaggcttgagcgtggtcgcaataatggccgtagacatttttttccactttttctacattctgaccatcccctctgacctcaaatttgctaaccggctccccgactccgccctggctggactggcctactcaaaccttgtgtacgattgggtcaaggccgcggtgctattcggtgtcgtgaatacagtggcctgccttgatcaccttgaccccccccaacctcctaaatgcatcaccgctctctatgttttcgccgagacccattttgatcggggcattaatgactggctgtgcaaatacgtctataaccatattggaggcgaacatagtgccgtgattcccgagttggctgctacagtggctacctttgctatcaccacattgtggttaggcccctgcgatatcgtgtatctctggagtttcctgaactgtttcggtcttaactttgagttatggatgcagaaacttgcagaatgggggccactggcccgcatcgaggcttctttgagtgtacaaatgtcgcgaagagtccgcgccttgtttggggctatgaacttttgggccatcatcatgtataaccttgtgagcctgaattcactgaaatttaccgaacttgtcgccagaaggctgttgctgacaggatttccccaaacaacattaagcattctcttcgtgacttactgcggggtccagttggtgaaggagcgtgaacggactctcgcactagaggaggagcagaagcaggataaggagaaaccggaatag

SEQ ID NO: 205228 - DNA, 738 bp, Artificial Sequence
  derived and/or modified sequence
atggtggcccccaagctgcggagctggatgtacgccgtgtacggcgccttagccgtaatgggaaccatgggcccgtggtacctcttgctactgctcggccattgcgtcggcctgtatgtcgcaagtctactgggccagccttggctgtgcctgggtcttggcctggcgtcactggcatcctttaagatggatcccctcatttcctggcagtccgggtttgtgaccggaacattcgatttacaggaggtcctcttccacggcggtagcagctttaccgtactcaggtgtacgtcatttgctctggaaagctgtgcccaccccgatagacattattctttggccgatctgttgaagtataatttctatctgcctttcttcttttttgggcctatcatgacatttgatagatttcacgcacaggtgtctcaggtagaacccgtcaggagggaaggagagctgtggcacatccgggctcaggctggcctgtctgtggttgcgattatggcggtcgatattttttttcatttcttctatatcctgagtcctgccactagcagttcaccaactgcgtcccagactgtgccatccgccgggctggcttacagcaatctagtgtacgactgggtaaaaggaaggcccttgtggtgctgtcagcactggcacgcctcaacgacgtggacccatcctccaccaaaatgcatcacagccctgtacgtctttgctgaaactcacttctag

SEQ ID NO: 205229 - DNA, 696 bp, Artificial Sequence
  derived and/or modified sequence
atgggcatcaagaccgccctgcccgccgccgagctgggcctgtacagccttgtgctcagcggtgctctggcttatgccggacggggccttctagaggcttcgcaagatggcgctcacagaaaggcttttagggagagcgtcaggcctggttgggagtacataggaaggaagatggatgttgccgatttcgagtgggtgatgtggttcaccagcttcaggaatgtaatcatctttgccctgagtggccacgtccttttcgcgaaactgtgcaccatggtggcaccaaaactgcggagttggatgtacgcagtgtacggagcccttgctgtgatgggcaccatggggccctggtacctgctgcttctgctcgggcattgtgtgggtctctacgtggcaagtcttctgggccaaccttggttgtgtctggggctgggcttggcttctctcgctagcttcaaaatggatcctcttatttcttggcagtccggctttgtcaccggaaccttcgaccttcaagaggtcctttttcacggaggatcgtctttcaccgtgttaaggtgcacctccttcgccctggagagctgcgctcatccagaccgacattatagtttggcagacctcctgaagtataacttttatctgccgttcttttttttcggaccaataatgacgttcgaccggttccacgcccagtag

SEQ ID NO: 205230 - DNA, 1515 bp, Artificial Sequence
  derived and/or modified sequence
atgggcatcaagaccgccctgcccgccgccgagctgggcctgtactctctggtcctgagtggtgccctggcctacgcagggcgggggctgctggaagcaagtcaggacggtgcccacagaaaagcatttcgggagtcagttcggccaggctgggagtatattggacgcaaaatggacgtggcagatttcgagtgggtaatgtggttcaccagctttagaaatgtgattatttttgctttatcgggccacgtgctgtttgctaagttatgcaccatggtagctccgaaactccggagctggatgtacgccgtatacggagcccttgctgttatgggtacaatgggaccatggtacctattgcttctgttggggcactgcgtcggtttatacgtcgcatctctgttagggcagccttggctttgcctggggctaggcctcgcctccctagcttcattcaagatggaccccctgattagctggcaaagcggtttcgtcacaggcaccttcgacctgcaagaagtcttgtttcacggagggagtagctttactgtgttgcgctgcacaagctttgcattggagagctgtgcccatcctgacaggcattactctctcgctgaccttttgaaatacaatttttatctgcctttcttcttctttgggcccatcatgactttcgaccggtttcacgcccaggtcagccaggtggagcccgttcgtcgggagggcgagctgtggcatattcgtgcccaggcgggcctgtccgtggtggcaatcatggcagttgacatcttctttcactttttctacatccttacaatccccagtgatctcaagttcgcgaacaggctgccagattcagccctcgctggactcgcttatagtaatcttgtttatgactgggtaaaggcagctgtgctgtttggagttgtcaacacagtcgcctgtctcgatcatttagatcccccacagcctcccaaatgtattacggccctgtatgtctttgccgaaacccatttcgatcgtggcatcaatgactggctgtgcaaatacgtgtacaatcacataggaggcgaacactccgctgtcattcctgagcttgcagctaccgtggccacttttgctatcactaccctttggctggggccatgcgacatcgtgtacctctggagcttcttaaactgtttcggactgaactttgagttatggatgcagaagctcgcagaatggggcccactggctaggatcgaggcatcgctgtccgtccagatgtcaaggcgcgttcgggcgctgtttggcgccatgaatttttgggccataattatgtacaacctagtctcgcttaactctttgaagttcaccgagttggtagcccgacggctcctcctgaccggcttccctcaaacaaccctgtctattctgttcgtcacgtactgcggcgttcagctcgttaaggagcgggagagaactctcgcattagaagaggagcaaaagcaggacaaagaaaaacctgagtag

SEQ ID NO: 205231 - DNA, 1515 bp, Artificial Sequence
  derived and/or modified sequence
atgggaataaagacggccttacctgccgcagagctggggctttatagcctcgtgctgtctggcgcacttgcctacgcaggacgcggtctactagaggcttcccaggacggagcccacaggaaagcctttagagagagcgtgcgccctgggtgggagtacatagggaggaagatggacgtagcggattttgagtgggtgatgtggtttactagcttccgtaacgtgatcatttttgctcttagcgggcacgtgctgttcgccaaattgtgcactatggtggctcccaagctgaggtcctggatgtacgccgtatatggagccctggctgtcatgggtaccatgggcccatggtatctacttctgctgcttgggcattgcgtggggctgtacgtagccagcctgttaggacagccctggctttgtctgggcttgggcttggctagtctagcctcatttaagatggacccgttaatttcatggcagtccggatttgtcaccggcacctttgacctgcaggaagtgctctttcatgggggatcctcattcactgtgcttcgctgtacctcatttgctctggagagctgtgcgcaccctgaccgtcactattcacttgcagacctcctcaagtataacttttacctccctttttttttcttcggacccataatgaccttcgatcggttccacgcccaagtctcacaggtggagccagttaggcgggagggggagctctggcacatacgtgcccaggcgggacttagtgtagtggctattatggcagttgatatcttctttcactttttttacattcttaccatccctagcgacttgaagttcgctaaccgtctgcccgacagcgcgcttgccggtctggcctactctaacctcgtctacgattgggtgaaagctgccgtgcttttcggcgtggtaaacacagtcgcttgtctggatcacctcgatccccctcagccccctaaatgcatcactgccctgtacgtgtttgccgagacacatttcgacaggggaatcaatgactggctgtgcaaatatgtgtacaaccacattggaggcgagcatagcgctgtcatccccgaacttgctgccactgtggccacttttgccattacaacactctggctgggcccttgtgacattgtgtatttatggagctttctgaattgcttcgggctaaatttcgaattgtggatgcagaagctggccgagtggggcccactggccaggatcgaggccagcctgtcagtgcagatgtcccggagagttcgagccctctttggcgctatgaacttctgggctattataatgtacaatctggtgtcgctgaatagcctgaagttcaccgagctcgtggcccgacgcttgttgctgactggctttcctcagactacactgagtatcctattcgttacatactgcggggtgcaactcgtaaaagagcgggagcgcacgctggccctggaagaggagcaaaagcaggataaggagaagcctgaatag

SEQ ID NO: 205232 - DNA, 738 bp, Artificial Sequence
  derived and/or modified sequence
atggttgccccaaagctgagaagttggatgtacgccgtctatggggctctggctgtgatgggaactatgggaccctggtatctcttgctgctgctcggtcattgtgttggcctttatgtggccagccttctgggacagccctggctctgtctggggttaggattggccagcctcgcttcgtttaagatggatcctttgatctcatggcaatcggggttcgtgaccggcaccttcgatctgcaagaggtcctgtttcatgggggatcctcctttactgtgctgaggtgcaccagttttgcgcttgagtcttgcgcacatcctgatagacattattcactggcagatctgcttaaatacaatttctatctccctttcttcttctttgggcctatcatgaccttcgacagattccatgcccaggtgtcacaggtggaacccgtgaggcgggagggcgagctctggcatattcgtgcccaggccggtctgtcagtagtagccatcatggccgtagacatcttctttcactttttctatattttaagccccgcaacgtccagctctccaactgccagccagacagtaccgtccgccggacttgcttatagcaatctagtatacgactgggtaaaagggagaccattgtggtgctgccagcactggcatgcatccactacctggacgcacccccctcctaaatgtatcactgctctttacgtgtttgccgagacacatttctag

SEQ ID NO: 205233 - DNA, 696 bp, Artificial Sequence
  derived and/or modified sequence
atgggaatcaagactgctctgcccgctgcagaactaggattgtacagcctcgtgctcagcggcgcattagcatatgccggtagagggctgctggaggcgagccaggatggcgctcaccggaaagcgttccgggagagtgtacgcccagggtgggagtacattggcaggaagatggatgtggctgatttcgaatgggtcatgtggttcacatcgtttagaaatgttatcatctttgccctgtctgggcatgtcctgtttgcaaaactgtgcaccatggtagccccaaaactgcggtcatggatgtacgccgtctatggagcattagcagtcatggggacgatggggccttggtacttgctgcttctccttggacactgtgttggcttgtatgttgcttccctgttggggcagccctggctttgcctggggcttggattggcttctctggcaagctttaaaatggacccattaatcagctggcaaagcggattcgttaccggcactttcgatctacaggaagtcctgttccacgggggttcatctttcactgtgctaaggtgtacttcatttgctctcgaatcttgcgcacatcccgaccgtcactatagtctcgccgatttgctcaagtacaatttttacctgccattctttttcttcggtcctatcatgaccttcgataggtttcacgcacagtag

SEQ ID NO: 205234 - DNA, 1515 bp, Artificial Sequence
  derived and/or modified sequence
atgggcatcaagaccgctcttccagcagctgaactcggtctgtacagcttggtcctgtcaggcgcactcgcatacgctgggaggggcctactggaggcctcccaggatggcgcacaccggaaggccttccgggagtctgttcgcccaggttgggagtatattggcagaaagatggatgtcgctgattttgaatgggtgatgtggtttacaagcttccggaacgttatcatctttgctttgtctggccatgtgctgttcgccaaactctgtacaatggtggccccaaaactgcggtcctggatgtacgcagtctatggcgcactggccgtgatgggcaccatgggcccatggtacctgcttctgctgttaggacactgcgtggggctttatgtggccagtctcctgggccagccctggctatgtcttggcctcggcctcgcctccctggcatctttcaaaatggatccactgatctcgtggcagtctgggtttgtgaccggcacttttgacctacaggaagttctgttccatggaggttcctcctttacagtgctgagatgtacatctttcgccctggagtcatgtgcacatcctgatcgacactattcgcttgctgacctcctcaaatataatttttatctccctttcttcttcttcgggcctattatgacgtttgatcgatttcatgctcaggtctcccaggtggagcctgtcaggcgcgagggcgaactgtggcacatccgcgcacaggccggactcagtgtggttgcaatcatggccgtcgatattttctttcattttttttatatcctaacgatcccgtctgacttaaagtttgcaaacagactccccgacagtgctctggcaggtcttgcgtatagcaacctggtgtatgattgggtgaaagccgcagtgttattcggggtcgtgaacaccgttgcttgtcttgaccacttagaccccccacagccgccaaagtgtatcaccgcactgtacgtttttgcagagacacatttcgatcgaggcattaacgattggttgtgcaagtatgtctacaatcacatcggaggagagcactcagcagtgatcccagaactggctgccaccgttgccacatttgctataaccaccctctggctcggcccttgcgacattgtgtacctgtggagctttctcaactgttttggtctcaactttgagctttggatgcaaaagctcgcggagtgggggcctctcgccagaatcgaagcctctctctccgtccagatgagcagacgcgtgcgtgcactgttcggagccatgaatttctgggcaatcatcatgtacaacttggtgagccttaattcgctaaagttcaccgaactcgtagccagacgactcctactgacggggttcccacagacaacgttgtctattcttttcgtaacttattgtggggtgcagctggttaaggagagagagcgcacattggccctagaagaagagcagaagcaagataaggagaagcctgagtag

SEQ ID NO: 205235 - protein, 1116 aa, Artificial Sequence
  derived and/or modified sequence
MLNNLTDCEDGDGGANPGDGNPKESSPFINSTDTEKGKEYDGKNMALFEEEMDTSPMVSSLLSGLANYTNLPQGSREHEEAENNEGGKKKPVQAPRMGTFMGVYLPCLQNIFGVILFLRLTWVVGIAGIMESFCMVFICCSCTMLTAISMSAIATNGVVPAGGSYYMISRSLGPEFGGAVGLCFYLGTTFAGAMYILGTIEILLAYLFPAMAIFKAEDASGEAAAMLNNMRVYGTCVLTCMATVVFVGVKYVNKFALVFLGCVILSILAIYAGVIKSAFDPPNFPICLLGNRTLSRHGFDVCAKLAWEGNETVTTRLWGLFCSSRFLNATCDEYFTRNNVTEIQGIPGAASGLIKENLWSSYLTKGVIVERSGMTSVGLADGTPIDMDHPYVFSDMTSYFTLLVGIYFPSVTGIMAGSNRSGDLRDAQKSIPTGTILAIATTSAVYISSVVLFGACIEGVVLRDKFGEAVNGNLVVGTLAWPSPWVIVIGSFFSTCGAGLQSLTGAPRLLQAISRDGIVPFLQVFGHGKANGEPTWALLLTACICEIGILIASLDEVAPILSMFFLMCYMFVNLACAVQTLLRTPNWRPRFRYYHWTLSFLGMSLCLALMFICSWYYALVAMLIAGLIYKYIEYRGAEKEWGDGIRGLSLSAARYALLRLEEGPPHTKNWRPQLLVLVRVDQDQNVVHPQLLSLTSQLKAGKGLTIVGSVLEGTFLENHPQAQRAEESIRRLMEAEKVKGFCQVVISSNLRDGVSHLIQSGGLGGLQHNTVLVGWPRNWRQKEDHQTWRNFIELVRETTAGHLALLVTKNVSMFPGNPERFSEGSIDVWWIVHDGGMLMLLPFLLRHHKVWRKCKMRIFTVAQMDDNSIQMKKDLTTFLYHLRITAEVEVVEMHESDISAYTYEKTLVMEQRSQILKQMHLTKNEREREIQSITDESRGSIRRKNPANTRLRLNVPEETAGDSEEKPEEEVQLIHDQSAPSCPSSSPSPGEEPEGEGETDPEKVHLTWTKDKSVAEKNKGPSPVSSEGIKDFFSMKPEWENLNQSNVRRMHTAVRLNEVIVKKSRDAKLVLLNMPGPPRNRNGDENYMEFLEVLTEHLDRVMLVRGGGREVITIYS

SEQ ID NO: 205236 - protein, 285 aa, Artificial Sequence
  derived and/or modified sequence
MLNNLTDCEDGDGGANPGDGNPKESSPFINSTDTEKGKEYDGKNMALFEEEMDTSPMVSSLLSGLANYTNLPQGSREHEEAENNEGGKKKPVQAPRMGTFMGVYLPCLQNIFGVILFLRLTWVVGIAGIMESFCMVFICCSCTMLTAISMSAIATNGVVPAGGSYYMISRSLGPEFGGAVGLCFYLGTTFAGAMYILGTIEILLAYLFPAMAIFKAEDASGEAAAMLNNMRVYGTCVLTCMATVVFVGVKYVNKFALVFLGCVILSILAIYAGVIKSAFDPPNFP

SEQ ID NO: 205237 - protein, 186 aa, Artificial Sequence
  derived and/or modified sequence
MLNNLTDCEDGDGGANPGDGNPKESSPFINSTDTEKGKEYDGKNMALFEEEMDTSPMVSSLLSGLANYTNLPQGSREHEEAENNEGGKKKPVQAPRMGTFMGVYLPCLQNIFGVILFLRLTWVVGIAGIMESFCMVFICCSCTMLTAISMSAIATNGVVPAGGSYYMISRSLAMARPMESRPGPCS

SEQ ID NO: 205238 - DNA, 3351 bp, Artificial Sequence
  derived and/or modified sequence
atgctgaataatctgaccgactgcgaagacggagatgggggtgcaaatccaggagatgggaaccccaaggaatctagtcctttcatcaactctaccgatactgaaaaggggaaagaatacgatggcaaaaatatggcactattcgaggaagagatggacacatcccctatggtgagctccctgcttagcggactcgccaactacaccaatttgccccagggaagccgggagcacgaagaggctgaaaataatgagggcggcaaaaagaagccagttcaggcccctagaatgggcacctttatgggggtgtatctgccttgtcttcagaatatcttcggcgtaatcctgtttctcagactgacttgggttgtagggatcgctggaatcatggaatccttttgtatggtgttcatttgctgtagctgcacaatgctgactgccatctctatgtccgcgatagccacgaatggcgtcgtgccggctgggggctcctattatatgatctctaggtcactcggtcctgagtttggcggagcggttgggctgtgcttctacttgggcaccactttcgccggagccatgtatatccttggcaccatcgagattctgctggcttatcttttcccagctatggccattttcaaagcagaggatgctagcggagaagcggccgccatgcttaataatatgcgcgtgtacggcacttgcgttcttacgtgcatggctaccgtcgtattcgtgggcgtgaaatacgtgaacaagttcgccttagtgttcctggggtgcgtcatcctttcgatccttgctatctatgctggagtcattaaaagcgccttcgacccacccaacttcccgatttgcctccttgggaatcggaccctgtctcgccacggcttcgatgtctgcgctaagctggcctgggaagggaacgaaaccgtgacaactcgcctgtgggggcttttctgctcctcaagatttttgaacgcgacttgtgacgagtattttactcgcaataacgtgacagagatccaggggatccccggtgccgcctcaggactgattaaagagaacctgtggtcatcttacttgaccaaaggagtgattgtcgagagaagcggtatgacatcagtgggactggccgatggcacccccattgacatggaccacccatatgtgtttagcgacatgaccagctactttaccctcctcgtcggcatatactttccttctgtgaccgggattatggctggcagtaacagatctggagacttacgggacgcccagaagtctatcccaaccggaacaatcttggcgatcgcgaccaccagcgctgtctatatttcttctgtcgttctgttcggtgcctgtattgagggcgtggtgctcagagacaaattcggagaggctgtgaacgggaaccttgtggttggaacattggcgtggccatccccctgggtgatcgtaatagggagcttcttctctacatgcggtgcgggtctacagagccttacaggggccccgcgactgctccaagctatcagtagggacgggattgttcccttcctgcaggtgtttgggcacggcaaggccaatggtgagcccacatgggccctgctcctgacagcctgtatctgcgagataggaatattgattgcctcgctggatgaagtcgcaccaatactgagtatgttcttcctaatgtgctacatgtttgtgaacctggcctgtgccgtgcaaactttgttacggacaccgaattggcgtccccggtttcggtattatcactggaccttgtctttcttgggtatgagcctctgtttagcactcatgtttatttgctcctggtactatgctctggtggctatgctgattgctggcctgatatacaaatatatcgagtacagaggagctgaaaaggagtggggtgatgggatccgaggcctgagcctgtctgccgctagatacgccctgctacggcttgaggagggacctcctcatacaaagaattggcgcccgcaactccttgtattggtgagagtggatcaggatcagaacgtagttcatccacagttgctgagtctaaccagccagttaaaggccggcaagggactcacaattgtaggaagtgtcttggaaggcacttttctcgaaaaccacccacaagcccagcgggccgaagagagcattagaagacttatggaagcagagaaggtgaaggggttctgtcaagtggtgatctccagcaacttgagggacggcgtgtctcaccttatacagtccggggggttggggggcttacaacataacaccgtgctcgtgggatggccaagaaactggaggcaaaaggaggatcatcagacttggaggaatttcatcgaactcgtcagggaaacaaccgcgggtcatctcgcgctgctggtcaccaagaatgtgagtatgttccctggaaacccggaacggtttagcgaaggttcaattgacgtgtggtggattgtccatgacggggggatgctcatgctgttgccattcttattgcgccatcataaagtatggcgtaaatgtaaaatgaggatatttaccgtcgcccaaatggacgataattccatccagatgaagaaagatctgacgacattcctctatcatcttcgcattacggcggaggtggaagtcgtcgagatgcacgagtcagatattagcgcttacacatacgagaaaacactggtcatggagcagaggagccagattctgaaacagatgcacttgactaaaaatgaacgcgagcgtgaaatccagtcaattactgacgagtcccgagggtccatcaggcgcaaaaatccagccaacaccaggttaaggctaaatgtccccgaggagactgctggggactccgaagagaaaccagaggaggaagttcaactcatccatgatcagtctgccccttcctgcccatctagcagccccagccccggggaggaaccggaaggagaaggagagacagaccctgaaaaagttcatttaacttggacgaaggacaaatcagttgcggagaaaaacaaagggccatctcccgtatcttccgaaggaatcaaagatttcttctccatgaagccagaatgggagaacctcaaccaatctaatgtgagacggatgcacacagctgttcgcctgaacgaggtcattgtgaagaaaagccgagatgcaaagttggttctgctgaacatgccaggacctcctcgaaataggaatggcgacgaaaactatatggaattcttagaggtcctgaccgagcatctggatagggtgatgctagttaggggaggggggcgcgaggttattaccatatatagctag

SEQ ID NO: 205239 - DNA, 858 bp, Artificial Sequence
  derived and/or modified sequence
atgctcaataacctgactgactgcgaggatggcgatggaggggccaaccccggcgacgggaaccccaaggagagctcgcccttcatcaatagcactgatacagaaaagggaaaggaatacgatgggaaaaatatggccctgttcgaggaagagatggacactagccccatggtcagcagcttactctcagggttggccaactacactaacctcccgcaaggatctagggagcatgaagaagcagaaaacaacgaagggggcaaaaaaaagccagtgcaggctcctcgcatgggaacattcatgggggtctatctcccctgcctgcagaacatcttcggcgtgatcctttttctcaggcttacttgggtggtcggcatcgccgggattatggaatccttctgtatggtttttatctgctgcagctgcaccatgctcactgcgatttcaatgtccgcgattgcgaccaatggagtggtcccggcaggagggtcctactatatgatatcgcgatcacttggcccagagttcggcggcgcggtgggcctgtgtttttacttggggacgaccttcgcaggtgctatgtacatactggggacaatcgagattcttttggcgtaccttttcccagctatggcgatctttaaagccgaagatgccagcggtgaggcagccgccatgcttaacaacatgagagtgtacggaacatgtgttttgacatgcatggccactgttgtgttcgtcggggtgaaatacgtcaacaaatttgccctggtatttttaggatgtgtgatccttagcattctggcgatttacgccggcgtaataaagagcgcatttgatcctcccaattttccctag

SEQ ID NO: 205240 - DNA, 561 bp, Artificial Sequence
  derived and/or modified sequence
atgctcaacaatctgaccgattgcgaggatggagacgggggcgctaatccaggtgacggtaacccaaaggagagttctccctttataaactccactgacaccgaaaagggaaaagaatacgatggaaagaacatggcattgttcgaggaagagatggatacatcacccatggtgtcctccctgctgtcggggctcgcaaactacaccaacctgccacaggggtcgcgtgaacacgaggaagcggaaaacaatgagggcggaaagaagaaacccgtccaggctccccggatgggaacattcatgggggtctaccttccgtgccttcagaatatcttcggcgttatcctgttcctgaggctaacctgggtggtgggaattgcaggaataatggaaagcttctgcatggtattcatttgttgcagctgtaccatgctgactgcaatctcaatgtccgctatcgccactaacggggtagtgcccgccggcggaagctactacatgatttcgcgtagtctggccatggcaagacctatggagagtaggccaggtccctgttcctag

SEQ ID NO: 205241 - DNA, 3351 bp, Artificial Sequence
  derived and/or modified sequence
atgctgaacaacctgacagactgtgaagatggagatggaggagccaaccctggagatggcaaccccaaggagagcagccccttcatcaacagcacagacacagagaagggcaaggagtatgatggcaagaacatggccctgtttgaggaggagatggacaccagccccatggtgagcagcctgctgagcggcctggccaactacaccaacctgccccagggcagccgggagcacgaggaggccgagaacaatgaaggaggcaagaagaagcctgtgcaggcccccaggatgggcaccttcatgggcgtgtacctgccctgcctgcagaacatctttggagtcatcctcttcctgcggctgacctgggtggtgggcattgctggcatcatggagagcttctgcatggtgttcatctgctgcagctgcaccatgctgacagccatctccatgtctgccatcgccaccaacggggtggtgcctgctgggggcagctactacatgatcagccgcagcctgggccctgagtttggaggagctgtgggcctgtgcttctacctgggcaccacctttgctggggccatgtacatcctgggcaccatcgagatcctgctggcctacctgtttcctgccatggccatcttcaaggcagaagatgccagcggggaggccgccgccatgctgaacaacatgagggtgtatggcacctgtgtgctgacctgcatggccaccgtggtgtttgtgggcgtgaagtatgtgaacaagtttgccctggtgttcctgggctgcgtcatcctgagcatcctggccatctatgctggggtcatcaagagcgcctttgatcctcccaacttccccatctgcctgctgggcaacagaaccctgagcagacatggctttgatgtgtgtgccaagctggcctgggagggcaatgagaccgtgaccacccggctgtggggcctcttctgcagcagccgcttcctgaatgccacctgtgatgagtacttcaccagaaataatgtgacagagatccagggcatccctggagctgccagcggcctcatcaaggagaacctgtggagcagctacctgaccaagggcgtcatcgtggagaggagcggcatgacctctgtgggcctggctgatggcacccccatcgacatggaccacccctacgtgttcagtgacatgaccagctacttcaccctgctggtgggcatctacttccccagcgtgacaggcatcatggccggcagcaacagaagtggggacctgagagatgcccagaagagcatccccaccggcaccatcctggccatcgccaccaccagcgctgtgtacatcagctctgtggtgctgtttggagcctgcattgaaggagtggtgctgcgggacaagtttggagaggccgtgaatggaaacctggtggtgggcaccctggcctggcccagcccctgggtgattgtgattggcagcttcttcagcacctgtggggccggcctgcagagcctgaccggggccccccggctgctgcaggccatcagcagagatggcatcgtgcccttcctgcaggtgtttggacatggcaaggccaatggagagcccacctgggccctgctgctgacagcctgcatctgtgaaattggcatcctgattgccagcctggatgaggtggcccccatcctgtccatgttcttcctgatgtgctacatgtttgtgaacctggcctgtgctgtgcagaccctgctgcggacccccaactggaggccccgcttccgctactaccactggaccctgtccttcctgggcatgagcctgtgcctggccctgatgttcatctgctcctggtactatgccctggtggccatgctgattgctggcctcatctacaagtacatcgagtacagaggagctgagaaggagtggggagatggcatccggggcctgagcctgtctgctgcccgctatgccctgctgcggctggaggagggccccccccacaccaagaactggaggccccagctgctggtgctggtgcgggtggaccaggaccagaatgtggtgcacccccagctgctgagcctgaccagccagctgaaggccggcaagggcctgaccatcgtgggctctgtgctggagggcaccttcctggagaaccacccccaggcccagagagctgaggagagcatccggcggctgatggaggccgagaaggtgaagggcttctgccaggtggtgatcagcagcaacctgagagatggagtgagccacctgatccagagcggcggcctgggcggcctgcagcacaacacagtgctggtgggctggcccaggaactggaggcagaaggaggaccaccagacctggaggaacttcatcgagctggtgcgggagaccacagctggccacctggccctgctggtgaccaagaatgtgtccatgtttcctggcaaccctgagcgcttcagcgagggcagcattgatgtgtggtggatcgtgcatgatggcggcatgctgatgctgctgcccttcctgctgcggcaccacaaggtgtggaggaagtgcaagatgaggatcttcaccgtggcccagatggatgacaacagcatccagatgaagaaggacctgaccaccttcctgtaccacctgcgcatcacagctgaggtggaggtggtggagatgcatgaaagtgacatcagcgcctacacctatgagaagaccctggtgatggagcagaggagccagatcctgaagcagatgcacctgaccaagaatgaaagagagcgggagatccagagcatcacagatgagagccggggcagcatccggaggaagaacccagccaacacccggctgcggctgaatgtgcctgaggagacagctggggacagcgaggagaagccagaggaggaggtgcagctgattcatgaccagagcgcccccagctgccccagcagcagccccagccctggagaggagcctgagggggagggggagacagatcctgagaaggtgcacctgacctggaccaaggacaagtctgtggccgagaagaacaagggccccagccctgtgagcagcgagggcatcaaggacttcttctccatgaagccagagtgggagaacctgaaccagagcaatgtgcggaggatgcacacagctgtgcggctgaatgaagtcatcgtgaagaagagcagagatgccaagctggtgctgctgaacatgcctggccccccaagaaacagaaatggagatgagaactacatggagttcctggaggtgctgacagagcacctggacagagtgatgctggtgcggggcggcggccgggaggtgatcaccatctacagctag

SEQ ID NO: 205242 - DNA, 858 bp, Artificial Sequence
  derived and/or modified sequence
atgctgaacaacctgacagactgtgaagatggagatggaggagccaaccctggagatggcaaccccaaggagagcagccccttcatcaacagcacagacacagagaagggcaaggagtatgatggcaagaacatggccctgtttgaggaggagatggacaccagccccatggtgagcagcctgctgagcggcctggccaactacaccaacctgccccagggcagccgggagcacgaggaggccgagaacaatgaaggaggcaagaagaagcctgtgcaggcccccaggatgggcaccttcatgggcgtgtacctgccctgcctgcagaacatctttggagtcatcctcttcctgcggctgacctgggtggtgggcattgctggcatcatggagagcttctgcatggtgttcatctgctgcagctgcaccatgctgacagccatctccatgtctgccatcgccaccaacggggtggtgcctgctgggggcagctactacatgatcagccgcagcctgggccctgagtttggaggagctgtgggcctgtgcttctacctgggcaccacctttgctggggccatgtacatcctgggcaccatcgagatcctgctggcctacctgtttcctgccatggccatcttcaaggcagaagatgccagcggggaggccgccgccatgctgaacaacatgagggtgtatggcacctgtgtgctgacctgcatggccaccgtggtgtttgtgggcgtgaagtatgtgaacaagtttgccctggtgttcctgggctgcgtcatcctgagcatcctggccatctatgctggggtcatcaagagcgcctttgatcctcccaacttcccctag

SEQ ID NO: 205243 - DNA, 561 bp, Artificial Sequence
  derived and/or modified sequence
atgctgaacaacctgacagactgtgaagatggagatggaggagccaaccctggagatggcaaccccaaggagagcagccccttcatcaacagcacagacacagagaagggcaaggagtatgatggcaagaacatggccctgtttgaggaggagatggacaccagccccatggtgagcagcctgctgagcggcctggccaactacaccaacctgccccagggcagccgggagcacgaggaggccgagaacaatgaaggaggcaagaagaagcctgtgcaggcccccaggatgggcaccttcatgggcgtgtacctgccctgcctgcagaacatctttggagtcatcctcttcctgcggctgacctgggtggtgggcattgctggcatcatggagagcttctgcatggtgttcatctgctgcagctgcaccatgctgacagccatctccatgtctgccatcgccaccaacggggtggtgcctgctgggggcagctactacatgatcagccgcagcctggccatggcccggcccatggagagccggcccggcccctgcagctag

SEQ ID NO: 205244 - DNA, 3351 bp, Artificial Sequence
  derived and/or modified sequence
atgctgaacaacctgaccgactgcgaggacggcgacggcggcgccaacccaggggacggtaatccaaaagagtcctccccctttatcaacagcaccgacactgaaaagggcaaggaatacgatggcaaaaatatggctcttttcgaggaggagatggataccagtcctatggtatcctcactgctgtcaggactggcaaactacaccaaccttcctcaaggctcacgagaacacgaggaggccgagaataatgaggggggtaaaaaaaaacctgtgcaggcgcccaggatgggcacttttatgggagtctacctcccgtgtctgcagaacatcttcggcgtgatcctcttcttacggctgacttgggtcgtgggaatcgcgggtattatggaaagcttttgcatggtgttcatttgttgctcttgcaccatgctcactgctatttcaatgagcgcgattgccactaatggcgtggtgccagcaggcggcagctattacatgataagtagaagcctcggccccgagttcggaggtgccgtcggtctctgtttctatttgggcactaccttcgcgggtgctatgtatatcctgggtactatagagattctgctcgcctaccttttcccagctatggcgatttttaaggctgaagacgcgtcgggcgaagccgcagccatgctgaacaacatgcgtgtctatggaacttgtgtgttgacatgcatggccactgtcgtgttcgtgggagtcaaatacgttaacaagtttgccctcgtgttcctgggctgcgtgattctgtcaattctcgccatatatgctggggtcatcaagagcgcctttgaccctccgaacttcccgatttgcttgctggggaatcggactctgtcacgtcacggatttgatgtgtgtgccaagctcgcctgggaagggaacgagaccgttacaacaaggctctggggactgttttgcagcagccgtttcttaaatgctacctgtgacgagtatttcaccagaaataatgtgaccgagattcaaggaataccaggcgctgcctccggcctcattaaggagaatctgtggagctcataccttaccaaaggggtcattgtagagcggagcggtatgacttctgtagggctagcagatggcacccccatcgatatggaccacccatacgtgttcagtgatatgacatcatacttcacactgctggtgggcatttattttccatctgtgacaggtattatggctggctccaatcgctcaggtgacctccgggatgcccagaaatccatccccactggcacgatacttgctattgcaaccactagtgcagtttacatttcctctgtggtccttttcggcgcctgtatcgaaggagtcgtcctgagagacaagtttggcgaggccgtgaatggcaatctggtggtgggcaccctggcctggcctagcccgtgggtcatcgttattgggtctttcttcagcacctgtggggctggcctgcagtctctgacaggcgccccacgacttctgcaggccataagccgtgacggcattgtcccttttttgcaggtgtttggacacggcaaggcaaatggtgagcctacgtgggccttgctgctgactgcctgcatctgtgagatagggattctcattgcaagtctcgacgaggtcgcacctatccttagcatgttttttttgatgtgctatatgttcgtgaatttagcctgcgccgtccagactctcttaaggacccccaactggcggcccaggtttcggtactatcactggaccctttcatttctcggcatgtcactgtgtcttgccttgatgtttatttgcagctggtactatgcccttgtggcaatgctcatagcaggcttgatctataaatatattgagtatcgcggagcagagaaagaatggggggatggaatccgcggcctgtccctctccgccgcccggtacgccctgctgcgccttgaggaagggccacctcacacaaaaaactggcgccctcaactgttagtgctcgtacgtgtcgaccaagatcagaatgtggtccatccccagcttctgagtttgacctcgcaattgaaagcagggaagggattaacgattgtggggagtgtactcgaaggtactttcctggagaaccatccccaggcccagcgcgcagaggaaagtatccgtaggctaatggaagctgaaaaggtgaaaggattctgtcaggtggtgatcagtagcaatttacgggacggggtatctcatctcattcagtccggaggacttgggggcctgcagcataacacagtgttggtcggttggccaagaaattggagacagaaagaagatcatcagacatggaggaatttcatcgagctcgtgagggagaccacagcggggcatctggccctcctcgtaactaagaacgtcagtatgttcccaggaaaccctgaacgcttctctgagggatcgattgatgtgtggtggatcgttcatgacgggggtatgctcatgctgttgccatttctcctgcgccaccacaaagtgtggagaaagtgcaagatgaggatattcaccgtggcccagatggatgacaatagtatccaaatgaaaaaggacttgactacgtttctctaccatttacgtatcactgccgaggtcgaggtggttgagatgcacgagtcagacattagtgcttacacctacgaaaaaacacttgtgatggaacaacgtagccagatcctgaagcagatgcacctcactaaaaacgaaagagagcgggagattcagtcgattactgacgaaagcaggggaagtatcagacgcaaaaaccctgctaacacccgcctgcgtctgaatgtacccgaagagactgccggagattccgaggagaagcctgaggaagaggtccaattgatccacgaccaatccgcgcctagctgccctagttcctccccctctcctggggaagaaccagagggcgagggggagacggatcctgagaaagttcaccttacttggacaaaggacaagtctgtagcagagaagaacaaaggccccagtcctgtgagctctgagggaataaaagattttttcagtatgaaacccgaatgggaaaatttaaaccaatcaaatgtgagaaggatgcatactgctgtacggctgaacgaggtgatcgtcaagaagtcccgtgatgccaagttggtgctgcttaatatgcctgggcccccacgtaacagaaacggagatgaaaactatatggagttcctggaagttctcaccgagcacctcgatcgggtgatgctggtacgcggcggagggagagaagttattaccatctactcatag

SEQ ID NO: 205245 - DNA, 858 bp, Artificial Sequence
  derived and/or modified sequence
atgctgaacaacctgaccgactgcgaggacggcgacggcggcgccaaccctggcgatggaaatcccaaagaaagttcaccatttatcaattcgacggatactgagaaaggaaaagagtacgacggcaaaaacatggccctgtttgaggaagagatggatacatctcctatggtttccagcttgctgtcaggcttggccaactacactaacctcccccagggcagccgggagcatgaagaagccgagaacaatgagggaggcaaaaaaaagcccgtccaagcacccagaatgggcaccttcatgggggtttacttgccctgcctgcagaatatttttggggtgatcctgtttctgaggttaacatgggtggtcggcatcgctgggatcatggagagcttctgcatggtttttatctgttgctcgtgcactatgttgactgccatctcaatgtccgcaatcgccaccaacggtgtagttccagctggtgggtcgtactacatgatttcccggagcttaggccctgagttcggaggcgcagtcgggttgtgcttttatctaggtacaacctttgccggggccatgtacatccttggcaccatagaaattctcctcgcatacttatttccagccatggcgatattcaaagcagaggacgcaagtggcgaggccgcagcaatgctgaataatatgagagtgtacggcacttgcgttctgacctgcatggcaactgtggtgttcgtcggcgtcaagtacgtgaacaagtttgctctcgtattcttgggatgtgtaattctgagtatcctggccatctatgccggtgtgatcaagtcagccttcgaccctcctaatttcccctag

SEQ ID NO: 205246 - DNA, 561 bp, Artificial Sequence
  derived and/or modified sequence
atgctgaacaacctgaccgactgcgaggacggcgacggcggcgccaacccaggggatggcaacccaaaagagagctccccctttatcaacagcacggacactgagaagggtaaagaatacgacggcaaaaatatggcactctttgaggaagagatggatacaagccctatggtgtcaagtcttttgagcggactagcgaactatacaaatttacctcaggggagcagggagcacgaggaggccgagaataatgagggcggaaagaagaagccggtccaagcccctagaatggggacctttatgggagtctatcttccttgccttcagaatattttcggcgtaattttgttcctgagattaacttgggtggtaggtatcgcaggtatcatggagtcgttctgcatggtgtttatttgctgcagctgcacgatgcttaccgcaataagtatgtccgccattgccacaaacggggtggtccccgctggaggaagctattacatgatcagtagaagccttgctatggctaggcctatggagtcaagaccaggaccctgctcttag

SEQ ID NO: 205247 - DNA, 3351 bp, Artificial Sequence
  derived and/or modified sequence
atgctgaacaacctgaccgattgtgaggatggagacgggggagctaatcctggtgatgggaacccgaaggaaagcagcccctttatcaattctactgataccgagaagggcaaggagtacgacgggaaaaacatggctctgttcgaggaggagatggacactagccctatggtctcgagtctgctttccggccttgcaaattacacaaacttaccccagggcagtagagaacatgaggaggcagagaacaacgaaggaggaaaaaaaaaacctgtgcaggctccgcgtatgggaaccttcatgggcgtttatcttccttgccttcaaaacatctttggagtgatcttgttcctgaggcttacatgggtggttggtatcgccggtatcatggagtctttctgtatggtctttatttgttgcagctgtacaatgcttacagctatttctatgagcgccattgctaccaacggggtggtgccggctgggggatcttattacatgatctcaaggagcctgggacccgagtttgggggagcagtgggcctgtgcttttatctcggaactaccttcgcaggcgctatgtatatcctggggactattgagattctgttggcctacctatttcctgccatggctatctttaaagctgaggacgccagcggagaagccgctgccatgctgaataacatgcgcgtgtatggcacttgcgtgctcacatgcatggctactgtggtgttcgtcggtgtaaaatatgtgaataagtttgcactggtctttttagggtgcgtgatactttccatcctcgccatctacgctggcgtgatcaagagtgcctttgaccctccaaattttcctatttgcctgcttggtaatcgcaccctatcacgccatggttttgatgtgtgtgctaaacttgcctgggaaggaaacgaaactgtgacaacacgcctgtggggcctattctgctcatcgaggtttctcaatgctacttgcgacgagtacttcacccggaacaatgtcactgagatccaaggcataccaggtgcagccagcggtttgattaaagagaacctgtggagctcataccttacaaagggggttatcgttgaacggagcggaatgacttccgtgggacttgccgatgggactccgatcgacatggaccacccttatgtcttttctgatatgacttcttattttactttattggtcggcatatactttcccagcgtcaccggcataatggcgggaagtaaccgatccggcgatctgagggacgcacagaaaagcattcctaccgggactattctggccatcgccaccaccagcgccgtttatatttcaagtgtcgtgctgtttggggcatgtatcgaaggcgtggtgctccgggacaagttcggggaggcggtcaacggaaacctggtagtaggcaccctggcttggccctccccatgggtgattgtgattggcagcttcttctctacctgtggcgctggcctacagagtttaacaggcgcacctagacttctgcaggcgatcagcagagatggaattgtcccctttttgcaggtgttcgggcacggtaaggccaatggagagccaacttgggctctgctactgacagcatgcatatgtgagatcgggattctcattgcgtcactcgatgaagttgcccctattctatccatgttctttctgatgtgctacatgtttgtaaacctcgcctgcgcagtccagaccctgctgcggacccctaactggaggcccaggtttcgttactatcattggaccttgtcctttctggggatgtccctgtgcctggccctgatgtttatctgcagctggtactatgctttagtagccatgctgatagcgggtcttatctacaaatacatcgaatacaggggcgcagagaaggagtggggggatgggatacggggactcagcctcagtgcagcgaggtacgccctgctgcggctcgaggaaggacctccccacacgaaaaattggaggcctcagctcctcgtcctcgttcgggtagatcaggaccagaacgtagttcatccccagctcctgtccctgacttctcaactgaaagccggaaagggcctcacaatcgtgggatcagtcctcgagggcactttcctcgaaaaccacccacaggcccaaagagctgaagagtccataaggcggctcatggaggcggagaaggtgaaaggtttctgtcaggtggtcataagcagtaaccttagggacggcgtgagtcatcttatccaaagcgggggtctgggaggcctccagcacaacacggtgctcgtgggatggcccagaaactggagacagaaagaggaccaccaaacttggcgaaactttattgaactagtgcgggagactactgccggacacctagctttgctggtgactaaaaacgtcagtatgtttcctggaaatcctgagagattcagtgagggatctatcgacgtctggtggatagtgcatgatggaggtatgttgatgctcctcccattcttgctgagacatcacaaggtctggcgaaaatgcaagatgcgcatctttaccgttgcgcaaatggatgataattctattcagatgaagaaagacctcacgaccttcctctatcatttgcgcatcaccgccgaagtcgaagtcgtggagatgcatgaatcggatatctccgcctatacatacgaaaaaacactcgtgatggagcaacgctcgcagatcttgaagcagatgcacctcacgaaaaatgagcgagaacgggagattcagagtattactgacgagtctagaggctccatcaggaggaagaatccagctaacaccagactgcggctaaatgtccccgaagagactgctggcgacagcgaggagaaaccagaagaggaggttcagctgatccatgaccaatctgcccctagctgtccttcctctagcccctcccccggagaggagcccgaaggggagggggaaactgaccctgaaaaggtccacttgacttggacgaaagacaaatctgtggctgagaagaacaaaggaccatcgcccgtctccagcgaggggattaaagactttttttccatgaaacctgagtgggaaaatctgaatcagtcaaacgttcgcagaatgcataccgccgtgcgccttaatgaagtgatcgtcaagaagtccagagacgccaaactagtactgttaaacatgccgggacctccgagaaaccggaatggggacgagaattatatggagtttctggaagttctgaccgagcacctggatcgtgtgatgctcgtgcgtggtggaggccgtgaagtcattacaatctacagttag

SEQ ID NO: 205248 - DNA, 858 bp, Artificial Sequence
  derived and/or modified sequence
atgttaaataacctgaccgattgcgaggatggggatggtggagcgaatcccggagatggcaatcctaaggaatcatcaccttttattaacagcaccgatacagaaaaaggaaaagagtacgacggaaaaaacatggctctatttgaagaagagatggacacatctcctatggtgtcttcactgctcagtggcttagccaactatacgaacctccctcaggggtcacgggaacatgaagaggcagagaacaatgaagggggtaagaaaaaaccagtgcaggcccctcggatggggacgttcatgggcgtgtacctgccatgcttacaaaatatatttggcgtgatactgtttctgcgcctcacctgggttgttggcatcgccggaatcatggaatctttttgcatggtcttcatctgttgctcttgcaccatgctgaccgccatatccatgagcgctatcgccactaatggcgtggtaccagctgggggaagctactatatgattagtagatctctcggcccagagtttgggggagccgtggggctatgcttctatctcggaaccaccttcgcgggtgccatgtacatcttggggaccatcgagattctgctcgcctatcttttccccgcaatggcaatattcaaagctgaggacgcctcaggggaagcggcagccatgctgaataacatgcgcgtgtacggtacttgtgtgctgacctgtatggctacggtggtcttcgtgggagtaaagtatgtcaacaaatttgccctggtgtttttgggatgtgtgattctcagtattttggctatctatgctggtgttatcaagagtgctttcgaccctccgaatttcccttag

SEQ ID NO: 205249 - DNA, 561 bp, Artificial Sequence
  derived and/or modified sequence
atgcttaataacctgactgactgcgaggacggagacggcggtgccaacccaggagatggcaacccgaaagagagctctcccttcatcaactctactgatactgaaaagggtaaagagtacgacggcaagaatatggccctgttcgaagaggaaatggatacatcccctatggtcagctcactgctctccggcttggcgaattacaccaacctgccacaaggctcccgcgaacacgaggaggcagagaataatgagggcggtaagaagaaacccgtgcaggcaccacggatggggaccttcatgggcgtgtacttgccatgtctgcaaaatatcttcggtgtgatcttatttcttcgcttaacatgggtggtcggcattgccggaatcatggagtccttttgtatggttttcatttgctgcagttgcaccatgcttaccgccatttctatgtctgcaatcgcgacgaacggggtggtgccagcagggggttcttactacatgatctcccgcagcctggctatggcacggccaatggaatcccggccagggccttgctcctag

SEQ ID NO: 205250 - DNA, 5989 bp, Artificial Sequence
  derived and/or modified sequence
gagacagagctacagcgaacgagagagcggcgaaggcgggtagaggggcgcgggcgaggcggcgcagccatccccggaccaggggccgcgccgccaccatgctaaacaacctgacggactgcgaggacggcgatgggggagccaacccgggtgatggcaaccccaaggaaagcagtcccttcatcaacagcaccgacacagagaagggaaaggagtatgatggcaagaacatggccttgtttgaggaggagatggacaccagccctatggtgtcctccttgctcagtggcctggccaactacaccaacctgccccagggaagtagggagcatgaagaggcagaaaacaatgagggtggaaaaaagaagccggtgcaggccccacgcatgggcaccttcatgggcgtgtacctgccgtgcctgcagaacatctttggcgtcatcctcttcctgcggctcacctgggtggtgggcattgcaggcatcatggagtccttctgcatggtgttcatctgctgctcctgtacgatgctcacggccatctccatgagtgcaattgcaacgaatggtgttgtgcctgctggtggctcctactacatgatttccaggtctctgggcccagagtttgggggtgccgtgggcctctgcttctacctgggcactacctttgcaggagccatgtacatcctgggcaccatcgaaatcctgctggcttacctcttcccagccatggccatcttcaaggcagaagatgccagtggggaggcagcagccatgctgaacaacatgcgtgtttacggcacctgtgtgctcacctgcatggccactgtggtgtttgtgggtgtcaagtatgtcaacaagtttgcccttgtcttcctgggttgtgtcatcctctccatcctggccatctatgctggggtcatcaagtctgccttcgacccacccaacttcccgatctgcctcctgggtaaccgcacgctgtctcgccatggctttgatgtctgtgccaagctggcttgggaaggaaatgagacggtgaccacacggctatggggccttttctgctcctctcgcttcctcaacgccacctgtgatgaatacttcacccgaaacaatgtcacagagatccagggcatccctggtgctgccagtggcctcatcaaagagaacctctggagctcctacctgaccaagggcgtgattgtggagaggagtgggatgacctcggtgggcctggccgatggcactcctatcgacatggaccacccttatgtcttcagtgatatgacctcctacttcaccctgctggttggcatctacttcccctcagtcacagggatcatggctggttctaaccgctctggggacctgagggatgcccagaagtcaatccccactggcaccatcctggccatcgccaccacctctgctgtctacatcagctccgttgttctgtttggggcctgcattgagggggtcgtcctgcgggacaagtttggcgaagctgtgaatggcaacctcgtggtgggcactctggcctggccatctccatgggtaattgtcatcggatccttcttctccacctgtggggctgggctgcagagcctcacgggggccccacgcctgctgcaggccatctcgagggatggcattgtgcccttcctgcaggtctttggccatggcaaggccaatggagagccgacctgggccctgctcctgactgcctgcatctgcgagattggcatcctcattgcatccctcgacgaggtggcccccatcctctctatgttcttcctgatgtgctacatgtttgtgaatctggcctgtgcagtgcagacgctgctgaggacacccaactggaggccacgctttcgatattaccactggaccctctccttcctgggcatgagcctctgcctggccctcatgttcatctgctcctggtattatgcactggtagccatgctcattgctggactcatctacaagtacattgagtaccgtggggcagagaaggagtggggcgatgggatacgaggtctgtctctcagtgcggctcgctatgccctcttacgcctggaggaagggcccccacacaccaagaactggaggccacagctgctggtgctggtgcgtgtggaccaagaccagaatgtggtgcacccccagctgctctcactgacctcccagctgaaggcggggaagggcctgaccatcgtgggctctgtccttgagggcacctttctggaaaatcatccacaggcccagcgggcagaagagtctatcaggcgcctgatggaggcagagaaggtgaagggcttctgccaggtggtgatctcctccaacttgcgtgatggcgtgtcccatctgatccagtccgggggcctcggggggctgcagcacaacactgtgcttgttggctggccccgcaactggcgccagaaggaagatcatcagacgtggaggaacttcattgagctggtccgggaaaccacagctggccacttagccctgctggtcaccaagaacgtttccatgtttcctgggaaccctgagcgcttctctgagggcagcatcgacgtttggtggattgtgcacgatggaggcatgctcatgctgctgcccttcctgctgcggcaccacaaggtctggcggaagtgcaagatgcgtatcttcactgtggcccagatggatgacaatagcatccagatgaagaaggatctgaccacatttctgtatcatttacgcatcactgcggaggtcgaggtggtggagatgcatgagagcgacatctcagcttacacctatgagaagacgttggtgatggagcagcgttcccagatcctcaaacagatgcatttaaccaagaatgagcgggagcgggagatccagagtatcacagatgagtcacgaggctcaatccggagaaagaatccagccaacacgcggctccgcctgaacgtcccagaagagacggctggtgacagtgaagagaagccagaggaggaggtgcagctgatccacgatcagagtgctcccagctgccccagcagctccccgtccccaggggaggagcctgagggggaaggggagacagatccggagaaggtgcatctcacctggaccaaggacaagtcggtggcagagaagaataagggccccagtcctgtctcctctgagggcatcaaggacttcttcagcatgaagccggagtgggagaacttgaaccagtccaacgtgcggcgcatgcacacggccgtgcggctgaacgaggtcatcgtgaagaaatcccgggacgccaagcttgttttgctcaacatgcctgggcctccccgcaaccgcaatggtgatgaaaactacatggagtttctcgaggtcctcacagagcacctggaccgggtgatgctggtccgcggcggcggccgcgaggtcatcaccatctactcctgagaaccaggacctgccacccgggcccgagcgcgcccggcccgcggctccggagccctcgccgcgccccccgccgctgtcaccgtttacatacagaccctgtgcccgtgtcctggccccttaccccgctgcctgaagcccggaggccacgcctgttggggctgattcggagagggcgccccgccgcgcagagaccagagctcctcagtgccagtttggcccctgggtcttcgctgccctttttctaagcccggcctcgtctcgccggaggagacgctgcaataaaggttgggagaaggcgcggaaaggagaggagctggggccttggggacccccaggtagtccatgcggcccattcctccccttcccactcccgccgcggtcctcgctctgcgctcctccggcgctgctccctggctcccggcggcccggaggcccgcggggtgggaaggccgcgcttgccgtctccgccgccccttctcgccgagccgtggggcgcgggcggccgagcctatacatagtgtacaggagacatcgcgtgtatttttaacgtccccatatttatgtgactagaagcgcaacagacttctcgccatagtcgagctctcccgctgggggcactgcggggaggcgaggcctcgggaagctgaattttccttgacgtccaagagtttgagagcgaaagtgctttaggcccaggcgggggtcgtggcctcgttccctcgacacctccgtcctgctctcgcctcttcgccctttccgcgcgcccttggcttcccaccctcctctccagtccttttccgagatgaggtgagacaagggtccaacttttcctggattcgcctcccagcggacgtgagcttccactgcggctgcagagacgcgagcaacctcttctcatcggctcttatgcaagttggggccaggataggggaggggtgctcctcaagaggaagaaaccgagaggcccgcgccccaccgaggaagccccgccccggtgccttcgctggggagcaggcgtctctcctcagtcggcttgtcgcctgctccccgtatcccatggctcctcgccaaagactgaaattgtggagctggagggcgccccctccccggagtttcctccctgggacaagtgagggaggagggggccgattctggtttaggggccggacccactgagaggccccagagccgcccgtgatgttcctcccccgtccccatctggcagctcctgtctcgcctgagggacccagccgccttctccgtgctctggggccgggcctcgctgcttagcagcggcctctagctccgtctcccggggacctgggcctgagggagggctggagtcgcacgcgctttgtccttagcgcctgtctgctctcctctaactaggacccagggcctttggcttccccagctcatccttggcccttccgctccaccagcctggtctgaggcgtgctctgtccttagagaaggcgcggtggccgggttcccttcccctagggcacattactaagggggtcaggcactgcatgctcgttccagcaccatctgggactgggtacagtacctccagccccagggccctgacctgcgcacctagcttgacatctcacgcacctcccagagctggcgccactgagtaatccggacctcaccacctcttttcctttgagcccaaggcagagctggagctggcgccacccagacagcgtcaggtgtggctggggtaggtttggaggtctgccagttacaccaagtcccctctgagattcgatcaggggactggatagattctttcaggtactcaatcaggaagctggaggtgttagacaccagccccctgcatccttcagtagacctccctctgaacaccacagccaggtcctgccttctgggggcctgaatattccagagctgatgtgatgggctgtgcagaagggggctgtatcaacatcaattagggaaccaaagttgcactatctgggcccagattgtctggttggcaagagcaaagtttccgttgatgaaacagacatcccacaacaaaaacccaagttttctgtgctacatgtgcaatatttgttatgaatgttatcacaagtcattcatcaagttatctttataatcactgtagttagatgtttcatgtccattcaagtgacttttattctgagtgcaatatttcaatagccttgtagtgataactagtgttgcttttgttttagatgatctatgtgcagggcaatgcaatgaagttgaaaacccttgtaaataggagaggttgcaaaccaaatcaagagtatttattactattactgctattattattaggcctgcctttaattttcagtgtaagtgttcagtatgccgcatcctgcctcagtattgatcttgtgttctttgtgccaatatgaaaaggagagggttggttctttcctttattgttgaatgctcccatttaatgctttatggcttttactgtgttacttttttagactcccgtctgcacaaaatgcaataaaaataattttattata

SEQ ID NO: 205251 - DNA, 1549 bp, Artificial Sequence
  derived and/or modified sequence
gtgcgccgggcgggcgggcactgcagcttcttcctccgtggagcggagagcgagacagagctacagcgaacgagagagcggcgaaggcgggtagaggggcgcgggcgaggcggcgcagccatccccggaccaggggccgcgccgccaccatgctaaacaacctgacggactgcgaggacggcgatgggggagccaacccgggtgatggcaaccccaaggaaagcagtcccttcatcaacagcaccgacacagagaagggaaaggagtatgatggcaagaacatggccttgtttgaggaggagatggacaccagccctatggtgtcctccttgctcagtggcctggccaactacaccaacctgccccagggaagtagggagcatgaagaggcagaaaacaatgagggtggaaaaaagaagccggtgcaggccccacgcatgggcaccttcatgggcgtgtacctgccgtgcctgcagaacatctttggcgtcatcctcttcctgcggctcacctgggtggtgggcattgcaggcatcatggagtccttctgcatggtgttcatctgctgctcctgtacgatgctcacggccatctccatgagtgcaattgcaacgaatggtgttgtgcctgctggtggctcctactacatgatttccaggtctctgggcccagagtttgggggtgccgtgggcctctgcttctacctgggcactacctttgcaggagccatgtacatcctgggcaccatcgaaatcctgctggcttacctcttcccagccatggccatcttcaaggcagaagatgccagtggggaggcagcagccatgctgaacaacatgcgtgtttacggcacctgtgtgctcacctgcatggccactgtggtgtttgtgggtgtcaagtatgtcaacaagtttgcccttgtcttcctgggttgtgtcatcctctccatcctggccatctatgctggggtcatcaagtctgccttcgacccacccaacttcccgtgagtgctgctgctctgagcccaaggaatcgtcctcctacctccctggccctgtttcagagtctctgccaaactccccctccctgcccctcagaatctcagagtggtgtgggttgggagtagcttcccttgggagggaaaatctctcttagtttgggggcaatctcttcagagtgaggtaacttttctggaggagggaacaatttaccttgtaagagtcaacttcttgctggtagggtggacttaggaagaattaagtgggaatgagttccaaagcaatgaatgctgtctgtggtagggaaacctttcctgggtggggacaacctcctggaatgggacaatctcctagtgttggacaactcctccaggatgggaaaagacacagaagtctacagggtccagggactcagatccaagtccactccatccactgctcagaggtggagggcggcccccgagaccgctgtccacggtgctgaaacacagcattgcactaatgcggtgcttctccaccttggctgcttattagaatcacttggggagctt

SEQ ID NO: 205252 - DNA, 1105 bp, Artificial Sequence
  derived and/or modified sequence
tcttcctccgtggagcggagagcgagacagagctacagcgaacgagagagcggcgaaggcgggtagaggggcgcgggcgaggcggcgcagccatccccggaccaggggccgcgccgccaccatgctaaacaacctgacggactgcgaggacggcgatgggggagccaacccgggtgatggcaaccccaaggaaagcagtcccttcatcaacagcaccgacacagagaagggaaaggagtatgatggcaagaacatggccttgtttgaggaggagatggacaccagccctatggtgtcctccttgctcagtggcctggccaactacaccaacctgccccagggaagtagggagcatgaagaggcagaaaacaatgagggtggaaaaaagaagccggtgcaggccccacgcatgggcaccttcatgggcgtgtacctgccgtgcctgcagaacatctttggcgtcatcctcttcctgcggctcacctgggtggtgggcattgcaggcatcatggagtccttctgcatggtgttcatctgctgctcctgtacgatgctcacggccatctccatgagtgcaattgcaacgaatggtgttgtgcctgctggtggctcctactacatgatttccaggtctttggccatggcaaggccaatggagagccgacctgggccctgctcctgactgcctgcatctgcgagattggcatcctcattgcatccctcgacgaggtggcccccatcctctctatgttcttcctgatgtgctacatgtttgtgaatctggcctgtgcagtgcagacgctgctgaggacacccaactggaggccacgctttcgatattaccactggaccctctccttcctgggcatgagcctctgcctggccctcatgttcatctgctcctggtattatgcactggtagccatgctcattgctggactcatctacaagtacattgagtaccgtggggcagagaaggagtggggcgatgggatacgaggtctgtctctcagtgcggctcgctatgccctcttacgcctggaggaagggcccccacacaccaagaactggaggccacagctgctggtgctggtgcgtgtggacc

SEQ ID NO: 205253 - DNA, 3351 bp, Artificial Sequence
  derived and/or modified sequence
atgctgaacaacctgaccgactgcgaggacggcgacggcggcgccaaccccggcgacggcaaccccaaggagagcagccccttcatcaacagcaccgacaccgagaagggcaaggagtacgacggcaagaacatggccctgttcgaggaggagatggacaccagccccatggtgagcagcctgctgagcggcctggccaactacaccaacctgccccagggcagcagagagcacgaggaggccgagaacaacgagggcggcaagaagaagcccgtgcaggcccccagaatgggcaccttcatgggcgtgtacctgccctgcctgcagaacatcttcggcgtgatcctgttcctgagactgacctgggtggtgggcatcgccggcatcatggagagcttctgcatggtgttcatctgctgcagctgcaccatgctgaccgccatcagcatgagcgccatcgccaccaacggcgtggtgcccgccggcggcagctactacatgatcagcagaagcctgggccccgagttcggcggcgccgtgggcctgtgcttctacctgggcaccaccttcgccggcgccatgtacatcctgggcaccatcgagatcctgctggcctacctgttccccgccatggccatcttcaaggccgaggacgccagcggcgaggccgccgccatgctgaacaacatgagagtgtacggcacctgcgtgctgacctgcatggccaccgtggtgttcgtgggcgtgaagtacgtgaacaagttcgccctggtgttcctgggctgcgtgatcctgagcatcctggccatctacgccggcgtgatcaagagcgccttcgacccccccaacttccccatctgcctgctgggcaacagaaccctgagcagacacggcttcgacgtgtgcgccaagctggcctgggagggcaacgagaccgtgaccaccagactgtggggcctgttctgcagcagcagattcctgaacgccacctgcgacgagtacttcaccagaaacaacgtgaccgagatccagggcatccccggcgccgccagcggcctgatcaaggagaacctgtggagcagctacctgaccaagggcgtgatcgtggagagaagcggcatgaccagcgtgggcctggccgacggcacccccatcgacatggaccacccctacgtgttcagcgacatgaccagctacttcaccctgctggtgggcatctacttccccagcgtgaccggcatcatggccggcagcaacagaagcggcgacctgagagacgcccagaagagcatccccaccggcaccatcctggccatcgccaccaccagcgccgtgtacatcagcagcgtggtgctgttcggcgcctgcatcgagggcgtggtgctgagagacaagttcggcgaggccgtgaacggcaacctggtggtgggcaccctggcctggcccagcccctgggtgatcgtgatcggcagcttcttcagcacctgcggcgccggcctgcagagcctgaccggcgcccccagactgctgcaggccatcagcagagacggcatcgtgcccttcctgcaggtgttcggccacggcaaggccaacggcgagcccacctgggccctgctgctgaccgcctgcatctgcgagatcggcatcctgatcgccagcctggacgaggtggcccccatcctgagcatgttcttcctgatgtgctacatgttcgtgaacctggcctgcgccgtgcagaccctgctgagaacccccaactggagacccagattcagatactaccactggaccctgagcttcctgggcatgagcctgtgcctggccctgatgttcatctgcagctggtactacgccctggtggccatgctgatcgccggcctgatctacaagtacatcgagtacagaggcgccgagaaggagtggggcgacggcatcagaggcctgagcctgagcgccgccagatacgccctgctgagactggaggagggccccccccacaccaagaactggagaccccagctgctggtgctggtgagagtggaccaggaccagaacgtggtgcacccccagctgctgagcctgaccagccagctgaaggccggcaagggcctgaccatcgtgggcagcgtgctggagggcaccttcctggagaaccacccccaggcccagagagccgaggagagcatcagaagactgatggaggccgagaaggtgaagggcttctgccaggtggtgatcagcagcaacctgagagacggcgtgagccacctgatccagagcggcggcctgggcggcctgcagcacaacaccgtgctggtgggctggcccagaaactggagacagaaggaggaccaccagacctggagaaacttcatcgagctggtgagagagaccaccgccggccacctggccctgctggtgaccaagaacgtgagcatgttccccggcaaccccgagagattcagcgagggcagcatcgacgtgtggtggatcgtgcacgacggcggcatgctgatgctgctgcccttcctgctgagacaccacaaggtgtggagaaagtgcaagatgagaatcttcaccgtggcccagatggacgacaacagcatccagatgaagaaggacctgaccaccttcctgtaccacctgagaatcaccgccgaggtggaggtggtggagatgcacgagagcgacatcagcgcctacacctacgagaagaccctggtgatggagcagagaagccagatcctgaagcagatgcacctgaccaagaacgagagagagagagagatccagagcatcaccgacgagagcagaggcagcatcagaagaaagaaccccgccaacaccagactgagactgaacgtgcccgaggagaccgccggcgacagcgaggagaagcccgaggaggaggtgcagctgatccacgaccagagcgcccccagctgccccagcagcagccccagccccggcgaggagcccgagggcgagggcgagaccgaccccgagaaggtgcacctgacctggaccaaggacaagagcgtggccgagaagaacaagggccccagccccgtgagcagcgagggcatcaaggacttcttcagcatgaagcccgagtgggagaacctgaaccagagcaacgtgagaagaatgcacaccgccgtgagactgaacgaggtgatcgtgaagaagagcagagacgccaagctggtgctgctgaacatgcccggcccccccagaaacagaaacggcgacgagaactacatggagttcctggaggtgctgaccgagcacctggacagagtgatgctggtgagaggcggcggcagagaggtgatcaccatctacagctag

SEQ ID NO: 205254 - DNA, 858 bp, Artificial Sequence
  derived and/or modified sequence
atgctgaacaacctgaccgactgcgaggacggcgacggcggcgccaaccccggcgacggcaaccccaaggagagcagccccttcatcaacagcaccgacaccgagaagggcaaggagtacgacggcaagaacatggccctgttcgaggaggagatggacaccagccccatggtgagcagcctgctgagcggcctggccaactacaccaacctgccccagggcagcagagagcacgaggaggccgagaacaacgagggcggcaagaagaagcccgtgcaggcccccagaatgggcaccttcatgggcgtgtacctgccctgcctgcagaacatcttcggcgtgatcctgttcctgagactgacctgggtggtgggcatcgccggcatcatggagagcttctgcatggtgttcatctgctgcagctgcaccatgctgaccgccatcagcatgagcgccatcgccaccaacggcgtggtgcccgccggcggcagctactacatgatcagcagaagcctgggccccgagttcggcggcgccgtgggcctgtgcttctacctgggcaccaccttcgccggcgccatgtacatcctgggcaccatcgagatcctgctggcctacctgttccccgccatggccatcttcaaggccgaggacgccagcggcgaggccgccgccatgctgaacaacatgagagtgtacggcacctgcgtgctgacctgcatggccaccgtggtgttcgtgggcgtgaagtacgtgaacaagttcgccctggtgttcctgggctgcgtgatcctgagcatcctggccatctacgccggcgtgatcaagagcgccttcgacccccccaacttcccctag

SEQ ID NO: 205255 - DNA, 561 bp, Artificial Sequence
  derived and/or modified sequence
atgctgaacaacctgaccgactgcgaggacggcgacggcggcgccaaccccggcgacggcaaccccaaggagagcagccccttcatcaacagcaccgacaccgagaagggcaaggagtacgacggcaagaacatggccctgttcgaggaggagatggacaccagccccatggtgagcagcctgctgagcggcctggccaactacaccaacctgccccagggcagcagagagcacgaggaggccgagaacaacgagggcggcaagaagaagcccgtgcaggcccccagaatgggcaccttcatgggcgtgtacctgccctgcctgcagaacatcttcggcgtgatcctgttcctgagactgacctgggtggtgggcatcgccggcatcatggagagcttctgcatggtgttcatctgctgcagctgcaccatgctgaccgccatcagcatgagcgccatcgccaccaacggcgtggtgcccgccggcggcagctactacatgatcagcagaagcctggccatggccagacccatggagagcagacccggcccctgcagctag

SEQ ID NO: 205256 - DNA, 2679 bp, Artificial Sequence
  derived and/or modified sequence
atgaccgaccccttctgcgtgggcggcagaagactgcccggcagcagcaagagcggccccggcaaggacggcagcagaaaggaggtgagactgcccatgctgcacgacccccccaagatgggcatgcccgtggtgagaggcggccagaccgtgcccggccaggcccccctgtgcttcgaccccggcagccccgccagcgacaagaccgagggcaagaagaagggcagacccaaggccgagaaccaggccctgagagacatccccctgagcctgatgaacgactggaaggacgagttcaaggcccacagcagagtgaagtgccccaacagcggctgctggctggagttccccagcatctacggcctgaagtaccactaccagagatgccagggcggcgccatcagcgacagactggccttcccctgccccttctgcgaggccgccttcaccagcaagacccagctggagaagcacagaatctggaaccacatggacagacccctgcccgccagcaagcccggccccatcagcagacccgtgaccatcagcagacccgtgggcgtgagcaagcccatcggcgtgagcaagcccgtgaccatcggcaagcccgtgggcgtgagcaagcccatcggcatcagcaagcccgtgagcgtgggcagacccatgcccgtgaccaaggccatccccgtgaccagacccgtgcccgtgaccaagcccgtgaccgtgagcagacccatgcccgtgaccaaggccatgcccgtgaccaagcccatcaccgtgaccaagagcgtgcccgtgaccaagcccgtgcccgtgaccaagcccatcaccgtgaccaagctggtgaccgtgaccaagcccgtgcccgtgaccaagcccgtgaccgtgagcagacccatcgtggtgagcaagcccgtgaccgtgagcagacccatcgccatcagcagacacacccccccctgcaagatggtgctgctgaccagaagcgagaacaaggcccccagagccaccggcagaaacagcggcaagaagagagccgccgacagcctggacacctgccccatcccccccaagcaggccagacccgagaacggcgagtacggccccagcagcatgggccagagcagcgccttccagctgagcgccgacaccagcagcggcagcctgagccccggcagcagacccagcggcggcatggaggccctgaaggccgccggccccgccagcccccccgaggaggaccccgagagaaccaagcacagaagaaagcagaagacccccaagaagttcaccggcgagcagcccagcatcagcggcaccttcggcctgaagggcctggtgaaggccgaggacaaggccagagtgcacagaagcaagaagcaggagggccccggccccgaggacgccagaaagaaggtgcccgccgcccccatcaccgtgagcaaggaggcccccgcccccgtggcccaccccgcccccggcggccccgaggagcagtggcagagagccatccacgagagaggcgaggccgtgtgccccacctgcaacgtggtgaccagaaagaccctggtgggcctgaagaagcacatggaggtgtgccagaagctgcaggacgccctgaagtgccagcactgcagaaagcagttcaagagcaaggccggcctgaactaccacaccatggccgagcacagcgccaagcccagcgacgccgaggccagcgagggcggcgagcaggaggagagagagagactgagaaaggtgctgaagcagatgggcagactgagatgcccccaggagggctgcggcgccgccttcagcagcctgatgggctaccagtaccaccagagaagatgcggcaagcccccctgcgaggtggacagccccagcttcccctgcacccactgcggcaagacctacagaagcaaggccggccacgactaccacgtgagaagcgagcacaccgcccccccccccgaggagcccaccgacaagagccccgaggccgaggaccccctgggcgtggagagaacccccagcggcagagtgagaagaaccagcgcccaggtggccgtgttccacctgcaggagatcgccgaggacgagctggccagagactggaccaagagaagaatgaaggacgacctggtgcccgagaccgccagactgaactacaccagacccggcctgcccaccctgaacccccagctgctggaggcctggaagaacgaggtgaaggagaagggccacgtgaactgccccaacgactgctgcgaggccatctacagcagcgtgagcggcctgaaggcccacctggccagctgcagcaagggcgcccacctggccggcaagtacagatgcctgctgtgccccaaggagttcagcagcgagagcggcgtgaagtaccacatcctgaagacccacgccgagaactggttcagaaccagcgccgaccccccccccaagcacagaagccaggacagcctggtgcccaagaaggagaagaagaagaacctggccggcggcaagaagagaggcagaaagcccaaggagagaacccccgaggagcccgtggccaagctgccccccagaagagacgactggccccccggctgcagagacaagggcgccagaggcagcaccggcagaaaggtgggcgtgagcaaggcccccgagaagtag

SEQ ID NO: 205257 - DNA, 2679 bp, Artificial Sequence
  derived and/or modified sequence
atgacggatccattctgcgtcggaggccgaaggctgccaggtagtagtaagagcggcccaggcaaagacgggtcaaggaaggaagtccgtctgccaatgctgcacgaccctccgaaaatgggcatgcctgtggtgcgaggaggccagaccgtgcccggccaagcacccctctgtttcgatcccggctcccctgcatccgataagactgaagggaagaagaaaggaagacctaaagctgaaaaccaggctctcagggacattccgctgtctctgatgaacgattggaaggatgagttcaaggctcattcgcgagtaaaatgcccaaacagcgggtgttggcttgaatttccctccatctacggcctgaaatatcactaccagagatgtcaggggggagccatttccgaccggctggcatttccctgtccattttgtgaagccgccttcacgagcaagacacagctagagaagcatagaatctggaaccacatggacagaccactgcctgccagcaagccaggtcccatcagccgcccagtcacaattagcagacccgtcggcgtaagtaaacccatcggcgtctctaagcctgtcaccatcggaaagccggtcggggtgtcaaaacccatcggcatttctaagccggtgagcgtagggcggcccatgccggtgacaaaagcaatccccgtcactagacctgtgccagtgaccaagcctgtaacagtgagcagaccaatgcccgtgacaaaggcgatgcctgtgacaaaacccattacagtaacaaagagcgtcccggttacaaaaccagtgcccgtcacaaaaccgattacggtcacaaagcttgtcacagtgacaaaacccgtcccagtaaccaaaccagtcactgtgtccagacccattgtagtttcgaagcccgtcaccgtcagtagacctattgccatttccaggcacaccccaccatgtaagatggtgcttctgactcgctccgagaataaagcccccagagccacaggtcgcaatagtggcaaaaagcgcgccgcagactccctggatacgtgtcccattcctccaaagcaagctcgtccggagaatggcgagtacggaccgtcttcaatgggacaatccagtgcttttcagctgtcagcggacactagttcaggaagcttatcgcccgggtccagaccgtccggcgggatggaagctctaaaggccgctggtcctgcaagcccgccagaggaggatcccgagcgtactaagcatcgtagaaaacagaaaacacctaagaaatttacaggggagcagccaagtatcagtggtacattcggcctgaagggcctggtcaaagccgaagataaggctcgggtgcatagatctaagaagcaagaaggacccggtcctgaggacgccaggaagaaagtgccagctgcgcctattactgtaagcaaagaagcacccgcccccgtagcccaccccgcaccaggcggccccgaagagcaatggcagagggctatccacgagagaggcgaagcggtatgtccaacctgcaatgtggtgacacgaaaaacgctcgtaggtcttaagaagcacatggaagtttgccagaaactccaggacgcacttaagtgccagcactgtagaaaacaatttaagtcgaaggctggtctcaattatcacactatggcagaacactccgcaaaaccatcagacgccgaggcttccgagggaggcgagcaagaagaacgggaacggctgcgcaaggtcctcaaacagatgggcaggctgcggtgtccccaagagggctgcggcgccgctttctctagcctcatggggtaccaatatcatcagcgaagatgtggcaagccgccttgcgaggttgattctccttccttcccgtgcacccactgtggcaagacttatcgaagcaaagcagggcatgattaccatgtccgtagcgagcacaccgccccacctcccgaagagcctacagataagagtccagaagccgaagatcccttgggcgttgaaagaaccccatccgggcgcgtccggaggacaagcgctcaggtcgccgtgtttcacctgcaggagatcgcagaagacgaactggccagagattggaccaagcgcaggatgaaggatgacctggtgccagagactgccagactcaactacacccgaccagggcttccgacactgaatccacagctgttggaggcctggaaaaacgaggtaaaagaaaagggccacgtgaactgtccaaatgattgttgtgaagccatctactcgtctgtgtccggactgaaggcacatctggcctcatgcagcaaaggcgcacaccttgctggcaaataccgctgtcttttgtgtccaaaggagttcagctcagagtccggagtgaaataccacattttaaaaacacacgccgagaactggttcaggacctctgctgatccccccccaaagcatagaagtcaagacagcctcgtgcctaaaaaagagaagaaaaaaaacctggcagggggtaagaaaagaggaaggaaacccaaagaacgcacacccgaagagccagtagctaaactccccccacgcagggacgattggccccccggctgcagggataagggagccagaggctctaccggccggaaagtgggggtaagtaaagcaccggagaaatag

SEQ ID NO: 205258 - DNA, 2679 bp, Artificial Sequence
  derived and/or modified sequence
atgaccgatcctttctgcgtcgggggaaggcggttaccaggttcatccaagtcaggaccagggaaggacggctcccggaaggaggtgcgcctgcccatgctccatgatccaccaaaaatgggcatgcctgtggtaagggggggccaaactgtgccaggacaagccccgctgtgcttcgacccaggatctcctgcctccgacaagacagagggaaagaaaaaaggtcggcctaaagccgagaatcaagcgcttcgggacattcccctgtcactaatgaatgactggaaggacgagttcaaggctcactcacgagtgaaatgccctaattcagggtgctggttggagtttccctccatctatggcctgaagtaccattaccagcggtgccaggggggagccatttcagaccggctggcttttccatgccccttctgtgaagctgccttcacttcaaaaactcaactggagaagcatcggatttggaatcatatggaccggcctttgcccgcgagcaagcctggccccatctctcgcccagttacgatcagccgccctgtgggggtatctaagccgattggggtcagtaagcctgtcactataggcaagcctgtgggagtctcgaagccaataggtatttcaaagcccgtctcagtgggaagacccatgccggtgacaaaagctatcccagtaacccgacccgtgcccgttaccaagccggtgacagtcagcaggccaatgcccgtgacaaaagctatgcctgtgacgaagcctattaccgtaacaaaatccgtaccagttacaaaaccggtgccagtcacaaaacccatcactgttaccaagctcgttacggtgaccaagccggtccctgtcaccaagccagtgacggtttcaaggcccattgtggtttctaaacccgtcacagtgtcacgccctatcgccatctctcggcacacaccaccgtgcaagatggtgctgctcacccgctcggaaaacaaggctccgagggctacaggccgtaatagcgggaaaaagcgtgccgctgactccttagacacgtgccccattccaccaaaacaggcccgcccggaaaacggggaatacggcccctccagtatggggcaaagttcagcatttcagctgtccgccgatactagcagtggatcactgtctccagggagtaggccctcaggcggtatggaggccttgaaggcagctggtccagcaagtcctccagaagaagatcctgagagaacaaagcataggcggaagcagaagacccctaaaaagtttacaggcgagcagccttctatcagcggtaccttcgggctcaaaggactggtaaaggcagaggacaaagccagggttcatcgatcaaaaaaacaggaaggaccagggcctgaagatgccaggaagaaagtgcccgcggcccccattaccgtttctaaagaggcacctgcccccgtggctcatccagccccaggaggcccagaggagcaatggcagcgcgccattcatgaacgcggtgaggccgtttgcccaacatgcaacgtggtgactcgcaagacacttgttggacttaagaaacacatggaggtgtgtcaaaaactccaggatgcactgaaatgtcagcattgtaggaaacagttcaagtctaaggccggcctgaattaccacactatggctgagcacagcgctaagccttctgatgccgaagccagcgaaggcggcgagcaggaagagagagagagactccgcaaagtacttaagcagatggggagactgagatgcccgcaggaggggtgtggagctgccttttcgtctctaatgggctatcaatatcatcaacgcaggtgtggcaaaccaccctgtgaggttgattcgccttctttcccttgcactcactgcgggaagacataccgatcaaaggccggtcacgactaccacgtgagaagtgaacacaccgcacccccacccgaggagccaaccgataagtcaccagaggctgaagacccgctcggcgtggaacgcactccaagtggtagggtccggcgcacatctgcgcaggtggcagtgttccacctgcaagagatcgctgaggatgagttggcacgggattggaccaagcggcggatgaaggatgatctggtgccagagactgccagattgaactatacccggcccggcttacccacgctgaaccctcaactgttggaggcctggaaaaatgaagtgaaggaaaagggtcatgttaattgtccgaatgattgctgtgaggcgatctactcgagcgtttctgggctaaaggcccatcttgcttcatgctcaaaaggcgctcacctagctggaaaatatcggtgcctgttgtgtcccaaggagtttagcagtgaaagcggggtcaagtatcatatactcaagacgcacgctgagaattggttcagaactagtgccgatcccccacccaagcacagaagccaggacagcctagttccaaagaaggagaagaagaagaatctcgccggaggcaagaagcggggaaggaagccaaaggagcggacgccagaggagcctgtcgcgaaacttccacctcggcgggacgactggccacccggctgcagagacaagggcgccagaggcagcaccggcaggaaagtcggcgtgtcgaaagcccccgagaagtag

SEQ ID NO: 205259 - DNA, 2679 bp, Artificial Sequence
  derived and/or modified sequence
atgacagaccccttctgtgtgggcggccggcggctgcccggcagcagcaagagcggccctgggaaggatggcagcaggaaggaggtgcggctgcccatgctgcatgacccccccaagatgggcatgcctgtggtgcggggcggccagacagtgcccggccaggcccccctgtgctttgatcctggcagccctgccagtgacaagacagagggcaagaagaagggccggcccaaggccgagaaccaggccctgcgggacatccccctgagcctgatgaatgactggaaggatgagttcaaggcccacagccgggtgaagtgccccaacagcggctgctggctggagttccccagcatctacggcctgaagtaccactaccagcgctgccagggcggggccatcagtgaccggctggccttcccctgccccttctgtgaggccgccttcaccagcaagacccagctggagaagcaccgcatctggaaccacatggaccggcccctgcctgccagcaagccaggccccatcagcaggcctgtgaccatcagcaggcctgtgggcgtgtccaagcccatcggcgtgtccaagcctgtgaccatcggcaagcctgtgggcgtgtccaagcccatcggcatcagcaagcctgtgtctgtgggccggcccatgcctgtgaccaaggccatccctgtgaccaggcctgtgcctgtgaccaagcctgtgacagtgtcccggcccatgcctgtgaccaaggccatgcctgtgaccaagcccatcaccgtgaccaagtctgtgcctgtgaccaagcctgtgcctgtgaccaagcccatcaccgtgaccaagctggtgacagtgaccaagcctgtgcctgtgaccaagcctgtgacagtgtcccggcccatcgtggtgtccaagcctgtgacagtgtcccggcccatcgccatcagccgccacaccccaccctgcaagatggtgctgctgaccaggtctgagaacaaggccccccgggccactggaagaaattctgggaagaagagagctgctgacagcctggacacctgccccatcccccccaagcaggcccggccagaaaatggagaatatggccccagctccatgggccagagcagcgccttccagctgtctgctgacaccagcagcggcagcctgagccctggcagccggcccagcggcggcatggaggccctgaaggctgctggccctgccagccccccagaagaagatcctgagaggaccaagcacaggaggaagcagaagacccccaagaagttcaccggggagcagcccagcatcagcggcaccttcggcctgaagggcctggtgaaggccgaggacaaggcccgggtgcacaggagcaagaagcaggagggccctggcccagaagatgccaggaagaaggtgcctgctgcccccatcaccgtgtccaaggaggccccagcccctgtggcccacccagcccctgggggccctgaggagcagtggcagagggccatccacgagcggggggaggccgtgtgccccacctgcaatgtggtgaccaggaagaccctggtgggcctgaagaagcacatggaggtgtgccagaagctgcaggatgccctgaagtgccagcactgcaggaagcagttcaagagcaaggccggcctgaactaccacaccatggccgagcacagcgccaagcccagtgatgctgaggccagcgagggcggggagcaggaggagcgggagcggctgaggaaggtgctgaagcagatgggccgcctgcgctgcccccaggagggctgtggggccgccttcagcagcctgatgggctaccagtaccaccagaggcgctgtgggaagccaccctgtgaggtggacagccccagcttcccctgcacccactgcggcaagacctaccgcagcaaggccggccatgactaccacgtgcgctctgagcacacagcccctcctcctgaggagcccacagacaagagccctgaggccgaggaccccctgggcgtggagaggaccccatctggccgggtgcggaggaccagcgcccaggtggccgtgttccacctgcaggagattgctgaagatgagctggcccgggactggaccaagaggaggatgaaggatgacctggtgcctgagacagcccggctgaactacaccaggcctggcctgcccaccctgaacccccagctgctggaggcctggaagaatgaggtgaaggagaagggccacgtgaactgccccaatgactgctgtgaggccatctacagctctgtgtctggcctgaaggcccacctggccagctgcagcaagggggcccacctggccggcaagtaccgctgcctgctgtgccccaaggagttcagcagcgagagcggcgtgaagtaccacatcctgaagacccatgctgagaactggttccgcaccagcgctgaccccccacccaagcacaggagccaggacagcctggtgcccaagaaggagaagaagaagaacctggccggcggcaagaagaggggcaggaagcccaaggagaggaccccagaggagcctgtggccaagctgcccccaagaagagatgactggcccccaggctgccgggacaagggggcccggggcagcacaggcaggaaggtgggcgtgtccaaggcccctgagaagtag

SEQ ID NO: 205260 - DNA, 2679 bp, Artificial Sequence
  derived and/or modified sequence
atgaccgaccccttctgcgtgggcggccggcggctgcccggcagcagcaagagtggacccggaaaagacggaagcagaaaggaagtgcgcctgccaatgcttcacgatccacccaagatgggaatgcctgtagtgcgcggtgggcagactgtgccagggcaagcaccactgtgctttgacccaggttctccagcatccgacaagactgaaggcaaaaagaaagggcggcccaaggctgagaaccaggccttgcgtgacatcccgctgtccctcatgaacgattggaaggatgaattcaaagctcattctcgcgtgaagtgcccgaattccgggtgctggctcgaattcccctctatttatggcctcaagtaccactaccagcgatgtcagggcggagcgatctccgacaggctggccttcccatgcccgttttgtgaggccgcgttcacctcgaagacgcaattggagaaacataggatttggaaccatatggatcggccactccctgcaagtaagcctggccccatctcgcggccggtaaccattagccgtccagtgggcgtgagtaagccgatcggggtctcgaagcctgtcactatcgggaagcctgtgggcgtgagcaaacctatcggaattagcaagcctgtgagcgtgggccgtcctatgccagtcaccaaggcaatccccgtcacacgccccgtaccagtaactaaacctgtaacagtgtcgcgcccaatgcccgtgacaaaggccatgccggtaacaaagccaatcaccgtgacaaaatccgtgccagtgactaagcctgtgcccgtcacaaaacccataacggttaccaaactggttactgtcactaagcctgtgcctgtcacaaaacccgtcacagtgtcccgacctattgtggtgtccaagcccgtgactgtctcccgcccgatagccatatccagacacacacccccatgtaagatggttctgctcacccgctctgagaataaggctccccgcgcaactggtagaaactctgggaaaaagcgagccgccgatagcttggacacctgcccaattcctcctaaacaggctcgcccggagaacggcgagtacgggccctccagtatgggacaatctagcgcattccagctgtccgccgatacatcgtccgggtccctgtccccaggctcccgtcctagcgggggcatggaagccttgaaagcggccggccctgcatctccacccgaggaggatccagagaggactaagcaccgaagaaaacagaaaaccccaaagaaattcaccggagagcagccctccatatcaggaacctttggactgaagggactggttaaagctgaagacaaggcccgcgtgcatcgctctaagaagcaggagggcccaggacccgaggacgcgcggaagaaagtgcccgccgcaccaatcaccgtgtccaaagaggcgccagctccagtagcccaccccgccccaggaggcccagaagagcaatggcaacgggctatccatgaacgaggcgaagcagtgtgccctacatgcaacgtggtgacaagaaagactctagtcgggttaaagaagcatatggaggtatgtcagaaactccaagacgcgttaaagtgccagcattgcagaaagcagttcaagagtaaggccggactcaactatcacacaatggcagagcattcagccaagccgtccgatgccgaagcctccgagggcggggagcaggaggagcgcgaaagactaagaaaggtcctgaagcagatgggaagactgagatgtccacaggaagggtgtggtgctgccttctcgtcattgatgggctaccagtaccaccagcgacggtgtggcaaaccgccttgcgaggtggattctcctagctttccttgtactcactgcggcaaaacatatcgctcgaaagccggccacgattaccacgtcaggtcagagcacaccgcccctccaccagaggaacctaccgacaagagccccgaggccgaagacccactcggagttgaaaggaccccctctggccgggtccgaaggacctccgctcaggtggctgtgtttcatctgcaagagattgcagaggacgaactggcacgggactggactaaacgccgaatgaaggatgatttagtgcctgaaaccgcccggctgaattatacccgtccagggttgccgacacttaacccccaactcttggaagcctggaaaaacgaagtgaaagagaaaggacatgtcaattgccctaatgactgctgcgaggccatttattcctccgtgtcaggcctgaaggcccatctggcaagttgtagcaagggtgctcaccttgccggtaagtacagatgtctactgtgcccgaaggaattcagctccgaatcgggtgtgaagtatcacatcctgaagacccacgctgagaactggtttcgaacatccgccgatccaccaccgaagcaccgcagtcaggattccctagtcccgaagaaagaaaagaaaaagaacttagcagggggaaaaaagcgcggcaggaaacctaaagagagaactcccgaagaacccgtggctaagctgcctccacggcgggatgattggccacctgggtgcagggacaagggggccaggggttcaacaggacggaaggtgggagtcagcaaagctcctgagaagtag

SEQ ID NO: 205261 - DNA, 2679 bp, Artificial Sequence
  derived and/or modified sequence
atgaccgaccccttctgcgtgggcggccggcggctgcccggcagcagtaagtcagggcctggaaaggatgggtcacggaaggaggtgcggttgccaatgcttcacgatccccccaaaatgggtatgcctgtggttagggggggccaaacagtcccggggcaggccccgctctgcttcgaccctggctcacccgcttccgataagaccgagggaaagaagaagggacgacctaaagccgagaatcaggccttacgggacattccactctccctgatgaacgactggaaggacgagtttaaagcacactcgcgggtgaaatgccccaattctggatgttggctagagttcccgtctatatatggcttgaaatatcattaccagcggtgtcagggaggggcgatatcagaccggctcgcttttccatgtcctttttgtgaagctgcttttacaagcaaaacccagctggaaaagcaccggatttggaatcacatggaccggcctctcccagccagcaaacctggcccgatctcacgccccgtcactatttctcgaccggttggggtaagtaagcctatcggagtttccaaacctgttaccattggcaagcctgtcggcgtgtcaaagcccatcggcatctctaaaccagtgtcagttggtcgtcccatgcctgttaccaaagccatccctgttacccgacctgtgccagtgaccaagcctgtgacagtttcccgaccgatgcccgtgactaaggcgatgcccgtgaccaaacctattactgtgaccaaatccgtcccagtgacaaaacctgtgcccgtcaccaagcccataacagtaaccaagctggtgactgtcactaaacccgtgcccgttactaagccggtcactgtttctagacccatcgttgtgagtaagcctgtgaccgtttccagacccattgcaataagcaggcacactccaccatgtaaaatggtcttgcttactaggtccgaaaacaaggcacccagagcaaccggccgtaacagcgggaaaaagcgtgctgccgactcgttggatacatgccctatcccacctaagcaggcccgtcctgagaacggagagtatggcccctcatctatgggccagtcatcagccttccagctgagcgctgacaccagcagtggctccttgagtcccgggtctagaccctcaggaggaatggaagctctgaaagcagccggcccagccagtccacctgaggaagaccctgagaggactaagcacaggagaaaacagaagacccccaaaaaatttactggcgaacagccatctattagcggcacttttggcttgaagggcttagtcaaagcggaggataaagcaagagtgcaccggagcaagaagcaagaagggccgggccctgaagacgctcgaaaaaaagtccccgctgcacccattaccgtgagcaaggaagcccctgcacctgttgcccatccagctcccggaggacccgaggagcagtggcaacgagccatccatgaacggggcgaggctgtgtgtcctacctgtaacgtagtgacaaggaaaactttagtaggattgaagaagcacatggaagtgtgccagaagcttcaggacgccctgaagtgccagcattgccgtaaacagtttaagtctaaagctggtctgaactatcatacgatggccgaacatagtgccaagcctagtgacgcggaggccagcgaaggcggagaacaggaggaaagggagcgcctgcggaaagtgctcaagcagatggggagactgcgctgcccccaagagggatgcggcgcagctttttccagcctcatggggtatcagtaccatcagcggcgctgcggaaagccgccatgcgaggtcgattccccatcctttccatgtacacactgcgggaagacttaccggtccaaggcggggcatgattaccacgtccgcagcgagcacaccgcccctccacccgaagagcccacggataagagccccgaggcagaagaccctttgggtgtagaacggacaccttctggtagggttaggcggacatcggcccaggtggctgtgttccacctgcaggaaatcgctgaagatgagctggctcgtgactggaccaaacggcggatgaaagacgaccttgtccccgagaccgctaggctgaactatactcgtcctgggctccccacgctgaacccacagctgctggaggcatggaagaatgaagtcaaagaaaaagggcacgtgaactgtcccaacgactgttgtgaggcaatctactctagtgttagcggactgaaagcccacctcgctagttgttctaagggagctcatctggctggcaaataccgctgcctcctgtgcccgaaggaattttcttctgaaagcggggtaaagtaccacatcctcaagacccatgctgagaattggtttcgcacatctgccgacccacctcccaagcatagaagccaggacagcctcgtgcccaagaaggaaaagaagaaaaatctggccggaggcaagaagcgcgggagaaaaccaaaagagaggacacctgaggaacctgtggctaagcttccaccccgaagagatgactggccaccaggctgccgggacaagggagccaggggaagcaccggtcgaaaggtcggggtatccaaagcaccggagaaatag

SEQ ID NO: 205262 - DNA, 2679 bp, Artificial Sequence
  derived and/or modified sequence
atgacagacccattctgcgtgggtggtcgacggctcccaggctctagtaaatcgggtcccggtaaggacgggagcagaaaggaggtgcgcctgccaatgcttcatgaccctccgaagatgggcatgccagtggttcggggtggtcagaccgtgcctggacaggctcctctctgcttcgaccccggatcccccgctagtgataaaactgaaggtaagaagaaggggaggcccaaggccgagaaccaagctctacgcgacattcctctcagtctgatgaatgactggaaggatgagtttaaagcccattctagagtcaagtgtcctaacagcggctgctggttggagttccctagtatttacggcttgaagtaccattatcagaggtgccaaggcggtgcgatctccgatcggctggcttttccttgccctttttgcgaggcggctttcacatcaaaaacccagttggagaagcataggatatggaatcatatggaccgccctttgcctgcctcaaaacccggacctatcagtagacccgtgacaatcagtagacccgtgggcgtctcgaaacccatcggagtgtctaagcctgtcactatcgggaaaccagtcggcgtttccaaaccaattggaatttccaagccagtcagtgtgggaagacccatgcctgtgaccaaggctattcccgtgactcggccagtgcccgtcactaagccggtcaccgtatctcggccaatgcctgtgaccaaggccatgcccgtaacaaaacccattacagtgacgaagagcgtgcccgtcaccaagcctgtgcccgtcacaaaacccattaccgttacaaaactggtaactgtgaccaagccggtgcccgttactaaaccagtaaccgtttcaagaccaattgtggtctcaaagcctgttaccgtttcccgccctattgccatttcgcggcatactccaccttgcaaaatggtgctgttaacccggtccgagaacaaagcgcctcgcgctaccggaaggaacagcggtaaaaaacgggctgccgattctctcgatacctgtcccatccctccgaaacaagcacggccagagaatggggagtatggcccatcgtccatgggccagagctccgcattccaacttagtgcagatacttccagtgggtccctcagtccaggttcacggccttccggcggtatggaggcactgaaagctgccggtccagcttctcccccagaagaagatcccgaaagaactaagcatcggcgtaagcagaaaacacctaaaaagtttacaggagagcagccctcaatcagtgggacgttcggtctgaagggcttagtcaaggccgaggacaaggcacgtgtacaccggtctaaaaaacaggaggggcctgggccagaggacgcaaggaaaaaagttccagccgctccaattaccgtctctaaggaagctccagccccagtggctcacccagcccctgggggacccgaagaacaatggcagcgcgcaatccacgagaggggggaagcggtctgccctacttgcaatgtggtcactcgcaaaacactggtgggacttaagaagcacatggaagtttgtcaaaagcttcaggatgccctgaagtgccagcattgccggaaacagtttaagagcaaggctgggctgaactatcatacaatggcagaacattccgccaaaccttccgatgcggaagcctccgaaggcggagagcaggaggagagggaaaggctgaggaaggtactcaaacagatgggccgattgcgctgtcctcaggagggctgtggcgcagctttctcctcactgatgggttaccagtatcaccaaaggaggtgtgggaagccgccttgcgaagtggatagcccatcctttccatgtacacactgtggaaagacttaccgttccaaagcagggcacgattatcatgtccggtctgaacatactgcgcctccccctgaggagcctaccgataaatcccctgaggcagaggatcccctgggtgttgagaggaccccatctggcagagtgcgtcgaacatcagcccaggtcgcagtcttccacctccaggagatcgccgaggacgagcttgccagggactggaccaagcggaggatgaaagatgatctagtaccggagacggcccgactaaattatacccgcccaggactgccgacattgaaccctcagctgctggaggcgtggaagaacgaggtaaaagagaaaggccacgtgaactgccctaatgactgttgtgaggccatttactcctctgtttctggcctgaaagcccatctggcttcctgttccaagggggcacacttagccggaaagtacaggtgtctcttatgtccaaaggaattcagtagcgaatccggagtgaagtaccatatactgaagacccacgctgagaattggtttcggacctccgcggatcctcctccaaagcatagatcacaggattccctagtgcccaaaaaagagaagaaaaaaaatctggcagggggtaagaaaaggggaagaaaacccaaggagaggacccccgaagagcctgtagcgaaactcccgcctcgccgagatgattggcctcccggttgtcgtgataagggtgcacgaggctccacaggcagaaaggtgggcgtctcaaaggcccctgagaagtag

SEQ ID NO: 205263 - DNA, 2679 bp, Artificial Sequence
  derived and/or modified sequence
atgaccgaccccttttgtgtggggggacgcagactcccgggatcatccaaaagcggacccggaaaggatggatcaagaaaagaggtgcgccttccaatgctgcacgatccccctaaaatgggcatgcctgttgtgcggggaggccagaccgtgcctggacaggcacctctctgcttcgaccctggcagcccagcttcggataaaacagaaggaaaaaaaaagggaagaccgaaggcggagaaccaagccctacgggacatccccctttctttgatgaatgattggaaggacgagttcaaagctcactccagggtgaagtgtccgaacagtggctgttggctggagtttccttccatatatggactcaaataccactaccagaggtgccagggcggtgccattagtgataggttagcctttccctgcccattctgcgaggccgcttttacttcaaagacacagctggaaaaacacaggatctggaatcacatggatcgacctctgcctgcctccaagcctggccctatctccaggccggtgacaatttctcgtcccgtaggcgtttccaaacctataggagtgagtaagcctgtgactattggcaagcccgtgggggtaagtaaacctatcgggatttctaagcccgtgagcgtgggtcgacctatgcctgtcactaaagcaataccggttaccagaccagtacccgtgacaaagcctgtaacggtttcccgtccaatgccagtcactaaggccatgcccgtgactaaaccaatcaccgtgacgaagagtgtccccgtgaccaagccagtgcccgttacaaaaccaattaccgtgacgaagctggtcacagtgacaaaacccgtccccgtcaccaagcctgtcacagttagtaggcccattgtagtgtccaagccagtgactgtatctagacctattgcaatatcgagacacacgcctccctgtaagatggtcttgctaacacgctcagagaacaaagcacccagggctacgggcaggaactcaggaaaaaaacgggctgctgacagtctggacacatgtccgatccctcctaagcaggcaaggcccgagaacggagaatacggaccaagctcgatggggcagtccagtgcgtttcagctctcagctgatactagctcaggttctctctcacctggaagcagacccagcgggggaatggaagctctgaaggccgctggtcccgcaagcccacccgaggaagaccctgagagaactaagcatcggcgtaaacaaaaaactccaaagaaattcaccggagaacagccaagcatctccggtactttcggactgaagggcctggtgaaggcagaagataaggcgcgtgttcaccgatctaagaagcaggaaggcccaggacccgaggatgctagaaaaaaggtccccgcagcccctatcaccgtctctaaggaagccccagcacccgttgcccacccagctccgggaggaccagaagagcagtggcaacgtgcaatacacgaaagaggggaggctgtttgccccacctgtaatgtagttactcgcaagactttagttggtctaaaaaaacatatggaagtttgccaaaagctgcaagatgccctgaaatgccagcactgcaggaaacagtttaagagcaaagcaggtctgaactatcatacaatggctgagcactcggcaaaacccagtgatgcggaggccagtgaagggggagagcaggaggagagggagagacttcggaaggtactgaaacagatgggcaggctgcggtgcccacaagagggatgcggcgctgcattctctagtttgatggggtatcaatatcatcagcgtagatgtggtaaacccccttgcgaggtggacagccccagctttccctgtactcattgtgggaaaacctaccgctccaaggccggacacgattaccacgtgaggtcagagcataccgccccaccccctgaagaaccaacagacaaaagccctgaagccgaagacccactgggcgtggagcgtactcccagcggacgtgtgagacgaacatctgcccaggtggctgtcttccatctgcaggagatcgctgaggacgagttagccagagattggaccaaacgcagaatgaaggatgacttggtgcccgagactgccagacttaattatacaagacctggactgccaaccctcaacccccagctgttagaggcctggaagaatgaagtgaaagaaaaaggtcatgtcaattgtccaaatgattgttgtgaagccatatactcctctgtaagcggcctgaaggcacacctcgcttcatgttctaaaggagctcacctcgcgggaaagtatcgatgtctgctgtgtcctaaggaattttcctctgagagcggcgttaagtatcatattttgaaaacacatgccgagaattggttcagaacaagcgccgatcctccacccaagcacaggagccaagattctctggttcccaaaaaagaaaagaagaagaacctcgctggcggaaaaaagaggggtcggaagcccaaagaacggacacccgaagagcctgtagcaaagctcccccctcgccgtgacgattggcccccaggctgtcgtgacaaaggcgctcgcggatctaccgggaggaaggtcggagtctcaaaggctcctgaaaagtag

SEQ ID NO: 205264 - DNA, 2679 bp, Artificial Sequence
  derived and/or modified sequence
atgacagatcctttttgtgttggagggcggcgactgccaggcagtagcaagagcggccccggcaaggacggtagtaggaaagaagttaggcttcccatgctgcacgaccctccgaaaatgggtatgcccgtcgtgcggggaggacagaccgtgcccggccaggcacccctgtgttttgatcctggatcgcccgcatctgataaaactgaaggtaaaaagaagggaagaccgaaagctgagaaccaagctctgagagacatcccgttgtcgctgatgaacgattggaaggacgagtttaaagcacacagtagggtgaaatgtccaaactctggatgttggcttgaatttccaagcatttacgggctcaaataccattaccagagatgtcagggtggtgctattagcgacagactagcattcccctgccccttttgcgaagctgcatttacctctaagacccaactcgagaagcaccgtatatggaatcatatggacagacctctcccagctagcaagcccggtccaatatcacgcccagttaccatctccagaccagtgggtgtgagtaaaccaatcggggtgtcgaagcccgtgacaattgggaaacctgtcggcgtgtcgaagcccattggtatctctaagcccgtgtctgtgggaaggcctatgccggttacaaaggccattcctgtgacaaggcccgtgccggttactaagccggtaacggtatcaagacccatgcccgttacaaaggcaatgcctgtgaccaaaccaatcacagtgactaaaagcgttcccgtgacaaaaccagttcccgtgactaaacctatcaccgtgaccaagctcgtgactgtgacaaagcccgtgcccgtcactaagcctgtgacggtatctcggcctatagtcgtgtccaagcctgtgacagtgagccggccgatagccatcagtagacatactcctccttgtaaaatggtgttgttgaccaggtctgaaaacaaggcccctcgcgcaacaggaagaaattcgggaaagaagcgcgcagccgattctttggacacgtgtcccatcccccccaagcaggcacggcctgagaacggcgaatacggtcccagctccatgggtcagtcttccgcctttcagctcagtgctgacacctcatccggcagtttgtccccaggctcaagacccagtggtggcatggaagctctcaaggcagcaggacccgccagtcctccagaggaggatccagaacggaccaagcatagaagaaaacagaagaccccgaagaaattcactggcgagcagccaagtatcagcgggacgttcggcctcaagggactggtaaaggccgaagataaggcacgagtgcaccggtctaaaaagcaggagggccctgggccagaggacgctcgaaagaaggtgcctgcagcccccataacggtgagcaaagaggcacctgcccctgtggcccatcccgctccaggtggtcctgaagaacagtggcaacgcgcgatccacgaacggggggaggctgtgtgtcccacctgtaacgtggtcactaggaaaaccctggtggggcttaagaagcatatggaagtgtgtcagaaattgcaggacgcccttaagtgtcagcactgcagaaagcagtttaaaagtaaggcaggactgaattatcacactatggccgagcactctgcaaaaccatccgacgccgaggcctccgagggaggggagcaggaggaaagggagaggctgcggaaggttctgaaacagatgggccggctacggtgtccccaggagggctgcggtgccgcattcagcagtctcatggggtaccagtaccatcaaaggcgttgcggaaagccgccatgtgaagttgactcaccctccttcccttgcacccattgtgggaaaacctataggagcaaggccggacacgactaccacgtgcggtcagagcacaccgctccacctccagaagagcccaccgacaagagcccggaggcagaagatccactaggggtggaacggaccccctctggcagggtgaggagaacaagtgctcaggtggccgtgttccacctccaggagatcgctgaggacgaactggcccgcgattggacaaaacgtagaatgaaggacgatttagtccctgaaacggcccggctgaattataccaggcctgggctccctacactcaatccgcaattgctggaggcatggaagaatgaagtgaaagagaaggggcatgtcaattgccctaatgattgctgcgaagctatttactctagcgtgtcaggtctgaaggcacacctggcctcttgttctaagggggcccacctggccggcaaataccggtgcctcctttgtcctaaggagttcagcagtgaaagcggggtgaaataccatattctgaagacgcacgctgaaaactggttccgcacatctgctgaccccccccccaaacaccggtcacaggacagcctcgtgccaaagaaggaaaaaaagaaaaatttggccggcgggaagaaacggggcaggaagcccaaggagagaacgcctgaggagccagtcgccaaactgccaccgcgccgtgacgattggccaccagggtgtcgtgataagggcgcacggggctccactggccgcaaggtgggagtgagcaaggcgccagaaaagtag

SEQ ID NO: 205265 - DNA, 2679 bp, Artificial Sequence
  derived and/or modified sequence
atgaccgaccccttctgcgtgggcggccggcggctgcccggcagcagtaagtccggacccggaaaagatggatctaggaaggaggtccgtctgcctatgcttcacgatccccctaaaatgggtatgcccgtggtcaggggcggccagaccgttcctggccaggctccgctgtgcttcgacccaggtagccctgcctccgataagaccgaagggaaaaagaagggaagacccaaggcggagaatcaggccctgcgtgacattcccctgtccttaatgaacgactggaaggatgaattcaaggcacacagccgagtgaaatgtccgaatagcggctgttggcttgagttcccctccatttacggactcaagtatcattatcagcggtgtcagggcggagctatctctgacaggctggcctttccctgcccattttgtgaggccgcatttacctcaaaaacccagctagaaaaacaccgcatttggaatcatatggaccgcccactgcccgcctctaagcccgggccaatctcccgacccgtgactatttccagaccggtgggcgtgagcaagccaattggggtctccaagcctgtcaccatcggaaaaccagttggggtgagcaagcccattggcatcagcaagccagtcagcgtcggtagaccgatgccagttaccaaggccataccagtaactcggccagtgcctgttacaaagcctgtcactgttagcagacctatgccagtcaccaaagctatgccagtgacgaagccgatcactgtgactaagtcagtgcctgtgacaaagcccgtgccggttacaaaaccgataaccgtgactaagcttgtgaccgtcacaaagcccgtgccagtgactaagccggtcaccgtctccagaccgattgtggtaagtaagcccgtgaccgtctctcggcctattgccatctccagacacacaccgccgtgtaaaatggtcttactgacacggtctgagaataaagccccgcgcgctacaggaagaaattctgggaaaaagcgagccgccgacagcctagatacatgtcctatacctcccaagcaggccagaccagagaacggggaatacggaccttccagcatgggccagagctccgccttccaactgtccgctgatacctcttccggctcgctgtcccccggatcccggccttccggcggaatggaggctttgaaagcagctggccctgcatctccacccgaggaggatcctgaacgcacgaaacacaggagaaagcagaaaacacccaagaagtttaccggggagcagcctagtatttctggcacgttcggactcaagggcctcgtgaaggcggaggataaggcacgcgtgcatcgcagcaagaaacaagaagggcccgggcccgaggatgctcgaaagaaagttccagcagccccaattactgtgagcaaggaggcccccgcacctgttgcccatcctgcccccggcggcccagaggagcagtggcagcgcgctatacatgagcgaggcgaagcggtgtgccccacttgtaacgtggttacccggaagacactggtggggctgaagaagcacatggaggtgtgtcagaaactgcaggacgcactcaaatgtcagcactgccggaaacaatttaaatccaaagccgggcttaattatcacaccatggccgaacatagcgctaagcccagtgacgcggaagcctcggaaggaggggaacaggaagagagggagaggcttagaaaagtcctgaagcagatgggcaggctccgatgtccccaggaaggctgcggagctgccttttccagcctgatgggctatcagtaccatcagaggcgatgtggaaagccgccatgtgaagtggattcgccatcttttccgtgcacccattgtggaaaaacctacaggtctaaggccggccacgattatcatgtgcggagcgaacatactgcgcctcctccggaggagccaaccgataagtcccccgaagcagaggatccccttggcgtagaaagaaccccctctggccgcgtgcggcgaacatccgctcaggttgccgtgttccacctgcaggaaattgctgaggacgagctcgctcgtgactggactaagcggcgcatgaaagacgatctggttccagagaccgcaagactcaactacactcgtcctggtttgccgaccctaaatcctcaactcctggaagcgtggaagaatgaagtcaaggaaaagggacacgtgaattgtccaaatgattgctgtgaagccatctactcgagcgtgtccggactgaaagcacatctcgcgagctgcagcaaaggtgcacacttggctggtaagtaccgctgtctcctctgtcctaaggaattcagctccgaaagcggtgtgaagtatcatatcttgaaaacacatgccgaaaactggtttcgaacgagtgccgatcccccaccaaagcaccgcagccaggactcgctagtcccaaagaaggagaagaaaaaaaatctcgccgggggcaagaaacgcgggcgcaagccgaaagagagaactcccgaagaacctgtggccaagctgcccccacgcagagatgattggcctccggggtgcagagataaaggcgctcgtggcagcaccggccggaaggtcggtgttagcaaggccccggaaaaatag

SEQ ID NO: 205266 - DNA, 2679 bp, Artificial Sequence
  derived and/or modified sequence
atgacggaccccttctgcgtcgggggaaggcgactgccaggatcttcaaagagcggccctgggaaggacggctccaggaaggaagtcaggttgccaatgttacatgatcccccaaagatgggtatgcctgtagtcaggggcggtcagactgtaccagggcaagctcctctgtgcttcgatcctgggtcacccgctagcgataagacagagggaaaaaaaaaaggccgacctaaggcagaaaaccaagccttaagggatattcctctgagtttgatgaacgactggaaagacgagtttaaagcccattctagggttaaatgtccaaatagcgggtgttggctggagttccctagtatttacgggctaaaatatcactaccagagatgtcagggaggagctatctccgaccggttggcctttccatgtcccttttgtgaagctgcattcacctcaaagactcagctcgagaaacaccggatctggaaccacatggataggccccttcctgcgtcaaagcctgggccaatctcccggcctgttactatttctcgcccagtgggagtgtcaaaaccgattggcgtttcaaagcccgttacaatcggtaaacctgtgggtgttagtaagcccattggtatttctaagcccgtctccgtcgggaggcccatgccagtgacaaaagcaattccagtcacaaggcccgtgcccgtgaccaagccagttaccgtgagtagacccatgccagtcacaaaggcgatgcccgttaccaaacccattactgttacaaaatcggtgccagtaacaaaacccgtgccggtgaccaaacccatcactgtgaccaagctcgtgaccgtgacaaagccagttcccgtcacgaagcccgtaaccgtgtcacgtcccatcgtggtgtctaagccggtaactgtctcccgcccaatcgcgatatctcgtcacacccccccttgtaaaatggtcttgctcactagatccgagaacaaagcgcctagggccacagggcgaaactctggcaaaaaacgcgcagctgactcccttgatacatgtccaatccccccaaagcaagcaaggccggagaatggcgaatacggaccaagcagcatggggcaatcgtccgccttccagctgtccgccgacacctcatctggttcactctcacccggatcaaggccatctggtggtatggaagccctaaaggcagcaggtcctgcttcaccaccagaggaagaccctgagcgcacgaaacacagacgcaaacagaaaacccccaagaagtttactggggaacaacccagtattagtgggacatttggcctgaagggacttgtgaaagccgaggataaagcgcgagtacatagatccaagaagcaggagggccctggccctgaagatgcacgcaaaaaagtccccgctgcccctatcacagtgagcaaggaagcaccggctcctgttgctcatccagcacccggtggccctgaagaacagtggcagcgcgctatccacgagcggggagaagctgtctgcccaacctgcaatgttgttaccaggaaaactctggtgggcctgaagaagcatatggaggtatgccagaaactccaggatgctctcaaatgtcagcactgccggaagcagtttaaatccaaggcaggcctgaactaccacaccatggctgagcattcggccaagccaagtgacgccgaagcctctgaggggggtgaacaagaagagcgtgaaaggctgcgcaaagtgctgaagcaaatgggccgtttgcgttgtccacaggaaggctgcggggcagcgttttcatcattgatggggtaccagtaccaccaaaggagatgcggaaaacccccatgtgaagtggacagtccaagctttccatgcacgcattgcggcaagacatatcggagtaaggcagggcatgattatcacgtccggtctgaacacaccgcccctccccctgaagaaccaactgataagtctcccgaagcagaggacccccttggtgtcgagagaaccccctcaggacgtgtccgtcgcactagcgcccaagtggcggtcttccatctgcaggaaattgcagaagatgagttggcaagggactggactaaaaggaggatgaaggacgatctcgtgccagagactgccaggttgaactacactcgaccaggactgcccactctaaacccacagcttctcgaagcttggaagaatgaggtgaaggaaaaaggccacgttaattgccctaatgattgttgtgaagctatatattccagcgtgagtgggcttaaggcacacctggcctcctgtagcaaaggggcacatctggcaggcaaatatcgttgcttgctgtgccctaaagaattttcatcagagtccggggttaaataccacatcctcaagacccatgccgaaaactggttcaggaccagcgccgatcccccacctaagcacagatcccaggatagcctcgtcccgaaaaaggagaaaaaaaagaatttggctggcggaaaaaaacggggacgcaagccaaaggagcgcacgcctgaggaacctgtagcaaaactgccacccagacgcgatgactggcctccgggatgcagggataagggcgctcggggtagcactggacgcaaggtcggggtctcaaaggcccctgaaaaatag

SEQ ID NO: 205267 - protein, 529 aa, Artificial Sequence
  derived and/or modified sequence
MRRNSSLSFQMERPLEEQVQSKWSSSQGRTGTGGSDVLQMQNSEHHGQSIKTQTDSISLEDVAVNFTLEEWALLDPGQRNIYRDVMRATFKNLACIGEKWKDQDIEDEHKNQGRNLRSPMVEALCENKEDCPCGKSTSQIPDLNTNLETPTGLKPCDCSVCGEVFMHQVSLNRHMRSHTEQKPNECHEYGEKPHKCKECGKTFTRSSSIRTHERIHTGEKPYECKECGKAFAFLFSFRNHIRIHTGETPYECKECGKAFRYLTALRRHEKNHTGEKPYKCKQCGKAFIYYQPFLTHERTHTGEKPYECKQCGKAFSCPTYLRSHEKTHTGEKPFVCRECGRAFFSHSSLRKHVKTHTGVQPYTCKKCGEAFKSSSSCEVHERTHFGEKPYECKQCGKAFNSSSYLQLHERVHTGEKTYECKECGKAFLYSTHFRIHERTHTREKPYECKQCGRVFIYFSHLRRHERSHTGVKPCECKQCGKAFTCLNSLKVHKRIHTGERPFQCRQCGKAFSYSKSLHVHERTHSRQKP

SEQ ID NO: 205268 - DNA, 6098 bp, Artificial Sequence
  derived and/or modified sequence
agatctcgcttccgccggtgggacggaactggtgccctccgtggacaattgtgttgaagcagaaattgttccggatctcgggtcggacacggaagtcttcctgcagtgtttctggatgcggggacagggatgcgcaggaattccagtctcagtttccagatggagcgacccctcgaggagcaagtccagagcaagtggtcgtctagtcaaggccgcacaggaacaggagggtctgatgtcctccagatgcagaacagtgaacaccatggacaaagcatcaagactcaaactgactccatctcccttgaggatgtggctgtgaacttcaccctggaggagtgggctttgctggatcctggccagaggaatatctacagagatgtgatgcgggcaaccttcaagaacctggcctgtataggggaaaaatggaaagaccaggatattgaagatgaacacaaaaaccagggaagaaatctaagaagtcctatggttgaagcactctgtgaaaataaagaagattgtccatgtggaaaaagcactagccagattcctgatcttaatacgaacctggaaactcctactggattaaaaccatgtgactgcagtgtgtgtggggaagtcttcatgcatcaggtctcccttaataggcacatgagatctcacactgaacagaaaccaaatgagtgtcacgaatatggagagaagccacataaatgcaaagaatgtgggaaaaccttcactcgcagctccagtattcgaacccatgaaagaattcacactggagagaaaccctatgaatgtaaggaatgtggcaaagccttcgcatttctcttttcctttcgaaaccatataagaattcatactggagagacaccctatgaatgtaaggaatgtgggaaggcattcagatatctcactgctcttcggcgccatgaaaaaaatcacactggagagaaaccctacaaatgtaaacagtgtggaaaagcctttatatattaccagccttttctaacccacgaaaggactcacactggagagaaaccttatgaatgtaagcaatgtgggaaagccttcagttgtcccacgtacttacggagtcatgagaaaactcatactggagagaaaccttttgtatgtagggaatgtgggagagccttcttttctcactcaagccttcgaaaacacgtgaaaacccacaccggagttcaaccttatacatgtaagaaatgtggggaagccttcaagtcatctagttcctgtgaagtgcacgaaagaactcattttggagaaaaaccctatgaatgtaaacaatgtggtaaagccttcaattcttcaagttaccttcagttgcacgaaagagttcacactggcgagaaaacttacgaatgtaaagaatgtggtaaagcctttctttattccactcactttcgaatccatgaaagaacccatactagagagaaaccctatgaatgcaaacagtgtggtcgggtcttcatttacttcagtcaccttcgaaggcacgaaagaagtcacactggagtgaaaccatgtgagtgtaagcagtgtggcaaagctttcacttgtttaaattccctgaaagtacacaaaagaattcatactggagaaagaccctttcagtgtagacaatgtggtaaagccttcagttactcaaagtctttgcacgtgcacgaaaggactcatagtagacagaagccctaagaaagtaaagtgtggtaatgctgtcagttgtattagttccttttggatgtatgagagtacttacgctggagagaaattcaaggaatgtaaacggtgtgattaagccttcagttgtcctaattccctttgaagacgtgactcatgcggcaatgaaatatttaacaaatgggggaggaacttgcactctcctgcgggattgcagatatgtgaatggactccatggacagaaaagctacgaatgtatggagtgtaggaaagccttcacttcacgtaatcttttaaagacacctgagaatatatactggagagaaactataaagaaaattctatatccatcccatcttttgtggggtttgttttttgtttttgtttttgttgagatgtaattttgctcttgttgcccaggctggagtgcagtggtgcgatcgcggctcaccgcaacctccgcctcccggattcaagcaattctcctgccgcagcctcccaagaagctgggattacaggcatgcgccaccacgcctggctaattttgtaattttagtagagatggggtttctccatgttggtcaggctggtctcaaactcctgacctcaggtgatctgcctgcctcggcctcccaaagtgctgggattacaggtgtgagccacagcacccaacctttttttccccgccgcaccccaagatggtgtctcactctgttgccccaggctggagtgcagtggtgtgatcctggctcactgtaacctctgggttcaagcaattcttctgcctcagccttccaagtagctgggattacaagtgcccaccaccatgcccagctaatttttatatttttagtagagacagtgtttcaccatgttgaccaggctgatcttaaactcttgacctcaaatgatccacccaccttggcctcccaaattgttcgttttacttttttttttttttttttttgagctggagtcttactctgttgcctaggctggagtgaaagtggcgcaacctctgcctcccaggtcaaagcaatcctgcctcaggccccctagtagctggcattacaggcacatgccaccacgcccaactaatttttatatttttagtagagacggggtttcaccatgttggccaggctggtcttgaactcctgacctcaggtaatccacctgccttggcctcccaaagtgctgggattacaggcgtgagccaccacacccggcccccagttctttttttttttttttgagacggagtccttgcccaggctggagtgcagtggcgcgatctcagctcactgcaagctccgcctcctgggttcacgccattctcctgcctcagcctcccgagtagctgggactacaggcgcccgccaccacgcccggctcattttttgtatttttagtggagacggggtttcaccgtgttagccaggatagtcttgatctcctgacctcgtgatccgccctcctcggcctcccaaagtgctgggattataggcgtgagccaccgcgcccggcctccagttcattttaaaaccatgaaaccacccacactggagagccaccttcttaaatgtaagcaatatgggaacatcttcaatgacatctgcaaccattgtcgagattcttcgtaggaagaattaaaggaatggggaagaaggacttgggccccagcaggccttttgtggcatccagtcagaagttaggaaacaccctctagggcagtgcctgccctcagctctcacacatgactggagagaagtgagaagactcccagaatctgccttttaagtttccatcagtgtcctcgggtcagactgtgggaatgctgtacttctaagacaaaggttcgcatcttacagtttttccccaagtgggatctgcctatgcacatcctaattcacagacattgtcagcattgcattattccagggctgttttgaggtcatctccagctccatttcccatctcaaacctacactttggacacttgtttaaacattcacatctgaatttctctgtggcaaccgcaggtggctctgaggtgagagactgaagaagcagagcctgtatcatgggacacacaccccttgaccacacagcatccactctcctgcggttaccagccctgcaccaaccaccacagtcagaataatctcaaaactgctagtggagtcacagacacactctgccatgtcttagctgtaggacactcagaattcttacctcccctaacttgctttccctgttttctggcacattctaccctgagatattcagcggcatatgcactgatgatgctccggccttctcacgtcagtgcatgtcacatgcatcctgctccaggactggtttcctagcctcccgctaagactagcacttagctcttcttggaaaaggacccaccctgcagcgctccagctctgttgtgtatgggaggtgctggtgtcagggttcacaagccatggaactaccttgcttcacatcacaaggcaaggtgaactcaactcccaataaactgcttgctggagcctccgaattctccgttttctgaattgcataggcacgataggggtcgggtctgtcctttgttggagtcagtccccccttttcttagcaagtcagtgtgttttagaagggaggtggcagcattgagggaaaccaggtcaccatccaccctcgtaacaacagtctccctgggtgggtcccagaagtgatctttgtgtcgctcgggtcggaactctttaggcctctggcctccaccctcccccaacagcagggatgggtcaggtggcagcatccaaaaccacggtgaagatactagggtccagaggccgactggagcaaggtttgctggcagatgaggcctcagtggaagtgacggctactgtggagatgcagtggaggacctggtggctgagccaggagatgcacaccttcgcttctctcaccaggaacattcgcttctctcaccaggaacatttatggtagtatgaggggttggaacattattactcaacccatttcaggtcctttcacattcttgagctgccatgttgtgcttttgtagagagatgattattgtactgtgggaggtcaggaagttcgagattccttcactgtcagaatgggctcaaggagccatcttttgtgataggtattggggaactaaggggtatctctgctacaggaatgggagtgagaacattcactttttgaaggacaagtatatgtgggtctatgatgatgtttttgtaaaacccttttgtgtatgtgtctgtgtgagtcctaatattcagtaagtattttcctctgtgtaactccctctaataggtgtagtcaacaaagctgtgctaatatctctgtccccttgatcctggcattctggaagacacgaaagcaagcaaggatatataaggcactgtggtggttattcccgaggagccagagaaacctggagaagagatcagaacacctggggtccttctatttgggagaatcttttagtatctgggctgttacacctgtgggtttgtgaatttgtgtctgtccacctgtatgtacagtgataacgtgtgtgatttttgtatatttgtctagagggctgtgtgtatatatatttatatatatttttaaatatggaatgcttttaggtttttttttttttttttttttttgagatggattctcactgttgccaggctggagtgcagtggcacaatcttggctcactgcaacctccacttctcaggttcaagcaattctcctgcctcagcctcctgagtagctgggactataggcgcgtgccaccacaaccagctaaatttttttgtatttttagtagagatggggtttcaccatgttgaccaggatggtctcaatctcctgaccttgtgatccacccacctcggtctccccaaagtgctgggattacaggcgtgagccactctgcctggctggttattttgtttgtttgttgtttttttgagacacagtctcgctctgtcaccaagctggactgcagtggcatgatctcggctcactgcaatctctgcctcccaggttcaagcaattctcctgtttcagcctcctgagtagctgggattacaggcgcgtgccaccataccgagctagtttttttatttttagtagagacggggtttcaccatgttggccaggatggtctcgccctcctgaccttgtgatctgcctgcctcggcctctcaaagtgctgggattagaggcttgagccaccaggcccggctggaatgcttgcattttcttgcctgatttccctgggagcaccccccttaacactgaatggagctggtgagagcaaatatccttgtttctgatattagatattaaaaatatggtttttcacc

SEQ ID NO: 205269 - DNA, 1590 bp, Artificial Sequence
  derived and/or modified sequence
atgagaagaaacagcagcctgagcttccagatggagagacccctggaggagcaggtgcagagcaagtggagcagcagccagggcagaaccggcaccggcggcagcgacgtgctgcagatgcagaacagcgagcaccacggccagagcatcaagacccagaccgacagcatcagcctggaggacgtggccgtgaacttcaccctggaggagtgggccctgctggaccccggccagagaaacatctacagagacgtgatgagagccaccttcaagaacctggcctgcatcggcgagaagtggaaggaccaggacatcgaggacgagcacaagaaccagggcagaaacctgagaagccccatggtggaggccctgtgcgagaacaaggaggactgcccctgcggcaagagcaccagccagatccccgacctgaacaccaacctggagacccccaccggcctgaagccctgcgactgcagcgtgtgcggcgaggtgttcatgcaccaggtgagcctgaacagacacatgagaagccacaccgagcagaagcccaacgagtgccacgagtacggcgagaagccccacaagtgcaaggagtgcggcaagaccttcaccagaagcagcagcatcagaacccacgagagaatccacaccggcgagaagccctacgagtgcaaggagtgcggcaaggccttcgccttcctgttcagcttcagaaaccacatcagaatccacaccggcgagaccccctacgagtgcaaggagtgcggcaaggccttcagatacctgaccgccctgagaagacacgagaagaaccacaccggcgagaagccctacaagtgcaagcagtgcggcaaggccttcatctactaccagcccttcctgacccacgagagaacccacaccggcgagaagccctacgagtgcaagcagtgcggcaaggccttcagctgccccacctacctgagaagccacgagaagacccacaccggcgagaagcccttcgtgtgcagagagtgcggcagagccttcttcagccacagcagcctgagaaagcacgtgaagacccacaccggcgtgcagccctacacctgcaagaagtgcggcgaggccttcaagagcagcagcagctgcgaggtgcacgagagaacccacttcggcgagaagccctacgagtgcaagcagtgcggcaaggccttcaacagcagcagctacctgcagctgcacgagagagtgcacaccggcgagaagacctacgagtgcaaggagtgcggcaaggccttcctgtacagcacccacttcagaatccacgagagaacccacaccagagagaagccctacgagtgcaagcagtgcggcagagtgttcatctacttcagccacctgagaagacacgagagaagccacaccggcgtgaagccctgcgagtgcaagcagtgcggcaaggccttcacctgcctgaacagcctgaaggtgcacaagagaatccacaccggcgagagacccttccagtgcagacagtgcggcaaggccttcagctacagcaagagcctgcacgtgcacgagagaacccacagcagacagaagccctag

SEQ ID NO: 205270 - DNA, 1590 bp, Artificial Sequence
  derived and/or modified sequence
atgaggaggaacagctccctctcttttcaaatggaaaggccgctggaggagcaggttcagtccaagtggtctagcagtcagggaaggaccggtaccggcggcagcgatgtgctgcaaatgcaaaattcagaacaccacgggcagagcattaagactcagactgatagcattagccttgaggacgtggccgtgaactttacactggaagaatgggcattactggatccgggacagcggaatatctacagggatgtgatgcgtgccacattcaaaaatttggcttgtattggcgagaaatggaaggatcaggatattgaagatgagcacaagaaccagggccgcaatctgcgcagccctatggttgaagccctctgcgagaataaggaggactgcccctgtggaaagtctacctcacagatccccgatctgaatactaacctggaaaccccgacaggcctgaagccctgcgactgcagcgtatgcggagaagttttcatgcatcaggtgtctcttaatcgccatatgagaagtcatacagaacagaagccaaacgagtgccacgaatatggagagaagccccataaatgcaaggagtgcgggaaaactttcaccagatcatctagcatcaggacccacgagaggatccacaccggcgaaaagccatacgagtgtaaggaatgcggcaaagccttcgctttcctgttttcattccgtaaccacatccggatccataccggtgagactccatacgaatgcaaggaatgtggcaaggcctttaggtatttaacggccctgagacgccacgaaaagaaccacaccggtgagaaaccctataaatgtaaacagtgcgggaaggccttcatatattatcagcccttccttacacacgaaagaactcatactggggagaaaccctatgaatgtaagcagtgcggcaaggccttctcatgcccaacctacctgcgcagccatgaaaagacccatactggagagaagccattcgtctgtcgcgagtgcggtagagcatttttttcccactcatctttgcgcaaacacgtgaaaacccacactggcgtccagccatatacctgcaaaaaatgcggggaggcgttcaagagctcctctagctgtgaagtacacgaacgcacccacttcggggagaagccatatgagtgtaaacagtgtgggaaggccttcaattcttcctcttatttgcaactgcacgagcgcgtccacaccggggaaaagacctacgaatgcaaagaatgtgggaaggccttcttatattctactcactttagaatacacgagcgaactcatacccgtgagaagccttatgagtgtaaacaatgcgggagggtgttcatctatttcagccatctaagacggcatgagcggtctcacacaggcgtcaagccttgcgagtgcaaacagtgcggcaaggcctttacctgcctgaacagtctcaaagtccataaaagaattcatacgggggagcggcctttccagtgcagacagtgcggaaaggccttctcttattccaagtccttgcacgtccatgagcgcacccactccaggcagaagccgtag

SEQ ID NO: 205271 - DNA, 1590 bp, Artificial Sequence
  derived and/or modified sequence
atgagaagaaacagcagcctgtccttccagatggagcggcccctggaggagcaggtgcagagcaagtggagcagcagccagggccgcacaggcaccggcggcagtgatgtgctgcagatgcagaacagcgagcaccacggccagagcatcaagacccagacagacagcatcagcctggaggatgtggccgtgaacttcaccctggaggagtgggccctgctggaccccggccagaggaacatctacagagatgtgatgagggccaccttcaagaacctggcctgcatcggggagaagtggaaggaccaggacattgaagatgagcacaagaaccagggcaggaacctgcggagccccatggtggaggccctgtgtgagaacaaggaggactgcccctgtgggaagagcaccagccagatcccagacctgaacaccaacctggagacccccaccggcctgaagccctgtgactgcagcgtgtgtggggaggtgttcatgcaccaggtgtccctgaacagacacatgaggagccacacagagcagaagcccaatgaatgtcatgaatatggagagaagccccacaagtgcaaggaatgtgggaagaccttcaccaggagcagcagcatccgcacccatgagcgcatccacactggagagaagccctatgagtgcaaggaatgtgggaaggcctttgccttcctgttctccttcaggaaccacatccgcatccacactggagagaccccctatgagtgcaaggaatgtgggaaggccttccgctacctgacagccctgcggagacatgagaagaaccacactggagagaagccctacaagtgcaagcagtgtgggaaggccttcatctactaccagcccttcctgacccatgagaggacccacactggagagaagccctatgagtgcaagcagtgtgggaaggccttcagctgccccacctacctgcggagccatgagaagacccacactggagagaagccctttgtgtgccgggagtgtggccgggccttcttcagccacagcagcctgaggaagcacgtgaagacccacactggagtgcagccctacacctgcaagaagtgtggggaggccttcaagagcagcagcagctgtgaggtgcatgagaggacccactttggagagaagccctatgagtgcaagcagtgtgggaaggccttcaacagcagcagctacctgcagctgcacgagcgggtgcacactggagagaagacctatgagtgcaaggaatgtgggaaggccttcctgtacagcacccacttccgcatccacgagaggacccacacccgggagaagccctatgagtgcaagcagtgtggccgggtcttcatctacttcagccacctgcggagacatgagaggagccacactggagtgaagccctgtgagtgcaagcagtgtgggaaggccttcacctgcctgaacagcctgaaggtgcacaagaggatccacactggagagcggcccttccagtgccggcagtgtgggaaggccttctcctacagcaagagcctgcacgtgcatgagaggacccacagccggcagaagccctag

SEQ ID NO: 205272 - DNA, 1590 bp, Artificial Sequence
  derived and/or modified sequence
atgcggcggaacagcagcctgagcttccagatggagcggcccctggaagaacaggtgcagagtaaatggtcttcttctcagggccgcacggggactggtggatccgatgtgctgcagatgcagaacagcgaacatcacgggcaatctattaaaacgcaaaccgactccatttctctagaggacgtggccgtgaacttcacactggaagagtgggcgctactggaccccggccagcggaatatctatcgtgacgtcatgcgtgctacgtttaagaacctagcctgtattggggagaaatggaaggatcaagacatagaagacgagcataagaatcaaggacgaaatctgcgctcccccatggttgaagcgttgtgtgagaacaaagaggattgcccctgtggaaaaagcaccagccagatccctgacctgaatactaacctcgagacacctaccggcctaaaaccatgcgactgctccgtttgtggcgaggtatttatgcatcaagttagccttaacagacacatgaggtcccatactgagcagaaacccaacgagtgtcacgaatatggggaaaaaccgcacaaatgcaaggaatgcggcaagacattcactcgcagcagttcaataagaactcatgagaggatccatacaggcgaaaagccttacgaatgcaaggaatgtggtaaggctttcgcatttttgttttcttttcgcaaccatatccgaatccatactggcgaaacgccgtatgagtgcaaagaatgcggcaaagcattcaggtatctgacagctttgcgccgtcacgagaaaaaccatacgggagaaaagccgtacaagtgtaagcagtgtggcaaagccttcatatactaccagccttttttgacccacgagagaacacatacgggtgaaaagccatacgaatgtaaacagtgtggcaaggccttctcttgtccaacctaccttcgatctcatgagaaaactcatacaggtgaaaagccctttgtctgccgggaatgtgggcgtgctttcttctctcacagctcccttaggaaacatgtgaagacgcacactggagttcagccttacacatgcaagaagtgcggagaagcattcaaatccagctcctcttgcgaagtacacgagcgaacgcattttggcgaaaaaccgtacgaatgcaagcaatgcgggaaagctttcaattcctcctcttatctgcagcttcatgagcgtgtacacaccggagagaagacttacgagtgtaaagagtgcggtaaggctttcctctatagcactcactttcgaatccacgaacgcactcatacacgcgagaaaccttacgagtgcaagcagtgtggccgggtgttcatatacttttcacacctgcgacggcacgagaggtctcacactggagtgaagccctgtgaatgcaaacaatgtggcaaggcatttacttgcctgaactcactaaaagtccataaacgcatccatacgggagaaagaccttttcagtgcagacaatgtggaaaagccttctcatacagcaaatcactacatgtgcacgaaagaacacactcgagacagaagccgtag

SEQ ID NO: 205273 - DNA, 1590 bp, Artificial Sequence
  derived and/or modified sequence
atgcggaggaattcctcgctttcttttcagatggaacggcctcttgaagagcaggtgcaaagcaaatggtcctcttcacaaggaaggactggtactggcggatctgatgtgcttcaaatgcaaaattccgagcaccacggtcagtcaatcaagacacagaccgactctatcagcttggaagatgtggccgtcaattttaccctggaggagtgggcattgctggacccgggtcagcgaaatatctacagagatgttatgagggcgaccttcaagaatctcgcctgtatcggggaaaaatggaaagatcaggatattgaggacgaacacaaaaaccaagggagaaatcttagaagccctatggtggaggctctgtgtgagaacaaggaagattgcccctgcggcaagtcaacatcccagatccctgatttaaataccaacttggaaacacccacaggcctgaaaccctgcgattgtagcgtgtgtggcgaagtgttcatgcaccaggtctccttgaacaggcacatgagatcccacactgagcagaaacctaatgagtgtcacgagtacggtgagaagccccataagtgtaaagagtgtgggaagaccttcacaaggtcctcctcaattcggacccatgagcgcatccacacaggcgagaagccctatgaatgcaaggagtgtggtaaagcgtttgcctttctgttcagtttcagaaaccacatacgcatccacaccggcgagacaccgtatgagtgcaaagaatgcgggaaggcctttcgctatcttactgcactccgcagacacgagaaaaaccacaccggggaaaagccctataagtgtaagcagtgcggaaaggcatttatttattatcagccattcttgacacacgagagaacacacacaggcgaaaaaccttatgagtgtaagcaatgtggcaaggcgtttagctgtcctacctacctgcgctcccacgagaaaacccacacaggtgaaaagcctttcgtctgtagggagtgcggaagagcttttttttcacacagctctttgcgaaagcatgtgaagacccacactggagtgcaaccttacacatgcaaaaagtgtggggaggctttcaaatcgtcttcaagttgtgaggtccacgagcgcactcatttcggggagaagccttacgaatgcaaacagtgtggcaaggcattcaatagctcaagctatctccagctgcatgaacgggtgcacactggagagaaaacctacgagtgtaaggaatgtgggaaggcttttctctattcaacacattttcggatccacgagagaacccatacacgcgagaaaccgtacgaatgtaaacagtgcggcagagtgttcatttatttctcccacttgcggaggcatgaacgtagccataccggcgtaaaaccgtgtgagtgcaagcaatgcggtaaggcctttacatgccttaactcccttaaggtccacaagcgtatccacacaggcgaacgaccatttcagtgccggcagtgcggcaaagcctttagctatagcaagagtctgcacgttcatgagcgcacacacagccgacagaagccctag

SEQ ID NO: 205274 - DNA, 4237 bp, Artificial Sequence
  derived and/or modified sequence
cgcttccgccggtgggacggaactggtgccctccgtggacaattgtgttgaagcagaaattgttccggatctcgggtcggacacggaagtcttcctgcagtgtttctggatgcggggacagggatgcgcaggaattccagtctcagtttccagatggagcgacccctcgaggagcaagtccagagcaagtggtcgtctagtcaaggccgcacaggaacaggagggtctgatgtcctccagatgcagaacagtgaacaccatggacaaagcatcaagactcaaactgactccatctcccttgaggatgtggctgtgaacttcaccctggaggagtgggctttgctggatcctggccagaggaatatctacagagatgtgatgcgggcaaccttcaagaacctggcctgtataggggaaaaatggaaagaccaggatattgaagatgaacacaaaaaccagggaagaaatctaagaagtcctatggttgaagcactctgtgaaaataaagaagattgtccatgtggaaaaagcactagccagattcctgatcttaatacgaacctggaaactcctactggattaaaaccatgtgactgcagtgtgtgtggggaagtcttcatgcatcaggtctcccttaataggcacatgagatctcacactgaacagaaaccaaatgagtgtcacgaatatggagagaagccacataaatgcaaagaatgtgggaaaaccttcactcgcagctccagtattcgaacccatgaaagaattcacactggagagaaaccctatgaatgtaaggaatgtggcaaagccttcgcatttctcttttcctttcgaaaccatataagaattcatactggagagacaccctatgaatgtaaggaatgtgggaaggcattcagatatctcactgctcttcggcgccatgaaaaaaatcacactggagagaaaccctacaaatgtaaacagtgtggaaaagcctttatatattaccagccttttctaacccacgaaaggactcacactggagagaaaccttatgaatgtaagcaatgtgggaaagccttcagttgtcccacgtacttacggagtcatgagaaaactcatactggagagaaaccttttgtatgtagggaatgtgggagagccttcttttctcactcaagccttcgaaaacacgtgaaaacccacaccggagttcaaccttatacatgtaagaaatgtggggaagccttcaagtcatctagttcctgtgaagtgcacgaaagaactcattttggagaaaaaccctatgaatgtaaacaatgtggtaaagccttcaattcttcaagttaccttcagttgcacgaaagagttcacactggcgagaaaacttacgaatgtaaagaatgtggtaaagcctttctttattccactcactttcgaatccatgaaagaacccatactagagagaaaccctatgaatgcaaacagtgtggtcgggtcttcatttacttcagtcaccttcgaaggcacgaaagaagtcacactggagtgaaaccatgtgagtgtaagcagtgtggcaaagctttcacttgtttaaattccctgaaagtacacaaaagaattcatactggagaaagaccctttcagtgtagacaatgtggtaaagccttcagttactcaaagtctttgcacgtgcacgaaaggactcatagtagacagaagccctaagaaagtaaagtgtggtaatgctgtcagttgtattagttccttttggatgtatgagagtacttacgctggagagaaattcaaggaatgtaaacggtgtgattaagccttcagttgtcctaattccctttgaagacgtgactcatgcggcaatgaaatatttaacaaatgggggaggaacttgcactctcctgcgggattgcagatatgtgaatggactccatggacagaaaagctacgaatgtatggagtgtaggaaagccttcacttcacgtaatcttttaaagacacctgagaatatatactggagagaaactataaagaaaattctatatccatcccatcttttgtggggtttgttttttgtttttgtttttgttgagatgtaattttgctcttgttgcccaggctggagtgcagtggtgcgatcgcggctcaccgcaacctccgcctcccggattcaagcaattctcctgccgcagcctcccaagaagctgggattacaggcatgcgccaccacgcctggctaattttgtaattttagtagagatggggtttctccatgttggtcaggctggtctcaaactcctgacctcaggtgatctgcctgcctcggcctcccaaagtgctgggattacaggtgtgagccacagcacccaacctttttttccccgccgcaccccaagatggtgtctcactctgttgccccaggctggagtgcagtggtgtgatcctggctcactgtaacctctgggttcaagcaattcttctgcctcagccttccaagtagctgggattacaagtgcccaccaccatgcccagctaatttttatatttttagtagagacagtgtttcaccatgttgaccaggctgatcttaaactcttgacctcaaatgatccacccaccttggcctcccaaattgttcgttttacttttttttttttttttttttgagctggagtcttactctgttgcctaggctggagtgaaagtggcgcaacctctgcctcccaggtcaaagcaatcctgcctcaggccccctagtagctggcattacaggcacatgccaccacgcccaactaatttttatatttttagtagagacggggtttcaccatgttggccaggctggtcttgaactcctgacctcaggtaatccacctgccttggcctcccaaagtgctgggattacaggcgtgagccaccacacccggcccccagttctttttttttttttttgagacggagtccttgcccaggctggagtgcagtggcgcgatctcagctcactgcaagctccgcctcctgggttcacgccattctcctgcctcagcctcccgagtagctgggactacaggcgcccgccaccacgcccggctcattttttgtatttttagtggagacggggtttcaccgtgttagccaggatagtcttgatctcctgacctcgtgatccgccctcctcggcctcccaaagtgctgggattataggcgtgagccaccgcgcccggcctccagttcattttaaaaccatgaaaccacccacactggagagccaccttcttaaatgtaagcaatatgggaacatcttcaatgacatctgcaaccattgtcgagattcttcgtaggaagaattaaaggaatggggaagaaggacttgggccccagcaggccttttgtggcatccagtcagaagttaggaaacaccctctagggcagtgcctgccctcagctctcacacatgactggagagaagtgagaagactcccagaatctgccttttaagtttccatcagtgtcctcgggtcagactgtgggaatgctgtacttctaagacaaaggttcgcatcttacagtttttccccaagtgggatctgcctatgcacatcctaattcacagacattgtcagcattgcattattccagggctgttttgaggtcatctccagctccatttcccatctcaaacctacactttggacacttgtttaaacattcacatctgaatttctctgtggcaaccgcaggtggctctgaggtgagagactgaagaagcagagcctgtatcatgggacacacaccccttgaccacacagcatccactctcctgcggttaccagccctgcaccaaccaccacagtcagaataatctcaaaactgctagtggagtcacagacacactctgccatgtcttagctgtaggacactcagaattcttacctcccctaacttgctttccctgttttctggcacattctaccctgagatattcagcggcatatgcactgatgatgctccggccttctcacgtcagtgcatgtcacatgcatcctgctccaggactggtttcctagcctcccgctaagactagcacttagctcttcttggaaaaggacccaccctgcagcgctccagctctgttgtgtatgggaggtgctggtgtcagggttcacaagccatggaactaccttgcttcacatcacaaggcaaggtgaactcaactcccaataaactgcttgctgga

SEQ ID NO: 205275 - protein, 738 aa, Artificial Sequence [sequence omitted]

SEQ ID NO: 205276 - protein, 738 aa, Artificial Sequence
  derived and/or modified sequence
MKGFKLSCTASNSNRSTPACSPILRKRSRSPTPQNQDGDTMVEKGSDHSSDKSPSTPEQGVQRSCSSQSGRSGGKNSKKSQSWYNVLSPTYKQRNEDFRKLFKQLPDTERLIVDYSCALQRDILLQGRLYLSENWICFYSNIFRWETLLTVRLKDICSMTKEKTARLIPNAIQVCTDSEKHFFTSFGARDRTYMMMFRLWQNALLEKPLCPKELWHFVHQCYGNELGLTSDDEDYVPPDDDFNTMGYCEEIPVEENEVNDSSSKSSIETKPDASPQLPKKSITNSTLTSTGSSEAPVSFDGLPLEEEALEGDGSLEKELAIDNIMGEKIEMIAPVNSPSLDFNDNEDIPTELSDSSDTHDEGEVQAFYEDLSGRQYVNEVFNFSVDKLYDLLFTNSPFQRDFMEQRRFSDIIFHPWKKEENGNQSRVILYTITLTNPLAPKTATVRETQTMYKASQESECYVIDAEVLTHDVPYHDYFYTINRYTLTRVARNKSRLRVSTELRYRKQPWGLVKTFIEKNFWSGLEDYFRHLESELAKTESTYLAEMHRQSPKEKASKTTTVRRRKRPHAHLRVPHLEEVMSPVTTPTDEDVGHRIKHVAGSTQTRHIPEDTPNGFHLQSVSKLLLVISCVICFSLVLLVILNMMLFYKLWMLEYTTQTLTAWQGLRLQERLPQSQTEWAQLLESQQKYHDTELQKWREIIKSSVMLLDQMKDSLINLQNGIRSRDYTSESEEKRNRYH

SEQ ID NO: 205277 - DNA, 2217 bp, Artificial Sequence
  derived and/or modified sequence
atgaagggcttcaagctgagctgcaccgccagcaacagcaacagaagcacccccgcctgcagccccatcctgagaaagagaagcagaagccccaccccccagaaccaggacggcgacaccatggtggagaagggcagcgaccacagcagcgacaagagccccagcacccccgagcagggcgtgcagagaagctgcagcagccagagcggcagaagcggcggcaagaacagcaagaagagccagagctggtacaacgtgctgagccccacctacaagcagagaaacgaggacttcagaaagctgttcaagcagctgcccgacaccgagagactgatcgtggactacagctgcgccctgcagagagacatcctgctgcagggcagactgtacctgagcgagaactggatctgcttctacagcaacatcttcagatgggagaccctgctgaccgtgagactgaaggacatctgcagcatgaccaaggagaagaccgccagactgatccccaacgccatccaggtgtgcaccgacagcgagaagcacttcttcaccagcttcggcgccagagacagaacctacatgatgatgttcagactgtggcagaacgccctgctggagaagcccctgtgccccaaggagctgtggcacttcgtgcaccagtgctacggcaacgagctgggcctgaccagcgacgacgaggactacgtgccccccgacgacgacttcaacaccatgggctactgcgaggagatccccgtggaggagaacgaggtgaacgacagcagcagcaagagcagcatcgagaccaagcccgacgccagcccccagctgcccaagaagagcatcaccaacagcaccctgaccagcaccggcagcagcgaggcccccgtgagcttcgacggcctgcccctggaggaggaggccctggagggcgacggcagcctggagaaggagctggccatcgacaacatcatgggcgagaagatcgagatgatcgcccccgtgaacagccccagcctggacttcaacgacaacgaggacatccccaccgagctgagcgacagcagcgacacccacgacgagggcgaggtgcaggccttctacgaggacctgagcggcagacagtacgtgaacgaggtgttcaacttcagcgtggacaagctgtacgacctgctgttcaccaacagccccttccagagagacttcatggagcagagaagattcagcgacatcatcttccacccctggaagaaggaggagaacggcaaccagagcagagtgatcctgtacaccatcaccctgaccaaccccctggcccccaagaccgccaccgtgagagagacccagaccatgtacaaggccagccaggagagcgagtgctacgtgatcgacgccgaggtgctgacccacgacgtgccctaccacgactacttctacaccatcaacagatacaccctgaccagagtggccagaaacaagagcagactgagagtgagcaccgagctgagatacagaaagcagccctggggcctggtgaagaccttcatcgagaagaacttctggagcggcctggaggactacttcagacacctggagagcgagctggccaagaccgagagcacctacctggccgagatgcacagacagagccccaaggagaaggccagcaagaccaccaccgtgagaagaagaaagagaccccacgcccacctgagagtgccccacctggaggaggtgatgagccccgtgaccacccccaccgacgaggacgtgggccacagaatcaagcacgtggccggcagcacccagaccagacacatccccgaggacacccccaacggcttccacctgcagagcgtgagcaagctgctgctggtgatcagctgcgtggtgagcttcagcctggtgctgctggtgatcctgaacatgatgctgttctacaagctgtggatgctggagtacaccacccagaccctgaccgcctggcagggcctgagactgcaggagagactgccccagagccagaccgagtgggcccagctgctggagagccagcagaagtaccacgacaccgagctgcagaagtggagagagatcatcaagagcagcgtgatgctgctggaccagatgaaggacagcctgatcaacctgcagaacggcatcagaagcagagactacaccagcgagagcgaggagaagagaaacagataccactag

SEQ ID NO: 205278 - DNA, 2217 bp, Artificial Sequence
  derived and/or modified sequence
atgaagggcttcaagctgagctgcaccgccagcaacagcaacagaagcacccccgcctgcagccccatcctgagaaagagaagcagaagccccaccccccagaaccaggacggcgacaccatggtggagaagggcagcgaccacagcagcgacaagagccccagcacccccgagcagggcgtgcagagaagctgcagcagccagagcggcagaagcggcggcaagaacagcaagaagagccagagctggtacaacgtgctgagccccacctacaagcagagaaacgaggacttcagaaagctgttcaagcagctgcccgacaccgagagactgatcgtggactacagctgcgccctgcagagagacatcctgctgcagggcagactgtacctgagcgagaactggatctgcttctacagcaacatcttcagatgggagaccctgctgaccgtgagactgaaggacatctgcagcatgaccaaggagaagaccgccagactgatccccaacgccatccaggtgtgcaccgacagcgagaagcacttcttcaccagcttcggcgccagagacagaacctacatgatgatgttcagactgtggcagaacgccctgctggagaagcccctgtgccccaaggagctgtggcacttcgtgcaccagtgctacggcaacgagctgggcctgaccagcgacgacgaggactacgtgccccccgacgacgacttcaacaccatgggctactgcgaggagatccccgtggaggagaacgaggtgaacgacagcagcagcaagagcagcatcgagaccaagcccgacgccagcccccagctgcccaagaagagcatcaccaacagcaccctgaccagcaccggcagcagcgaggcccccgtgagcttcgacggcctgcccctggaggaggaggccctggagggcgacggcagcctggagaaggagctggccatcgacaacatcatgggcgagaagatcgagatgatcgcccccgtgaacagccccagcctggacttcaacgacaacgaggacatccccaccgagctgagcgacagcagcgacacccacgacgagggcgaggtgcaggccttctacgaggacctgagcggcagacagtacgtgaacgaggtgttcaacttcagcgtggacaagctgtacgacctgctgttcaccaacagccccttccagagagacttcatggagcagagaagattcagcgacatcatcttccacccctggaagaaggaggagaacggcaaccagagcagagtgatcctgtacaccatcaccctgaccaaccccctggcccccaagaccgccaccgtgagagagacccagaccatgtacaaggccagccaggagagcgagtgctacgtgatcgacgccgaggtgctgacccacgacgtgccctaccacgactacttctacaccatcaacagatacaccctgaccagagtggccagaaacaagagcagactgagagtgagcaccgagctgagatacagaaagcagccctggggcctggtgaagaccttcatcgagaagaacttctggagcggcctggaggactacttcagacacctggagagcgagctggccaagaccgagagcacctacctggccgagatgcacagacagagccccaaggagaaggccagcaagaccaccaccgtgagaagaagaaagagaccccacgcccacctgagagtgccccacctggaggaggtgatgagccccgtgaccacccccaccgacgaggacgtgggccacagaatcaagcacgtggccggcagcacccagaccagacacatccccgaggacacccccaacggcttccacctgcagagcgtgagcaagctgctgctggtgatcagctgcgtgatctgcttcagcctggtgctgctggtgatcctgaacatgatgctgttctacaagctgtggatgctggagtacaccacccagaccctgaccgcctggcagggcctgagactgcaggagagactgccccagagccagaccgagtgggcccagctgctggagagccagcagaagtaccacgacaccgagctgcagaagtggagagagatcatcaagagcagcgtgatgctgctggaccagatgaaggacagcctgatcaacctgcagaacggcatcagaagcagagactacaccagcgagagcgaggagaagagaaacagataccactag

SEQ ID NO: 205279 - DNA, 2217 bp, Artificial Sequence
  derived and/or modified sequence
atgaagggcttcaagctttcatgtactgcttccaatagcaaccggtccacgccagcatgttcaccgatcctgcgaaaacggagtagatcaccaaccccacagaatcaggatggtgacactatggtggagaagggcagcgaccattcgtctgataagagtccgtccacccctgagcagggcgtgcagaggtcttgttcttcacagtcggggcgtagcggaggaaaaaattctaaaaaaagccaatcctggtacaatgttttgagtccaacttataagcagaggaacgaggattttcgaaaactgttcaaacagctcccagacacggaaagactgattgttgattactcctgcgccctgcagcgggatatcctgctgcaaggccgactgtacttgagtgaaaattggatctgtttttacagcaacatcttccggtgggagacattattaaccgtccgcctcaaggatatatgctccatgactaaggaaaagactgctcgccttatccccaacgccatccaagtctgcacagacagcgagaaacacttctttacaagtttcggagcaagggaccgcacttatatgatgatgttccgactgtggcaaaacgctctgctcgagaagcctttatgccctaaagagctgtggcattttgtgcaccagtgctacgggaacgagttgggcctgacatctgacgatgaagattacgtgccaccagacgacgacttcaacaccatgggatattgcgaggaaattcctgtggaagagaacgaagtgaacgattcctcctccaaatcctccatagaaactaaaccagatgcatccccacagctacccaaaaaatctatcacgaacagtaccctgacgtccactgggtctagcgaggccccggtaagcttcgacggccttccacttgaagaggaagcattagaaggcgatggcagcctcgagaaggagctagcgattgacaatatcatgggagagaagatcgaaatgatcgccccagtcaattcccctagcctagattttaacgacaacgaagatatccctacagagctctccgattctagcgatactcacgacgagggagaggtacaagccttctacgaagatctctcagggagacaatacgtcaacgaggtgtttaatttttcagtggacaaactatacgacctgctgtttactaactccccattccagcgcgattttatggaacagcggcgattttccgacattatctttcatccttggaaaaaggaagaaaatggcaatcaatctcgcgtcatcctctacactattaccctgacaaaccccctcgcgcccaagacggccaccgtccgtgagacacagacaatgtataaagccagtcaggagagcgagtgttatgtgatcgatgctgaggttctcacgcatgacgtcccctaccatgattatttttacacaatcaacagatatactctgactcgggtggccaggaacaagagcagactgcgggtgtctacagaactccgataccggaaacaaccttggggacttgtgaagacattcattgaaaagaacttttggtccggcctggaagattactttcgacacctcgaaagcgagctggcaaagacggagtctacctacctcgctgagatgcaccgacaatcgcctaaagagaaggcttctaaaaccaccacagtgcgccgtcgaaagaggccccatgcccatctgcgcgtgccacacctggaggaagtcatgagccctgttacgactcccacagacgaggacgtgggccaccggatcaagcacgtggccggcagtacgcagactcgccatatcccagaggatacaccaaatgggttccatctgcagtccgtgtctaaactgctcctggtgatatcctgtgtcgtttcattcagcttagtcttgctggtcatactgaatatgatgttattctataagctttggatgctcgaatacacaacgcaaactttaacagcatggcagggcctgcggctgcaggagcggctgccccagtcccagaccgagtgggcacagctacttgaaagccaacagaagtaccacgatacagaactccaaaagtggcgcgaaattattaagagtagtgtcatgttactcgatcagatgaaggatagcctcataaacttgcagaatggcatacgcagtcgggattacacctctgagagcgaagaaaagcgtaaccgttaccactag

SEQ ID NO: 205280 - DNA, 2217 bp, Artificial Sequence
  derived and/or modified sequence
atgaaaggctttaaattgtcctgtaccgcctccaatagcaaccgcagtactccagcctgctcccccatcctccgcaaacgaagtcgctcgccaacacctcagaaccaagatggagacaccatggtggaaaagggatctgaccattcaagcgataaaagccctagcacacctgaacagggggttcagcgctcatgcagtagccaaagtggccgttctggaggaaagaacagtaagaaatcacagagctggtacaatgtcctctctcctacctacaaacagaggaacgaggacttccgtaaactgtttaagcagctgccagataccgaaaggttaattgtagactattcctgcgctctccagcgggacatactcctccagggtagattgtacctctccgaaaactggatatgtttctatagtaatatatttcggtgggaaactctgctaactgtgaggctgaaggatatctgttcgatgactaaggaaaaaacagctaggttgattccaaacgccattcaagtttgtaccgacagtgaaaaacattttttcacctccttcggggcccgcgatcggacctacatgatgatgtttcggctttggcagaacgccctgctggagaaaccgttgtgtccgaaggagctgtggcattttgtgcaccagtgttatgggaatgagcttggactgactagcgacgatgaagactacgtgcctcccgatgatgattttaatacaatgggttactgcgaggagattccagtggaggaaaacgaagtcaatgattcctcctcaaagtccagtatcgagacaaaacccgacgcttcgccacagcttcctaagaagtctattactaactctactttaacgagtaccggatcaagcgaggcccccgttagttttgacggactgccactggaagaggaggctcttgaaggggacgggagcctcgaaaaagagctggccatcgataacataatgggcgagaagattgagatgatcgctccagtcaattcaccatcccttgatttcaacgataacgaggatatccctaccgagctgtccgattccagtgacacccatgacgaaggagaagtgcaagcgttctacgaggacctgtcaggccggcagtatgtaaacgaggtcttcaactttagtgttgacaaactgtacgaccttctctttacaaactcacccttccagcgcgactttatggaacaaagaaggttctctgatatcatctttcacccctggaagaaagaagaaaatggaaaccagagccgcgtaattctgtacacaatcaccctgactaaccccttggctcccaagactgctacagtgagagagacccagacaatgtataaagcctcccaagaaagtgaatgttatgtgatcgacgcggaagtgcttacacacgatgtcccctatcacgattatttttacaccatcaacagatatacgctgacaagggtggcccgtaataagtcccgcctgcgagtgagcactgagctgaggtataggaaacagccttggggcctggtgaagacgtttattgaaaaaaatttttggagcggattggaagactacttcaggcatctggagtcggaactggcgaagacggaaagcacctatctcgcggagatgcatcgacaaagccctaaggagaaggcgtctaaaactacaacagtgcggcgcagaaaacggccacacgctcacttgagggtacctcacctggaggaagtgatgagccccgtgaccacacctacggatgaggatgtaggccatcggattaagcatgtggcgggttccacccagactcgccatatcccagaagataccccgaatggcttccatttgcagtcagttagcaagttgctgctggttatcagctgtgtaatttgctttagcctcgttttgttggtgatcctaaacatgatgcttttctacaaactgtggatgcttgaatacaccacacaaacacttacagcgtggcaggggctccggcttcaggaacgtcttccccaaagccagaccgaatgggctcagctgctcgaatcacagcagaaatatcatgataccgaactacaaaagtggagggagattattaagagctctgtgatgctgctcgatcagatgaaggacagtcttattaacctacaaaacgggataaggagcagggattacacctctgaaagtgaggagaaacgtaacagatatcactag

SEQ ID NO: 205281 - DNA, 2761 bp, Artificial Sequence
  derived and/or modified sequence
cgcagccttgccagcattacccatcctcatcagaaactggcagcggcagccacagctcgggcaggcggctccagccccaggctggatttgcagaatctgtcctttgcctccaagcccagctttcagctgggagagggggaagaaggggcagtggcagcagttcttctggctctttctccctttctctctttctctttctgtgttcaagtcacattacatgggattctgttcttttgggacttcgtcatcttttccaatatgtcctgggacctccggagctgtaacggggatgctaaggacacggtcagtggattatcgtgactgtactaatgaaaggattcaagctctcctgcactgccagtaactccaaccgcagcacgccggcctgctcgcccatcctccggaagcggtctcgctcgccaaccccgcagaaccaggacggagacaccatggtggagaagggctcagatcactcctcggacaagtccccgtccacaccggagcagggcgtgcagcgcagctgctcctcccagtccggccggagcggcggcaagaattccaagaaaagccagagttggtataatgtgttaagccccacctacaagcagagaaatgaagacttcagaaagctctttaagcagcttccagacacggagcgcctcattgttgattactcatgtgcactccaaagagacattctccttcagggccgactctacctctctgaaaattggatctgcttctacagcaacatcttccgctgggaaactctgctgacagtccgtttgaaagacatctgttccatgactaaagaaaaaacagctcgcctcattcccaatgccatccaagtttgcactgattcagaaaagcacttcttcacttcgtttggggcccgggataggacatatatgatgatgttccggctctggcagaatgctctccttgaaaagcctctgtgtcccaaggagctctggcactttgttcaccagtgctatgggaacgaattgggcctgaccagtgatgacgaggactacgtgccccctgacgacgacttcaacacaatgggatactgtgaagagatccctgtggaagagaatgaagtgaatgacagctcatccaagagcagcatagagaccaagccagatgccagtccacagctgcccaagaaatccatcaccaacagcacactaacatccacagggagcagtgaggcccccgtctcgtttgatgggctgcccctggaggaagaggcgctggagggagacgggtccctggaaaaggagctcgccattgacaacatcatgggggagaagattgagatgatcgctcctgtgaactccccttcactggacttcaatgacaatgaggacatccccactgagctcagtgactcttccgacacacacgatgaaggagaggtccaggccttctatgaggacctgagtggccggcagtacgtgaatgaagtcttcaacttcagcgtggacaagctctatgacctcctcttcaccaactcgcccttccagcgggatttcatggagcagcggcgcttctctgatatcatcttccatccatggaaaaaggaggagaatggaaaccagagccgagtgattctttacaccatcacccttaccaaccctctggctcccaaaactgccactgtcagggagacacagaccatgtacaaggcgagccaggagagtgaatgttacgtgatagatgccgaagtcctcacccacgacgtgccctaccatgactacttctacacaatcaatcgctacacgctcacccgtgtggctcggaacaagagccgactcagggtctccacagagctgcgctatcgaaaacagccctgggggttagtgaaaacgttcatcgagaagaacttctggagtgggctggaggactacttccgccatttagagagcgagctggccaaaacggagagcacttatttggctgagatgcacagacaatctcccaaagagaaggccagcaagactacaacggtgcggaggaggaagcgtccccatgcccacctgcgagtccctcacctggaagaggtgatgagcccggtcaccacgcccacagatgaggatgtgggccacaggatcaaacatgtggcaggttccacacagacgcggcatatcccggaggacacccccaacggtttccacctgcagagcgtgtccaagctgctgctggttatcagctgtgtggtctccttcagtctggtgctgctggtcatccttaacatgatgctcttctacaaactctggatgttggaatacaccacgcagaccctcactgcctggcagggtctaaggctccaagaaaggttaccccagtctcagacagaatgggcccagctcttagagtcccaacaaaagtaccacgatactgagctccaaaaatggagggaaatcatcaaatcctcagtgatgctccttgaccagatgaaggactcgctcatcaaccttcagaacggcatcaggtcccgcgactacacgtcggaaagtgaagaaaagaggaatcgctatcattgacaaggcaggaacagggtggctgcaagaggcctgtgcaatacatgtacatagaccatataaatatatatatataaatatatatatatacagaatataaatatatatattatatacagattttaaaaaagagataatgcctatgtaccagggagaaggagcgggccctcccgcgccctgtgctggccggagcagcgttttcttatggtggagcagct

SEQ ID NO: 205282 - DNA, 7723 bp, Artificial Sequence
  derived and/or modified sequence
cagccttgccagcattacccatcctcatcagaaactggcagcggcagccacagctcgggcaggcggctccagccccaggctggatttgcagaatctgtcctttgcctccaagcccagctttcagctgggagagggggaagaaggggcagtggcagcagttcttctggctctttctccctttctctctttctctttctgtgttcaagtcacattacatgggattctgttcttttgggacttcgtcatcttttccaatatgtcctgggacctccggagctgtaacggggatgctaaggacacggtcagtggattatcgtgactgtactaatgaaaggattcaagctctcctgcactgccagtaactccaaccgcagcacgccggcctgctcgcccatcctccggaagcggtctcgctcgccaaccccgcagaaccaggacggagacaccatggtggagaagggctcagatcactcctcggacaagtccccgtccacaccggagcagggcgtgcagcgcagctgctcctcccagtccggccggagcggcggcaagaattccaagaaaagccagagttggtataatgtgttaagccccacctacaagcagagaaatgaagacttcagaaagctctttaagcagcttccagacacggagcgcctcattgttgattactcatgtgcactccaaagagacattctccttcagggccgactctacctctctgaaaattggatctgcttctacagcaacatcttccgctgggaaactctgctgacagtccgtttgaaagacatctgttccatgactaaagaaaaaacagctcgcctcattcccaatgccatccaagtttgcactgattcagaaaagcacttcttcacttcgtttggggcccgggataggacatatatgatgatgttccggctctggcagaatgctctccttgaaaagcctctgtgtcccaaggagctctggcactttgttcaccagtgctatgggaacgaattgggcctgaccagtgatgacgaggactacgtgccccctgacgacgacttcaacacaatgggatactgtgaagagatccctgtggaagagaatgaagtgaatgacagctcatccaagagcagcatagagaccaagccagatgccagtccacagctgcccaagaaatccatcaccaacagcacactaacatccacagggagcagtgaggcccccgtctcgtttgatgggctgcccctggaggaagaggcgctggagggagacgggtccctggaaaaggagctcgccattgacaacatcatgggggagaagattgagatgatcgctcctgtgaactccccttcactggacttcaatgacaatgaggacatccccactgagctcagtgactcttccgacacacacgatgaaggagaggtccaggccttctatgaggacctgagtggccggcagtacgtgaatgaagtcttcaacttcagcgtggacaagctctatgacctcctcttcaccaactcgcccttccagcgggatttcatggagcagcggcgcttctctgatatcatcttccatccatggaaaaaggaggagaatggaaaccagagccgagtgattctttacaccatcacccttaccaaccctctggctcccaaaactgccactgtcagggagacacagaccatgtacaaggcgagccaggagagtgaatgttacgtgatagatgccgaagtcctcacccacgacgtgccctaccatgactacttctacacaatcaatcgctacacgctcacccgtgtggctcggaacaagagccgactcagggtctccacagagctgcgctatcgaaaacagccctgggggttagtgaaaacgttcatcgagaagaacttctggagtgggctggaggactacttccgccatttagagagcgagctggccaaaacggagagcacttatttggctgagatgcacagacaatctcccaaagagaaggccagcaagactacaacggtgcggaggaggaagcgtccccatgcccacctgcgagtccctcacctggaagaggtgatgagcccggtcaccacgcccacagatgaggatgtgggccacaggatcaaacatgtggcaggttccacacagacgcggcatatcccggaggacacccccaacggtttccacctgcagagcgtgtccaagctgctgctggttatcagctgtgtgatctgtttcagtctggtgctgctggtcatccttaacatgatgctcttctacaaactctggatgttggaatacaccacgcagaccctcactgcctggcagggtctaaggctccaagaaaggttaccccagtctcagacagaatgggcccagctcttagagtcccaacaaaagtaccacgatactgagctccaaaaatggagggaaatcatcaaatcctcagtgatgctccttgaccagatgaaggactcgctcatcaaccttcagaacggcatcaggtcccgcgactacacgtcggaaagtgaagaaaagaggaatcgctatcattgacaaggcaggaacagggtggctgcaagaggcctgtgcaatacatgtacatagaccatataaatatatatatataaatatatatatatacagaatataaatatatatattatatacagattttaaaaaagagataatgcctatgtaccagggagaaggagcgggccctcccgcgccctgtgctggccggagcagcgttttcttatggtggagcagctgaggagggcaggaaccgcctctcagcaccgacctcccctgatctccctcctcccaccctctgttccccaccccttcccttgctggccattcttggcttttagaagggaaatgttgagccaaagttatgcctgcgaagaccctaaggtctcaaaaagaagtcttaagacggcattgcttaaggtgcttcattccctaatccccttttgatttgtttccaaaataaaagagaatcttttcttccctaccccaggcttccccaggcattctcttgggaacacagaagcatcaagggagcccagtctaaactcctagggttggccgcccacttgatccagaccgtactgagtgtcagatggagaggatgcttggaaagctaggaaggctgcattgtgtggtggcaggctcccgagactcgtgttctgaaggatactctcctccatcacccctgcaccttcctccgacctgtgtagggtgtggacccagtaagggctgggaatttcttactttcccacccgctttctctctggtcttctcccaggctggatctgggcgaagtgtcactttttagtgcctaaagtcctattgtttctctgtgccctaagagcacattgtttattagccagggtggagcgttttcgaccttattaaacctcttttagtgcttctaagcaagtcaggtctgtggctctgaggccttcacttagagctgtcagtgtgatttccaggatgagtcagggtgtgctgggccctccaggatttgagagagggagagaaggcccttgccacgtccggggtgcagggtctacccacagaacactgtgagtggtgagcaccaagatgggttgccagcctcatttgctctttgaacgaaccaacattagccagtggagacgactgtctgagacagtttgcacatagaaaaagcatctgagccactggagggaaggatttggcaaaggtgcatgtgtttgggcaggaaaaggccaagtgaaatctatgccctacgggagccattcccaatcctgagtttctcagacttggcaatgggggttctggcgggggttggagtacaaatcctgctctggtctctggccccacagaggtgtaagatcattaagaagtagaaggcactagcttcaaagagtgagacattcagggccttttcagcattggcccactagcaccatgcatttatctgaattcacggggccctctgggcacattcatcatccctcatacactaactactgtttcttcatgtaatgaccaaaagagtcccaccagctccaggcagagcttgtggagattcatgaaagagtcatagccagtttggcatgcagaggtcttcagtcttgcttattcttctcctgggcttcttgacacaggggcagaagaaaccccagatgtcccagatgtcccagaacatcagcccaaaagacagaagattttatcactcatctaccccaaagataaagttgtatttttttcttagaatggcctttaattccctgtggcaattacagtttttgacttttccatgtgagaataaggccttggtatttccctaagggcaggatcagaaaacaggaaggtccatgcccaggtgatcctccaagggaggagggtgaggaggctccagggcatgagctagagtggatattcctcccctagaagaggagatgggaggaaatgcagtttcatgtaatccctgtgaagagtgcctatgcccacagcccagtgggtccttgttcagttcttgtccaggcctttgggtgagggacactggtagggatcaaggctcatgggctctgagccaaagaaggaggcatggtgcagactgctggaaatctcccccttggcacagccagaagccaaaactattcccagaaagttttgaatgcaaaacttgtagattcctgaatttattccatacataattatttccttaagttatttaattattaaaggtgccacggtgggacctttgggatgacttaaaaagggttctttgttgggagtcaagtgacagagcagacctggccgcagggagttgttctgcttctgctttacctctcaggaccattcccaggaggaaaaggtggcagagagggcagtactgagtatgtcagaagagccctcctggttttttagcgatttgaacccactagacaatgtgtgcacatagggaatgtcctttaagaatcatggatctcttgtaggctctctgtgttccaataattttttgactatcataccaggaaaaaaccaacaactctattcattcccaaacaaaatctcttcccccttagtcaatagcttgcgaaagacatcttaactcacccttgcagataagtcttggagtgaaacaaataaatagcattgtattcctggccatttgcctggctagttgctgtctacaagggagcatcaaaacatcactacttcttatgtaacttcttccagccagtgcttttattgttcgttttagtttactggggacacacaggagtctttctgtaatgacttatgtggtaaaatgtttgagagtttgcactcaattttaaagaatttgcagtttctaacaaggtgaagaacagctataggatctaaagttccattacagcttactgtgaaagaattgacaagactggcctcagacaagctaatcatggtgcgactctctcccttcctcatccacctctttggggacaagaggattacatctcaggccagcaagatcagctgcttgaagctctgtgtaagagcactgcactgacggtttggagacctgagcctgggtcctgacttttccattgactaagctctgtggccttgggcaagtcactccccctctctgagcttcagtatcctcctgtcacaggagggagttgggctagatcatctttaaggtaggttctagctttgacatcatcttgggggttaggccagaggctgggaagactgggtggactttctcaattgctctgccaggagggaacaagcccagaggctgaagcttcccagtatttagaggtgtggtagggcagtgtctgcattcccaggagacccagggtgattaaaatttattctttaggtggctaggagggctggggaggcccagtggaagagagagagagagagagagagagagagagagagagagagagagatcgagcttgatgtattgctcagtattcacttagaagggtttctttctctttggcctagtttgtgaagggatcttcctttggactttctctaagttgggagaagaacattcttttcaatggagctcatcttctatctctagggtctgttcagcctttcatctatccatccttcctctttattggtagaagaaacagtggagagtagccacttctggttctagcacttctcttttgttaagatagggtttggatttagtatgaagctttggctaaaacccttgggtttgccttagaacactgacactaagaacctggaatgacatggggaggacaaagagagctcaagaggaatgctttgtgagaagtggattctctccgtgtccctgccccccacccaaacttgaactatacctattacatttccaggcagtatccctaagatgagatcctggagaaaggactaggggaagtatctttctggatgcttgtggtcccagaagggtactttctgtgtcataccatgccacttctttaagctcttcagggcagccaaagccagcccttttctcctactgcccccaggagaaatagcactcttctcccttcccccagatggcagggctctggcctccctacacctcataccctgcctgcctcctccaggaggaatctccggggccccttcctgactctccccaccttcgccacttgtctctaggctatgggacaatcatcccattcaccacttgacatccttgacatccttgactttcattcccccaacctccagcaggttggccccaatcctcttcacctctgtgttttcttctagaagatgcattttgggtctgagaggagcattttcctggaaggccatcttttaaggcccctgcttgctgtcatagtgcagagcagaaacttgcacactatttagagagctcccttcccacctctctgcccagccttgttacctcacttctgctctggccatggctgtgaagggcccagccagctccctgttttgatgttctgtgcaacagctccggggtcttgtgactggagatcctcaacaggccctggagccaggactggagtcttggcagctgatgagcagcaccttgccggccaggaggagctgatgctgacgatctccccaacatctgaaggcttaaagaacattgtcgttcttcagccctccttgcttctctcaatacaataagacattgcagaagcaaaagggtggcctctgctccaggcaaggcagctggctctgtctggggcatcggcctggggcttgggtgccacgtgctgagattgcatagtcaaaacagccatttttgccaacaatagcttgtggctccccacattttcctaccctgcactcaagggccagaccactctctgcatggaccagaccatcttcccaaacccatggtgctttttccccaactcaacctagactccaaggtggggagggatgggtcagaggccatagtggcccctggataatcctgacgtggggtggagtggggtgaggcagagggagcagccccaacacctgcactgggccatctatgggaaagaacacgggtcgagtgcagtcgagttgtctggccatctgtatttggatctataactgtactttgcctggcgctgtgcgcaaggtcagaaaacttactgctagtacctagaaacacacaaggctgcccagccaaatcttaatgtaaagtagctagagccatggaagtacagtatgaattaaaaagaaaaaagtattgaactacaataataaa

SEQ ID NO: 205283 - DNA, 2217 bp, Artificial Sequence
  derived and/or modified sequence
atgaagggcttcaagctgagctgcacagccagcaacagcaacagaagcaccccagcctgcagccccatcctgaggaagaggagccgcagccccaccccccagaaccaggatggagacaccatggtggagaagggcagtgaccacagcagtgacaagagccccagcaccccagagcagggcgtgcagaggagctgcagcagccagagcggccgcagcggcggcaagaacagcaagaagagccagagctggtacaacgtgctgagccccacctacaagcagagaaatgaagacttcaggaagctgttcaagcagctgcctgacacagagcggctcatcgtggactacagctgtgccctgcagagggacatcctgctgcagggccgcctgtacctgtctgagaactggatctgcttctacagcaacatcttccgctgggagaccctgctgactgtgcggctgaaggacatctgcagcatgaccaaggagaagacagcccggctcatccccaatgccatccaggtgtgcacagacagcgagaagcacttcttcaccagctttggagcccgggacaggacctacatgatgatgttccggctgtggcagaatgccctgctggagaagcccctgtgccccaaggagctgtggcactttgtgcaccagtgctatggaaatgagctgggcctgaccagtgatgatgaagattatgtgcccccagatgatgacttcaacaccatgggctactgtgaggagatccctgtggaggagaatgaggtgaatgacagcagcagcaagagcagcattgagaccaagccagatgccagcccccagctgcccaagaagagcatcaccaacagcaccctgaccagcacaggcagcagcgaggcccctgtgtcctttgatggcctgcccctggaggaggaggccctggagggagatggcagcctggagaaggagctggccatcgacaacatcatgggagagaagattgagatgattgcccctgtgaacagccccagcctggacttcaatgacaatgaagacatccccacagagctgagtgacagcagtgacacccatgatgaaggagaggtgcaggccttctatgaggacctgagcggccggcagtatgtgaatgaggtgttcaacttctctgtggacaagctgtatgacctgctcttcaccaacagccccttccagagggacttcatggagcagaggcgcttcagtgacatcatcttccacccctggaagaaggaggagaatggaaaccagagcagggtcatcctgtacaccatcaccctgaccaaccccctggcccccaagacagccaccgtgcgggagacccagaccatgtacaaggccagccaggagagtgaatgttatgtgattgatgctgaggtgctgacccatgatgtgccctaccatgactacttctacaccatcaaccgctacaccctgaccagggtggccaggaacaagagccggctgcgggtgtccacagagctgcgctacaggaagcagccctggggcctggtgaagaccttcatcgagaagaacttctggagcggcctggaggactacttccgccacctggagagcgagctggccaagacagagagcacctacctggccgagatgcaccggcagagccccaaggagaaggccagcaagaccaccaccgtgagaagaaggaagaggccccacgcccacctgcgggtgccccacctggaggaggtgatgagccctgtgaccacccccacagatgaagatgtgggccaccgcatcaagcacgtggccggcagcacccagaccaggcacatccctgaggacaccccaaatggcttccacctgcagagcgtgtccaagctgctgctggtgatcagctgtgtggtgtccttcagcctggtgctgctggtgatcctgaacatgatgctgttctacaagctgtggatgctggagtacaccacccagaccctgacagcctggcagggcctgcggctgcaggagcggctgccccagagccagacagagtgggcccagctgctggagagccagcagaagtaccatgacacagagctgcagaagtggagggagatcatcaagagctctgtgatgctgctggaccagatgaaggacagcctcatcaacctgcagaatggcatccgcagccgggactacaccagcgagagcgaggagaagaggaaccgctaccactag

SEQ ID NO: 205284 - DNA, 2217 bp, Artificial Sequence
  derived and/or modified sequence
atgaagggcttcaagctgagctgcacagccagcaacagcaacagaagcaccccagcctgcagccccatcctgaggaagaggagccgcagccccaccccccagaaccaggatggagacaccatggtggagaagggcagtgaccacagcagtgacaagagccccagcaccccagagcagggcgtgcagaggagctgcagcagccagagcggccgcagcggcggcaagaacagcaagaagagccagagctggtacaacgtgctgagccccacctacaagcagagaaatgaagacttcaggaagctgttcaagcagctgcctgacacagagcggctcatcgtggactacagctgtgccctgcagagggacatcctgctgcagggccgcctgtacctgtctgagaactggatctgcttctacagcaacatcttccgctgggagaccctgctgactgtgcggctgaaggacatctgcagcatgaccaaggagaagacagcccggctcatccccaatgccatccaggtgtgcacagacagcgagaagcacttcttcaccagctttggagcccgggacaggacctacatgatgatgttccggctgtggcagaatgccctgctggagaagcccctgtgccccaaggagctgtggcactttgtgcaccagtgctatggaaatgagctgggcctgaccagtgatgatgaagattatgtgcccccagatgatgacttcaacaccatgggctactgtgaggagatccctgtggaggagaatgaggtgaatgacagcagcagcaagagcagcattgagaccaagccagatgccagcccccagctgcccaagaagagcatcaccaacagcaccctgaccagcacaggcagcagcgaggcccctgtgtcctttgatggcctgcccctggaggaggaggccctggagggagatggcagcctggagaaggagctggccatcgacaacatcatgggagagaagattgagatgattgcccctgtgaacagccccagcctggacttcaatgacaatgaagacatccccacagagctgagtgacagcagtgacacccatgatgaaggagaggtgcaggccttctatgaggacctgagcggccggcagtatgtgaatgaggtgttcaacttctctgtggacaagctgtatgacctgctcttcaccaacagccccttccagagggacttcatggagcagaggcgcttcagtgacatcatcttccacccctggaagaaggaggagaatggaaaccagagcagggtcatcctgtacaccatcaccctgaccaaccccctggcccccaagacagccaccgtgcgggagacccagaccatgtacaaggccagccaggagagtgaatgttatgtgattgatgctgaggtgctgacccatgatgtgccctaccatgactacttctacaccatcaaccgctacaccctgaccagggtggccaggaacaagagccggctgcgggtgtccacagagctgcgctacaggaagcagccctggggcctggtgaagaccttcatcgagaagaacttctggagcggcctggaggactacttccgccacctggagagcgagctggccaagacagagagcacctacctggccgagatgcaccggcagagccccaaggagaaggccagcaagaccaccaccgtgagaagaaggaagaggccccacgcccacctgcgggtgccccacctggaggaggtgatgagccctgtgaccacccccacagatgaagatgtgggccaccgcatcaagcacgtggccggcagcacccagaccaggcacatccctgaggacaccccaaatggcttccacctgcagagcgtgtccaagctgctgctggtgatcagctgtgtgatctgcttcagcctggtgctgctggtgatcctgaacatgatgctgttctacaagctgtggatgctggagtacaccacccagaccctgacagcctggcagggcctgcggctgcaggagcggctgccccagagccagacagagtgggcccagctgctggagagccagcagaagtaccatgacacagagctgcagaagtggagggagatcatcaagagctctgtgatgctgctggaccagatgaaggacagcctcatcaacctgcagaatggcatccgcagccgggactacaccagcgagagcgaggagaagaggaaccgctaccactag

SEQ ID NO: 205285 - DNA, 2217 bp, Artificial Sequence
  derived and/or modified sequence
atgaagggcttcaagctgagctgcaccgccagcaacagcaaccggtctacccctgcgtgtagcccaatcctccggaagcgctctcggtcccctacgcctcaaaatcaggacggcgacactatggtcgagaagggttctgaccattcatcggacaagtctccctcaacacccgagcagggggtgcagcggtcgtgcagttcacaatctggtaggtccgggggcaaaaattctaaaaagagccaaagctggtataatgtcctttcgcccacctataaacagaggaatgaggattttaggaagttgtttaaacagcttcctgacaccgagaggttgatcgtggactactcttgtgccttacagagagatatcctcctacagggacgtctgtatctctccgaaaactggatctgtttctactccaacatctttcgctgggagaccctgctgaccgtgcggctgaaggatatctgcagtatgaccaaggagaagactgcccggctgatccctaatgcaatccaggtatgcactgattcagagaagcattttttcacgtctttcggtgcccgagacaggacatacatgatgatgttccgcctgtggcagaacgcactgctggaaaaacccctgtgtcctaaagaactgtggcattttgtgcatcaatgctacgggaatgagctgggcctgaccagcgatgatgaggactatgtccctcccgacgatgatttcaacaccatgggctactgcgaggaaatccctgtcgaggaaaacgaagttaatgatagctccagcaaatcttcgatagagactaagccagatgcctccccacagctccccaagaagtcaattaccaactcgacactcacttccaccgggtcctccgaagcccctgtgagtttcgatgggctacctctggaagaagaggcactggaaggagacggatctttggagaaggagttggctatagataatataatgggcgagaaaattgaaatgatagcccctgtgaattccccgtccctggacttcaatgataatgaagatatcccgacggaattgagcgactcttcggatacgcacgacgaaggggaggtgcaggccttttacgaggacctgtccggacgccagtacgtgaacgaggtctttaatttttccgttgacaagctgtacgacctgctcttcaccaactctcctttccaacgggacttcatggagcaacggcgcttttcagatataatctttcatccctggaagaaggaagagaacgggaaccagagtagagtgattctgtacacaattactcttaccaatccgctggcgcctaagacagccaccgttagggagacccagaccatgtacaaagcttcacaggagtctgagtgttacgtcatcgacgcggaggtgcttacacacgacgtgccatatcatgattatttctataccatcaaccgatacacccttacacgggtcgctcgaaacaaatcccggcttcgggtttcgacagagttacgctatcggaagcagccgtggggcctcgtaaagacttttattgagaagaacttttggagtggtttagaagattacttccgtcatcttgagagtgagttggctaaaacagaaagtacatacctcgccgagatgcacagacagtcacccaaagaaaaggcttctaagactacgactgtaaggaggcgcaagcgccctcacgcccacctaagagtgccacatcttgaggaggtaatgagtcccgtaacgacgcccactgacgaggatgtgggacacaggattaagcatgtcgctggaagtacccaaacccgccacattcccgaggacacacctaacggatttcacctgcagagtgtgagcaaactcttactggtcatctcgtgcgtcgtgagctttagcctcgtgctgcttgtgatcctgaatatgatgctattctacaaactctggatgttggagtatacaacccagaccctgacagcttggcaaggattacggcttcaggaacggctgccccagtcacagaccgaatgggcccaactccttgaatctcagcagaagtatcacgacacagagcttcaaaagtggcgggagattatcaagagttccgtgatgctcttggatcagatgaaagactctctcataaacctgcaaaatggcattcgtagtagggattatactagtgaatcggaagagaagcgaaaccgctaccactag

SEQ ID NO: 205286 - DNA, 2217 bp, Artificial Sequence
  derived and/or modified sequence
atgaagggcttcaagctgagctgcaccgccagcaacagcaaccggtcaacacccgcttgttcacctatactgcgtaaaaggagtcgaagtccgacccctcagaaccaggacggcgatacgatggttgagaaagggagtgaccactcgagtgataaatctcccagtactcccgaacagggtgtgcagcggtcctgttcttcccagtccggccgatcagggggcaaaaacagtaaaaagagtcagtcgtggtataacgtgttgtcccctacttacaagcagaggaatgaagacttcaggaaacttttcaagcagctgcccgacaccgaaaggcttatcgtggactattcgtgcgccctgcaaagggacattcttctgcagggcagactatatctgtccgaaaattggatctgcttttacagtaacatcttcagatgggaaacgctcctaacagtgaggctcaaagatatctgcagcatgacaaaggaaaaaaccgcgagactgattcctaacgcgatccaggtgtgcacagatagtgaaaagcacttttttacaagcttcggggcacgcgacagaacctatatgatgatgttcaggctatggcagaatgctctgctcgaaaagcccctgtgtccaaaagaattgtggcactttgtgcaccagtgctacggcaacgagttgggcctcacatccgacgatgaagactatgtgcctccggacgacgattttaacaccatgggctattgcgaggagatcccagtcgaggagaatgaagtgaatgattcttccagtaagtcctcaatagaaacaaagccggatgcaagcccccagttgcccaagaaaagcatcaccaattccacactaacatctactggaagctcggaagcccctgtgagcttcgatgggctgccattggaagaggaggcacttgagggcgatgggagtttagagaaggaactggccatcgataacattatgggggagaaaattgaaatgattgcaccggttaacagtccatctctggattttaacgacaacgaggatatcccgacagagctctcagacagctccgatactcatgatgagggtgaagtccaagctttctatgaggacctcagtggccgtcagtatgtaaacgaggtatttaatttctccgtcgacaagctttacgatctgctctttacaaactccccatttcagagagattttatggagcagcggcgcttttccgatatcatattccatccttggaagaaagaggaaaacgggaaccagtccagagtaatactctacaccataacactgacgaatccattggcgccaaagactgctactgtgcgggagactcagacaatgtacaaggctagccaggaatctgagtgctatgtgattgacgccgaggtgctgacacacgatgttccctaccatgattacttttacaccataaaccgttatactttaacccgcgtggctcgtaacaagtccaggttgagggtgtcgacggaactgcgctacaggaagcagccatggggcttagtaaagacattcatagaaaaaaatttctggtcaggtttagaggactactttcggcacctggagtcagagctagcaaagaccgaatctacttatctggccgagatgcataggcagtcaccgaaggaaaaggccagtaagacgactaccgtgagacgccgtaaaagaccgcatgcccaccttagggtgccccacctagaagaggtcatgagcccagtcaccactcctaccgatgaggacgtaggccataggatcaagcacgtcgcggggtccacacaaaccagacacatacctgaggatacgcccaatggctttcacctgcagtccgtatcaaagctcctgctagtcatctcctgcgtgatctgcttttcacttgtcttactcgtcattctaaatatgatgcttttttacaaactatggatgttagagtacactacccagacccttaccgcctggcagggccttaggcttcaggaacgcctgccacagagccaaactgaatgggcgcagctcctggagtctcagcagaaataccacgatactgaactgcagaagtggagggaaattattaagtctagcgtcatgctgctggatcagatgaaggactccctgatcaatctgcagaatgggattcgatcccgcgactacaccagcgagagcgaagagaaaagaaaccgttaccactag

SEQ ID NO: 205287 - DNA, 2217 bp, Artificial Sequence
  derived and/or modified sequence
atgaagggttttaagctaagctgcaccgcttctaatagtaaccgatccacgccggcttgcagtccgatcctcaggaagaggtccagatcccccacaccacagaaccaagatggagataccatggtcgagaaaggctcagaccattcgtctgacaagtctccaagcacccccgaacagggggttcagcgcagttgttccagccagagcgggcgatcaggcggtaagaacagcaaaaaatcccaatcctggtacaacgtgttaagtcctacatacaaacagcgcaacgaggatttccgtaaactatttaaacagctgcctgatacagaaaggctgattgttgactactcatgtgctctgcagagagatatacttctacagggcaggctgtatctctccgagaactggatctgcttttacagcaatatcttcaggtgggagacattattgacagttaggctcaaggatatttgcagcatgaccaaagagaagacagcaagattaattcctaacgctattcaggtgtgtacagactcagagaaacactttttcaccagcttcggtgcccgagacaggacatatatgatgatgtttcgtctgtggcaaaacgcactgctggagaaaccactttgccctaaggaactgtggcacttcgtccatcagtgctacggaaatgagttgggtttaacctccgacgacgaggattacgttccccctgatgacgatttcaacacgatgggctattgcgaggaaattcctgtggaggagaatgaggtgaatgattcctcctcaaagtcctctatagagacaaagcccgatgcatctcctcagcttccaaaaaagtcgatcacaaactccactctaacatcaactggcagcagtgaagctcccgttagcttcgacggtctgcctctcgaggaggaagctctggagggagacggctcactcgagaaagaactggcaatagataatattatgggcgagaagattgaaatgatcgcccctgttaactccccatctcttgacttcaacgacaacgaggatattccaaccgaactgtccgactcttctgacacacacgatgagggcgaagtgcaggccttttacgaagacctgagtggtcgtcagtacgttaacgaggtctttaacttcagcgttgataagttgtatgatcttttgttcacgaactctcccttccagcgagatttcatggaacaacgtcggttttcagacattattttccacccgtggaaaaaagaggaaaatgggaatcagagtcgagtaatcttgtacactatcaccctgacgaacccactcgcccctaaaaccgccacagtccgggaaacccagactatgtataaggcctctcaagaatccgagtgctatgtgatcgatgccgaagtactgacacatgacgtgccctatcacgattatttctataccattaatcgttacacactcacccgggttgctcgcaacaaatccagactgcgggtgagcaccgagctgcgttaccgtaagcagccatgggggctcgtgaaaacttttatcgagaagaacttttggagcggcttggaggattacttcagacatttggagtctgagcttgctaaaacggagagcacttatttggcagagatgcaccgtcagtcaccaaaggaaaaggcgagcaaaactacaaccgtgcgcaggagaaagagaccacacgctcacctccgggtcccacacctggaagaggtgatgagcccagttacaacacctacagacgaagatgtggggcatcgaattaagcatgtcgcgggatctacgcagacccgtcacattccagaggacacacctaatggttttcacctgcagagtgtttcgaaattactgcttgtcatcagctgcgtggtttccttcagtttagtcttactggtaatcctgaacatgatgttgttttacaaactttggatgctggagtatactacacagacccttacagcatggcaagggcttcgcctccaggaaaggctgccccaaagccagaccgagtgggcccagctgctcgaatctcagcaaaaataccacgatacggagttacagaagtggcgagagataattaaatcctccgtcatgctgttggatcagatgaaagattctctgattaatctacagaatgggatccgatcacgcgactatacttccgaatccgaagaaaagcgaaataggtaccactag

SEQ ID NO: 205288 - DNA, 2217 bp, Artificial Sequence
  derived and/or modified sequence
atgaaggggtttaagctgtcctgcacggcctcgaacagtaatcgttccacccctgcctgcagtcccattctgcggaaaaggtcccgttcacccaccccccagaaccaggatggagatacaatggttgagaaaggcagcgatcactcaagcgataagagcccgagcacccctgaacagggtgtccagcgatcctgctcgtcccagagcggtaggagcggtggtaagaactccaagaagtcccaatcatggtataatgtgttatccccgacgtacaagcagcgaaatgaggattttaggaagttgtttaaacagctgcctgacacagagcgcctcattgtcgactactcttgcgctttgcagcgtgatatcttgttgcaaggacgcctgtatctgtccgaaaattggatctgtttttactcgaacattttcagatgggagactctcctgaccgtgcgccttaaagacatttgtagtatgaccaaggagaaaacggccagacttatccccaatgccatccaagtctgcactgatagcgaaaagcacttctttacctcattcggtgccagagaccggacttacatgatgatgttcaggttatggcagaatgccttgcttgagaagccactgtgccccaaggagctgtggcactttgttcatcagtgttacggaaacgaactcgggctgacgtccgacgatgaggattatgtgccccctgacgacgacttcaacaccatggggtattgtgaagagatccccgttgaggagaatgaggtgaacgatagcagctctaagtcttccatcgaaacaaagccagatgccagcccccaactccccaaaaagtctatcaccaactcaaccctgacctcaacaggatcatccgaggctcctgtgtcttttgacggtctacctttggaggaagaagccctggagggagatggatcactggagaaagaactggctatcgacaacatcatgggcgagaaaatcgagatgatcgctccggtcaactccccatcactggatttcaacgataacgaggacattccaactgaactgtccgacagttccgatacccacgacgagggcgaggtccaagccttctacgaagacctgagcggcaggcagtacgtgaacgaagtgtttaacttttctgtcgacaagctctacgacttactcttcacaaatagcccctttcagcgcgattttatggaacagaggcggtttagcgacataatcttccatccttggaagaaggaggaaaacggaaaccagtctcgggtgattttgtatactatcacattgacaaatcccctagccccaaagaccgccactgtccgcgaaacgcaaaccatgtacaaggcttcccaggagtcagagtgttacgtgatcgacgcggaagtgctcactcacgacgtcccctaccatgactatttctacaccattaacagatataccctgacccgagtcgcgcgaaataaaagtaggctgagggtgtcgacagaactacgctatcgtaaacaaccgtggggactggtgaagacgtttatagagaagaacttctggagcggtttggaggactactttcgacatctagaaagcgaacttgccaagacagagagtacgtacttagccgaaatgcatcgtcagtcacctaaggagaaagctagtaagaccaccaccgtccggagaaggaaaagaccacacgcacacttacgtgtgccccacctggaggaggttatgagcccagttactactccgaccgacgaggacgtgggacatcgcattaagcacgtcgcaggctcaactcagactcggcacattccagaagacacacctaatggctttcatttacagtcggtcagtaagttgctgctagtgatttcctgcgtcatctgcttcagcttggtcttgcttgtgatccttaacatgatgctcttttacaagctgtggatgctggaatatactacccagaccctgactgcgtggcagggcttgagactccaggagcgccttccccaaagccagaccgaatgggcccaactattagaatcacagcaaaagtatcatgacactgagctgcagaagtggagggagattattaaatctagtgtgatgctgctcgaccagatgaaagatagcctgataaacctgcaaaatggtattcgcagtcgcgattacacctccgaaagcgaggaaaagcgaaaccgctaccattag

SEQ ID NO: 205289 - protein, 1493 aa, Artificial Sequence
  derived and/or modified sequence
MENRPGSFQYVPVQLQGGAPWGFTLKGGLEHCEPLTVSKIEDGGKAALSQKMRTGDELVNINGTPLYGSRQEALILIKGSFRILKLIVRRRNAPVSRPHSWHVAKLLEGCPEAATTMHFPSEAFSLSWHSGCNTSDVCVQWCPLSRHCSTEKSSSIGSMESLEQPGQATYESHLLPIDQNMYPNQRDSAYSSFSASSNASDCALSLRPEEPASTDCIMQGPGPTKAPSGRPNVAETSGGSRRTNGGHLTPSSQMSSRPQEGYQSGPAKAVRGPPQPPVRRDSLQASRAQLLNGEQRRASEPVVPLPQKEKLSLEPVLPARNPNRFCCLSGHDQVTSEGHQNCEFSQPPESSQQGSEHLLMQASTKAVGSPKACDRASSVDSNPLNEASAELAKASFGRPPHLIGPTGHRHSAPEQLLASHLQHVHLDTRGSKGMELPPVQDGHQWTLSPLHSSHKGKKSPCPPTGGTHDQSSKERKTRQVDDRSLVLGHQSQSSPPHGEADGHPSEKGFLDPNRTSRAASELANQQPSASGSLVQQATDCSSTTKAASGTEAGEEGDSEPKECSRMGGRRSGGTRGRSIQNRRKSERFATNLRNEIQRRKAQLQKSKGPLSQLCDTKEPVEETQEPPESPPLTASNTSLLSSCKKPPSPRDKLFNKSMMLRARSSECLSQAPESHESRTGLEGRISPGQRPGQSSLGLNTWWKAPDPSSSDPEKAHAHCGVRGGHWRWSPEHNSQPLVAAAMEGPSNPGDNKELKASTAQAGEDAILLPFADRRKFFEESSKSLSTSHLPGLTTHSNKTFTQRPKPIDQNFQPMSSSCRELRRHPMDQSYHSADQPYHATDQSYHSMSPLQSETPTYSECFASKGLENSMCCKPLHCGDFDYHRTCSYSCSVQGALVHDPCIYCSGEICPALLKRNMMPNCYNCRCHHHQCIRCSVCYHNPQHSALEDSSLAPGNTWKPRKLTVQEFPGDKWNPITGNRKTSQSGREMAHSKTSFSWATPFHPCLENPALDLSSYRAISSLDLLGDFKHALKKSEETSVYEEGSSLASMPHPLRSRAFSESHISLAPQSTRAWGQHRRELFSKGDETQSDLLGARKKAFPPPRPPPPNWEKYRLFRAAQQQKQQQQQQKQQEEEEEEEEEEEEEEEEEEEEAEEEEEELPPQYFSSETSGSCALNPEEVLEQPQPLSFGHLEGSRQGSQSVPAEQESFALHSSDFLPPIRGHLGSQPEQAQPPCYYGIGGLWRTSGQEATESAKQEFQHFSPPSGAPGIPTSYSAYYNISVAKAELLNKLKDQPEMAEIGLGEEEVDHELAQKKIQLIESISRKLSVLREAQRGLLEDINANSALGEEVEANLKAVCKSNEFEKYHLFVGDLDKVVNLLLSLSGRLARVENALNSIDSEANQEKLVLIEKKQQLTGQLADAKELKEHVDRREKLVFGMVSRYLPQDQLQDYQHFVKMKSALIIEQRELEEKIKLGEEQLKCLRESLLLGPSNF

SEQ ID NO: 205290 - DNA, 4482 bp, Artificial Sequence
  derived and/or modified sequence
atggagaacagacccggcagcttccagtacgtgcccgtgcagctgcagggcggcgccccctggggcttcaccctgaagggcggcctggagcactgcgagcccctgaccgtgagcaagatcgaggacggcggcaaggccgccctgagccagaagatgagaaccggcgacgagctggtgaacatcaacggcacccccctgtacggcagcagacaggaggccctgatcctgatcaagggcagcttcagaatcctgaagctgatcgtgagaagaagaaacgcccccgtgagcagaccccacagctggcacgtggccaagctgctggagggctgccccgaggccgccaccaccatgcacttccccagcgaggccttcagcctgagctggcacagcggctgcaacaccagcgacgtgtgcgtgcagtggtgccccctgagcagacactgcagcaccgagaagagcagcagcatcggcagcatggagagcctggagcagcccggccaggccacctacgagagccacctgctgcccatcgaccagaacatgtaccccaaccagagagacagcgcctacagcagcttcagcgccagcagcaacgccagcgactgcgccctgagcctgagacccgaggagcccgccagcaccgactgcatcatgcagggccccggccccaccaaggcccccagcggcagacccaacgtggccgagaccagcggcggcagcagaagaaccaacggcggccacctgacccccagcagccagatgagcagcagaccccaggagggctaccagagcggccccgccaaggccgtgagaggccccccccagccccccgtgagaagagacagcctgcaggccagcagagcccagctgctgaacggcgagcagagaagagccagcgagcccgtggtgcccctgccccagaaggagaagctgagcctggagcccgtgctgcccgccagaaaccccaacagattctgctgcctgagcggccacgaccaggtgaccagcgagggccaccagaactgcgagttcagccagccccccgagagcagccagcagggcagcgagcacctgctgatgcaggccagcaccaaggccgtgggcagccccaaggcctgcgacagagccagcagcgtggacagcaaccccctgaacgaggccagcgccgagctggccaaggccagcttcggcagacccccccacctgatcggccccaccggccacagacacagcgcccccgagcagctgctggccagccacctgcagcacgtgcacctggacaccagaggcagcaagggcatggagctgccccccgtgcaggacggccaccagtggaccctgagccccctgcacagcagccacaagggcaagaagagcccctgcccccccaccggcggcacccacgaccagagcagcaaggagagaaagaccagacaggtggacgacagaagcctggtgctgggccaccagagccagagcagccccccccacggcgaggccgacggccaccccagcgagaagggcttcctggaccccaacagaaccagcagagccgccagcgagctggccaaccagcagcccagcgccagcggcagcctggtgcagcaggccaccgactgcagcagcaccaccaaggccgccagcggcaccgaggccggcgaggagggcgacagcgagcccaaggagtgcagcagaatgggcggcagaagaagcggcggcaccagaggcagaagcatccagaacagaagaaagagcgagagattcgccaccaacctgagaaacgagatccagagaagaaaggcccagctgcagaagagcaagggccccctgagccagctgtgcgacaccaaggagcccgtggaggagacccaggagccccccgagagcccccccctgaccgccagcaacaccagcctgctgagcagctgcaagaagccccccagccccagagacaagctgttcaacaagagcatgatgctgagagccagaagcagcgagtgcctgagccaggcccccgagagccacgagagcagaaccggcctggagggcagaatcagccccggccagagacccggccagagcagcctgggcctgaacacctggtggaaggcccccgaccccagcagcagcgaccccgagaaggcccacgcccactgcggcgtgagaggcggccactggagatggagccccgagcacaacagccagcccctggtggccgccgccatggagggccccagcaaccccggcgacaacaaggagctgaaggccagcaccgcccaggccggcgaggacgccatcctgctgcccttcgccgacagaagaaagttcttcgaggagagcagcaagagcctgagcaccagccacctgcccggcctgaccacccacagcaacaagaccttcacccagagacccaagcccatcgaccagaacttccagcccatgagcagcagctgcagagagctgagaagacaccccatggaccagagctaccacagcgccgaccagccctaccacgccaccgaccagagctaccacagcatgagccccctgcagagcgagacccccacctacagcgagtgcttcgccagcaagggcctggagaacagcatgtgctgcaagcccctgcactgcggcgacttcgactaccacagaacctgcagctacagctgcagcgtgcagggcgccctggtgcacgacccctgcatctactgcagcggcgagatctgccccgccctgctgaagagaaacatgatgcccaactgctacaactgcagatgccaccaccaccagtgcatcagatgcagcgtgtgctaccacaacccccagcacagcgccctggaggacagcagcctggcccccggcaacacctggaagcccagaaagctgaccgtgcaggagttccccggcgacaagtggaaccccatcaccggcaacagaaagaccagccagagcggcagagagatggcccacagcaagaccagcttcagctgggccacccccttccacccctgcctggagaaccccgccctggacctgagcagctacagagccatcagcagcctggacctgctgggcgacttcaagcacgccctgaagaagagcgaggagaccagcgtgtacgaggagggcagcagcctggccagcatgccccaccccctgagaagcagagccttcagcgagagccacatcagcctggccccccagagcaccagagcctggggccagcacagaagagagctgttcagcaagggcgacgagacccagagcgacctgctgggcgccagaaagaaggccttccccccccccagaccccccccccccaactgggagaagtacagactgttcagagccgcccagcagcagaagcagcagcagcagcagcagaagcagcaggaggaggaggaggaggaggaggaggaggaggaggaggaggaggaggaggaggaggaggaggccgaggaggaggaggaggagctgcccccccagtacttcagcagcgagaccagcggcagctgcgccctgaaccccgaggaggtgctggagcagccccagcccctgagcttcggccacctggagggcagcagacagggcagccagagcgtgcccgccgagcaggagagcttcgccctgcacagcagcgacttcctgccccccatcagaggccacctgggcagccagcccgagcaggcccagcccccctgctactacggcatcggcggcctgtggagaaccagcggccaggaggccaccgagagcgccaagcaggagttccagcacttcagcccccccagcggcgcccccggcatccccaccagctacagcgcctactacaacatcagcgtggccaaggccgagctgctgaacaagctgaaggaccagcccgagatggccgagatcggcctgggcgaggaggaggtggaccacgagctggcccagaagaagatccagctgatcgagagcatcagcagaaagctgagcgtgctgagagaggcccagagaggcctgctggaggacatcaacgccaacagcgccctgggcgaggaggtggaggccaacctgaaggccgtgtgcaagagcaacgagttcgagaagtaccacctgttcgtgggcgacctggacaaggtggtgaacctgctgctgagcctgagcggcagactggccagagtggagaacgccctgaacagcatcgacagcgaggccaaccaggagaagctggtgctgatcgagaagaagcagcagctgaccggccagctggccgacgccaaggagctgaaggagcacgtggacagaagagagaagctggtgttcggcatggtgagcagatacctgccccaggaccagctgcaggactaccagcacttcgtgaagatgaagagcgccctgatcatcgagcagagagagctggaggagaagatcaagctgggcgaggagcagctgaagtgcctgagagagagcctgctgctgggccccagcaacttctag

SEQ ID NO: 205291 - DNA, 4482 bp, Artificial Sequence
  derived and/or modified sequence
atggagaaccgccctggctcctttcagtatgtccccgtgcagttgcagggaggggcgccatgggggtttaccctgaaaggtggtctggagcattgtgagccacttaccgttagtaagattgaggatgggggtaaggccgctcttagccagaaaatgcgtaccggggacgagttagtaaacatcaacggcactcctttgtatggtagcaggcaggaagcactgatactgatcaaggggagcttcaggatcctgaagcttattgtgcgcagaaggaatgctcctgttagtaggccacactcctggcacgtggccaagctactggaaggatgcccggaagccgcaaccaccatgcatttcccttctgaagctttttctctttcttggcactccggttgtaataccagcgacgtttgtgtgcagtggtgtcccctgagtcggcattgtagtaccgaaaagagctccagcatcggcagcatggagagcctcgagcagccaggtcaggccacatacgagagtcatcttctccctatcgatcagaatatgtaccctaatcagagggactcagcgtacagtagcttttcagcctccagcaacgcgagcgactgtgccttgtccctgcgtcctgaagagccagcctccactgattgcataatgcaagggccagggcccaccaaagcgccaagtggacgccctaatgtggccgagacgtctggaggcagccggcggaccaacggcggacacttgaccccatcatctcagatgagttcacgcccgcaggagggataccagtcaggtccagctaaagctgtgagagggcctcctcaacctcccgtccggagggattccttgcaggcttcgagagcacagctccttaacggcgaacagagaagggcttccgaacccgttgttccgctgccccagaaggagaaactgtctcttgaaccggtattgccagcccgaaatcccaacaggttctgctgtctctctggacacgatcaagtgacctctgaggggcatcagaactgcgagttttcacaaccgccggaaagttctcagcagggctctgaacacctcctgatgcaggcgagcactaaagcggttgggtcgcccaaagcctgcgatcgggctagcagcgttgacagcaaccccctcaacgaagcttccgccgagctcgctaaggcatctttcggtcgtccccctcaccttattggccctactggccatcggcacagcgccccggaacagcttttggcatctcacctgcagcacgtacacttagatactcgagggagcaagggcatggagttgccccccgtgcaggatggacaccaatggactttgtctcctctccatagcagccataaaggtaagaagtctccttgcccccctacaggtgggacacacgaccaatcatcaaaagaacgcaagactaggcaagtggacgaccgctccctagtactgggccatcagtcccagtcttcaccaccccacggcgaggccgatggccaccccagcgaaaaaggctttctggaccccaacagaactagccgcgcagcaagtgagctcgcaaaccagcaaccaagtgcttctggatctctggtacaacaggcaacagattgctcaagtacgactaaagcagcctcaggcacagaagctggagaagaaggagactccgaaccaaaagaatgttccagaatgggtgggcgccgcagcggaggtactagaggtaggtctatccaaaacagacggaaatctgaacggtttgccactaatctgcgtaacgagatccagcggcgcaaggcgcagttacagaaatctaaaggccctctgtcgcaactgtgtgacacaaaggaacccgttgaagagacgcaggaaccccccgaaagccccccccttaccgccagtaatacctcactgctgtcctcttgcaagaaaccacctagcccccgcgacaagttattcaacaaatctatgatgcttcgtgcgcgaagctctgagtgcctaagccaggcaccagaatctcacgagtcccggacaggattggaaggcagaataagccctggccagaggccagggcagtctagtctcgggctgaacacttggtggaaggcgccggatccatcttcaagtgatcccgagaaagctcacgcccactgcggtgtccgtggaggccactggagatggagccctgagcacaattcccagccgctagtggccgctgccatggagggacctagcaaccctggcgataacaaagaactgaaggcttccacggctcaggccggcgaggacgccatcttgctgcctttcgctgatcggaggaaattcttcgaggaatcaagcaaatccctttcaactagccacctgcccggcctgacaacacactcaaataagacatttacacagagacccaagccgatcgatcaaaattttcaacccatgagcagcagctgcagagagctgagaaggcatcccatggaccagtcttaccactccgctgaccagccctatcacgctacggaccagtcataccactccatgagtcctttgcagtctgagacacccacatactcagaatgctttgcaagcaaaggcctcgagaactccatgtgctgcaagccgctgcactgcggcgactttgattaccaccggacatgcagttactcctgcagcgttcagggggcactggttcacgacccctgcatctactgctccggggagatctgcccggcgctgctgaaacgcaacatgatgccgaattgctacaattgtagatgtcatcaccaccagtgcatccgctgttcagtctgttatcataatccacaacattcagccctggaggactctagtctggcgcctgggaatacttggaagccacgcaaactgactgtgcaagagttcccgggcgacaaatggaatccaattactggcaacagaaaaacatctcagtcagggagagagatggctcactccaagacctcattctcttgggccactcctttccatccatgcctggagaatcccgccctggatctcagctcttacagagctatttcctcgcttgatcttttgggcgacttcaagcacgcccttaagaagtccgaagaaacaagcgtgtatgaggagggtagcagtctggcaagcatgccacacccattgagatctcgcgcattctccgagtcccacataagcttagcgcctcagtctacacgggcatgggggcagcaccgaagagagctcttcagcaagggcgacgagactcaaagcgatttgctcggagcccggaaaaaagcatttccaccaccgcgaccaccaccacctaactgggaaaagtaccgcctgtttcgtgccgcccagcagcagaagcagcagcagcaacagcagaaacagcaggaagaggaggaggaagaggaggaggaagaggaagaagaggaagaggaggaggaggaagaggcagaggaagaagaggaggaacttcccccacaatactttagcagtgaaacatcgggatcttgtgccctcaatcctgaggaggtgctagagcaacctcagcccctctccttcgggcatcttgaaggatctcggcagggctcacagtccgtgccggccgagcaggagagtttcgcactgcattcgagcgacttcctgcctcctattcggggccacctcgggagtcagccggagcaagcacagcctccctgttactacggcatagggggtctgtggaggacaagtgggcaggaagctactgagtcagccaagcaggaattccaacatttctcacctccctcaggcgctcccgggatcccaacgagttacagcgcctattataatatatctgtagccaaggccgagctccttaacaagcttaaagatcagcctgagatggctgagattggcttgggtgaggaagaagttgatcacgagctggcccagaaaaaaatccagctcatcgagagtatttcccggaagctgtctgttctgcgcgaggctcaaagaggtctgttggaggatatcaatgcaaattcagcactgggcgaggaagtggaagcgaatttaaaagccgtgtgtaaatctaatgagtttgaaaaataccatcttttcgtcggtgacctggataaagtcgtcaacctactgctgtctctgtcaggaagactggcccgcgtcgagaacgctctcaatagcatcgattccgaagctaatcaggagaagcttgtgctgattgaaaagaagcagcagctcactggccagttagcagatgctaaagagctgaaggaacacgtggatcggagagaaaagctcgtcttcgggatggtgtctcgctacttaccccaggatcagctccaagactatcaacacttcgtgaagatgaagtccgccctgattatagaacagcgggaactagaagagaaaatcaagcttggagaggagcagctcaagtgtctccgcgagtcactgctgttgggtccaagcaatttctag

SEQ ID NO: 205292 - DNA, 4482 bp, Artificial Sequence
  derived and/or modified sequence
atggagaacagacctggcagcttccagtatgtgcctgtgcagctgcagggcggggccccctggggcttcaccctgaagggcggcctggagcactgtgagcccctgactgtgtccaagattgaagatggcggcaaggccgccctgagccagaagatgaggactggagatgagctggtgaacatcaatggcacccccctgtatggcagccggcaggaggccctgatcctgatcaagggcagcttccgcatcctgaagctgattgtgagaagaagaaatgcccctgtgtcccggccccacagctggcacgtggccaagctgctggagggctgcccagaggccgccaccaccatgcacttccccagcgaggccttcagcctgtcctggcacagcggctgcaacaccagtgatgtgtgtgtgcagtggtgccccctgagccgccactgcagcacagagaagagcagcagcatcggctccatggagagcctggagcagcccggccaggccacctatgagagccacctgctgcccatcgaccagaacatgtaccccaaccagagggacagcgcctacagcagcttcagcgccagcagcaatgccagtgactgtgccctgagcctgcggcctgaggagcccgccagcacagactgcatcatgcagggccctggccccaccaaggcccccagcggccggcccaacgtggccgagaccagcggcggcagcaggaggaccaacggcggccacctgacccccagcagccagatgagcagccggccccaggagggctaccagagcggccctgccaaggctgtgcggggccccccccagccccctgtgagaagagacagcctgcaggccagccgggcccagctgctgaatggagagcagaggcgggccagcgagcctgtggtgcccctgccccagaaggagaagctgagcctggagcctgtgctgcctgccaggaaccccaaccgcttctgctgcctgagcggccatgaccaggtgaccagcgagggccaccagaactgtgagttcagccagcccccagagagcagccagcagggcagcgagcacctgctgatgcaggccagcaccaaggctgtgggcagccccaaggcctgtgaccgggccagctctgtggacagcaaccccctgaatgaggccagcgctgagctggccaaggccagctttggccggcccccccacctgattggccccaccggccaccgccacagcgcccctgagcagctgctggccagccacctgcagcacgtgcacctggacacccggggcagcaagggcatggagctgccccctgtgcaggacggccaccagtggaccctgagccccctgcacagcagccacaagggcaagaagagcccctgcccccccaccggcggcacccatgaccagagcagcaaggagaggaagacccggcaggtggatgacaggagcctggtgctgggccaccagagccagagcagcccccctcatggagaggctgatggccaccccagcgagaagggcttcctggaccccaacagaaccagccgggccgccagcgagctggccaaccagcagcccagcgccagcggcagcctggtgcagcaggccacagactgcagcagcaccaccaaggccgccagcggcacagaggccggggaggagggggacagcgagcccaaggagtgcagcaggatgggcggcagaagaagtggcggcacccggggccgcagcatccagaacagaaggaagtcagaaagatttgccaccaacctgagaaatgagatccagaggaggaaggcccagctgcagaagagcaagggccccctgagccagctgtgtgacaccaaggagcctgtggaggagacccaggagcccccagagagcccccccctgacagccagcaacaccagcctgctgagcagctgcaagaagccacccagcccccgggacaagctgttcaacaagtccatgatgctgcgggcccggagcagcgagtgcctgagccaggcccctgagagccatgagagcaggacaggcctggagggccgcatcagccctggccagaggcctggccagagcagcctgggcctgaacacctggtggaaggccccagaccccagcagcagtgaccctgagaaggcccacgcccactgcggcgtgcggggcggccactggcgctggagccctgagcacaacagccagcccctggtggccgccgccatggagggccccagcaaccctggggacaacaaggagctgaaggccagcacagcccaggccggagaagatgccatcctgctgccctttgctgacaggaggaagttctttgaggagagcagcaagagcctgagcaccagccacctgcccggcctgaccacccacagcaacaagaccttcacccagaggcccaagcccatcgaccagaacttccagcccatgagcagcagctgccgggagctgcggcggcaccccatggaccagagctaccacagcgctgaccagccctaccacgccacagaccagagctaccacagcatgagccccctgcagagcgagacccccacctacagtgaatgttttgccagcaagggcctggagaacagcatgtgctgcaagcccctgcactgtggggactttgactaccacaggacctgcagctacagctgcagcgtgcagggcgccctggtgcatgacccctgcatctactgcagcggggagatctgcccagccctgctgaagaggaacatgatgcccaactgctacaactgccgctgccaccaccaccagtgcatccgctgcagcgtgtgctaccacaacccccagcacagcgccctggaggacagcagcctggcccctggcaacacctggaagcccaggaagctgactgtgcaggagttccctggggacaagtggaaccccatcaccggcaacaggaagaccagccagagcggccgggagatggcccacagcaagaccagcttctcctgggccacccccttccacccctgcctggagaacccagccctggacctgagcagctaccgggccatcagcagcctggacctgctgggggacttcaagcacgccctgaagaagtctgaggagacctctgtgtatgaggagggcagcagcctggcctccatgccccaccccctgcggagccgggccttcagcgagagccacatcagcctggccccccagagcacccgggcctggggccagcacagaagagagctgttcagcaaaggagatgagacccagagcgacctgctgggcgccaggaagaaggccttccccccaccccggcccccaccacccaactgggagaagtaccgcctcttccgggccgcccagcagcagaagcagcagcagcagcagcagaagcagcaggaggaggaggaggaggaggaggaggaggaggaggaggaggaggaggaggaggaggaggaggccgaggaggaggaggaggagctgcccccccagtacttcagcagcgagaccagcggcagctgtgccctgaaccctgaggaggtgctggagcagccccagcccctgagctttggccacctggagggcagccggcagggcagccagagcgtgcctgctgagcaggagagctttgccctgcacagcagtgacttcctgccccccatccggggccacctgggcagccagcctgagcaggcccagcccccctgctactacggcatcggcggcctgtggaggaccagcggccaggaggccacagagagcgccaagcaggagttccagcacttcagcccccccagcggggcccctggcatccccaccagctacagcgcctactacaacatctctgtggccaaggccgagctgctgaacaagctgaaggaccagcctgagatggccgagatcggcctgggggaggaggaggtggaccacgagctggcccagaagaagatccagctgattgagagcatcagcaggaagctgtctgtgctgcgggaggcccagaggggcctgctggaggacatcaatgccaacagcgccctgggggaggaggtggaggccaacctgaaggctgtgtgcaagagcaatgaatttgagaagtaccacctgtttgtgggggacctggacaaggtggtgaacctgctgctgagcctgagcggccgcctggcccgggtggagaatgccctgaacagcattgacagcgaggccaaccaggagaagctggtgctgattgagaagaagcagcagctgaccggccagctggctgatgccaaggagctgaaggagcacgtggaccggcgggagaagctggtgtttggcatggtgagccgctacctgccccaggaccagctgcaggactaccagcactttgtgaagatgaagagcgccctgatcatcgagcagcgggagctggaggagaagatcaagctgggggaggagcagctgaagtgcctgcgggagagcctgctgctgggccccagcaacttctag

SEQ ID NO: 205293 - DNA, 4482 bp, Artificial Sequence
  derived and/or modified sequence
atggagaaccggcccggcagcttccagtacgtgcccgtgcagctgcaggggggcgccccatggggctttacactgaagggtggcctggagcattgtgaaccactgacagtttccaaaatcgaagatggagggaaggcagcccttagtcagaagatgaggacaggggatgaactggtcaacatcaacgggactcccctgtatgggagccgacaggaggctctgattctaatcaagggaagctttagaatactgaaacttatcgtgcgtaggagaaatgctccagtgtccaggccacactcctggcacgttgccaagctactggagggatgcccagaggccgcgaccacaatgcactttccgtctgaggcttttagtttgagctggcattctggatgtaacacttctgatgtgtgcgtgcagtggtgccccctgtcaaggcactgcagcactgagaagtccagctccatcggttctatggagtctctggaacagccgggccaagcaacctacgagagccaccttctgccaattgaccagaacatgtatcccaaccagagagatagtgcctattccagcttctctgcttctagcaacgccagcgactgtgcactgtcccttaggccagaagaaccagcctccacggattgtatcatgcagggaccaggtcccacgaaggctccatcaggtagacctaatgtcgccgaaactagcggtgggtcccgacgtacaaacggcggtcacttaaccccgtcatcacaaatgagctccaggcctcaggagggataccaatcagggccagcgaaagctgttcgtggcccgccccagcctcccgtccggcgcgactccctgcaagcctcaagggcccaattgttgaacggggaacagcggagggcctccgagcctgtggtgccgctaccccaaaaggaaaagctatctctggaaccagttctcccagcgaggaaccccaaccggttttgttgcctgagtggccatgaccaagtaaccagtgagggacaccagaactgtgaattcagtcagccccctgaaagctcccagcaagggagtgagcatctgcttatgcaggcttcgacaaaggccgtggggtcccctaaagcctgtgaccgcgcttccagcgtggactcaaatcctctcaatgaggcttcagccgagctggccaaagcgtcttttgggagaccgccccatctcatcgggcccaccggccacaggcattccgctcctgaacagcttttagccagccatctacagcatgtgcatttggacaccaggggaagtaaagggatggagctgccgcccgtgcaagatggacatcagtggactctaagcccacttcactcttcccataaggggaagaagtccccctgcccccccaccgggggaacacatgatcaatctagcaaggagcggaaaacccgccaggtcgacgaccggtccctggtgctggggcatcagtctcagagcagccccccgcacggggaagcagacggacatcccagcgagaagggctttcttgaccccaatcgcactagccgagcggctagtgagttggcaaatcaacagcctagtgcttccgggtcattagtgcagcaagcaaccgattgcagctccaccaccaaggcagcaagcggcaccgaagccggtgaagagggcgacagtgagccgaaggagtgctcccgaatgggcggacgacggagcggcggcacacgcggccgtagcatccagaatagaagaaagtcggaaaggttcgcaacaaatttacgaaacgagattcagcggaggaaggctcagctgcagaaaagcaaagggccactgtcccaactgtgtgatacaaaagaacctgtggaagagacccaagaacctcccgaatcgcctccacttacagcctccaatacatctctgctgagctcttgcaaaaaaccaccaagccccagggataagctgttcaacaaatccatgatgctgcgcgcccgcagcagtgaatgcctgagccaagctccggagtcacatgaatcgcgtaccggactagaggggaggatttcccccgggcagcggcccggacaatcttctctgggactgaacacttggtggaaagcccctgacccttcgagtagcgatcctgaaaaggcgcacgcccattgtggggtgcgtggtggtcactggcggtggagcccggaacacaactcacagccccttgttgcagcagctatggaagggcctagcaatccaggagacaataaagaattaaaggccagtacagcccaggctggcgaagatgccatactcctgccattcgcagaccgaagaaaattcttcgaagaaagctctaagtctctgtccaccagccacctccccggtctgacaactcatagcaacaaaacattcactcagaggcctaaacctatcgaccagaactttcagcctatgagcagtagttgccgggagctgagacggcatcccatggatcagtcctaccacagtgctgatcagccttatcacgccactgatcagtcctatcactccatgtccccactgcagagcgagactcccacctattctgagtgcttcgcctccaagggactggaaaattctatgtgctgcaaacctttgcactgcggagatttcgattaccatcgcacgtgttcatattcctgttcagtacagggagcattagttcatgatccctgtatctactgtagcggggaaatatgcccagcccttctgaagaggaacatgatgcccaactgctacaactgccgatgtcatcaccaccaatgcatccgatgctccgtctgttaccataacccacagcattctgcccttgaagatagcagcctcgccccaggcaacacatggaaacctaggaagctaacagtccaggaattccctggtgataagtggaatcccatcacagggaacagaaagacttcacagagtggtagagaaatggcccattcaaagaccagtttcagctgggcaacacctttccacccatgcctagagaaccctgcactggacctgagcagttaccgggccatatcttcgctggacctactgggcgactttaagcacgcactgaagaaaagcgaagaaaccagtgtctacgaggaggggtcctcgctcgcgtccatgccacacccattacgtagtcgagcattcagcgagtcacacatctcactcgcgcctcagtccaccagggcctggggccagcaccggcgagagctgttttctaaaggtgacgaaacacagagcgaccttctgggcgcgagaaagaaggctttccctcctccacggccgcccccaccaaattgggaaaagtaccgtctcttccgcgccgcccagcagcagaaacaacagcagcagcagcaaaagcaacaggaagaggaggaggaggaggaagaggaagaggaggaagaagaggaagaggaggaagaggaggcggaggaggaagaggaggagctccccccgcagtactttagctcggaaaccagtgggagttgtgccctcaatcccgaagaggtgctcgagcagcctcagccgctaagctttggtcatctcgaaggaagtagacaggggtctcagagtgttcctgccgagcaagagagctttgccctgcactctagcgatttcctgcctcctatcagaggccatttaggttcccagcctgaacaagcccagccaccctgttactacgggataggtgggctgtggcgcacttcaggacaggaggcaaccgagtctgcaaagcaggaatttcaacacttcagccccccatcaggagctccgggcattccaacctcttactccgcctattacaatatcagcgtggcgaaagccgagctgcttaacaaattaaaggatcagcccgagatggctgagattggcttaggagaggaggaagtggatcacgagctagcacagaagaaaatacagcttatcgagtctatctcgagaaagttgtcggtgttgagagaagcccagcgagggctgctggaggatataaacgcaaacagtgcgctgggcgaggaggtcgaagccaacctcaaggccgtctgtaaatcgaacgaattcgagaaatatcacctgttcgtcggcgatctggataaagtggtcaacttactgttatctttgtccggaaggttggcccgggtagagaatgccttaaacagcatcgattctgaggccaatcaggaaaaactagtcctgattgaaaaaaagcagcagctgactggacaactggctgatgccaaagaactcaaggaacacgtcgatcgccgggaaaaattagtattcggcatggttagcaggtatttaccccaggaccagttgcaggattaccagcattttgttaaaatgaagagtgccttgataatagaacaacgcgagctggaggaaaagattaagttaggggaggagcagctgaaatgtctccgagagagcctgctgctgggcccgtccaacttttag

SEQ ID NO: 205294 - DNA, 4481 bp, Artificial Sequence
  derived and/or modified sequence
atggagaatagacctggcagctttcagtacgtcccagtccagctccaaggtggtgccccttggggcttcaccttgaaaggagggctagagcattgtgagcctctgactgtgtccaaaattgaagatggaggcaaggccgctttgtcccaaaaaatgcggaccggggacgaattggtcaacatcaatgggactccactgtacggatctcgtcaggaggccctgatcctaattaaggggtctttccgtattctgaaactcatagtcagacgccgaaatgccccagttagcaggccgcattcctggcacgtggccaaactgttggaagggtgcccagaggccgcaactactatgcacttcccaagtgaggcattttctctctcttggcactcaggatgtaacacctcagatgtgtgtgtccagtggtgtccgttgagccgtcactgttctacagagaagtcctcttcaattggatctatggagagcctggaacagccaggccaggccacttacgagagccacctcttacccattgatcagaacatgtatcctaaccagagggactccgcgtacagtagtttttccgccagctcgaacgcatccgattgcgcactgtcactgaggcccgaagagcctgccagtaccgactgcattatgcagggacccggaccaacaaaggccccttcaggcagaccaaatgtcgctgaaactagcgggggtagccgcaggacgaacggcggacacctcacccctagttcgcagatgagcagtaggccacaagaggggtaccaaagcggtccagcaaaggccgtgcgaggaccaccccagcctccggtgagaagggatagcctccaggcatctcgtgctcagttattaaacggggaacaacgtcgagcaagtgaacctgttgtgccgctgccacagaaagaaaagctaagcctcgagccagtactgccagcccgtaaccctaaccgcttctgttgccttagcggccacgatcaggtgactagtgaaggccaccagaattgcgaattttctcagcccccagaatctagccagcaggggtccgagcaccttctgatgcaagctagcaccaaggccgtcggcagtccaaaggcctgcgaccgagcttcaagcgttgatagtaaccccctgaatgaggcctctgccgagctggcaaaagctagctttggcaggccccctcacctgattggaccaacagggcatcgtcattccgcacctgagcagctgcttgcctcacacctccagcacgtgcaccttgatacccgtggcagcaaaggcatggagctccctccggtccaagacggtcatcaatggactctttctcccctacattcctcacataagggcaaaaagagtccttgcccacccaccggcggtacccacgaccaaagttccaaggagcgaaaaaccagacaggttgatgaccgctctctcgttttgggccaccagagccaatcttcacctcctcacggagaggccgacggacaccctagcgaaaaggggttcttagacccaaatcggacttctcgtgccgcttcagagctggctaaccagcagcctagcgcttcgggaagtttggtacaacaggccactgactgtagctctaccactaaagccgctagcggcaccgaggccggagaagagggggactcagagccaaaagagtgctctcggatggggggaaggcggtccggtggcactcgtggtagatctattcagaacagacgcaaaagcgaacgtttcgctacaaatctgcggaatgagatccaaaggcggaaggcacagttacaaaagtctaagggtcctttatctcagctgtgtgacaccaaagagcctgtggaagaaactcaggagcccccagagagccctcctttaaccgccagtaatacaagcctgctctcttcgtgtaaaaaacccccttcaccacgagataaactgttcaacaagtccatgatgctgcgcgctcggtctagcgagtgtctgtcccaagcccctgaaagccatgaatcaagaaccggccttgagggtcggatttccccgggtcagaggcccggacaaagctcactgggactgaacacctggtggaaggcacctgatccctcgagctctgatcctgaaaaagctcatgcccattgcggcgtcagaggtgggcactggcgttggtctcccgaacataattctcaacctctggtggcggctgctatggagggcccatccaaccccggtgataacaaggaacttaaggcctccaccgctcaggcaggcgaggatgccatacttcttcctttcgccgacagaagaaagtttttcgaggaaagctctaagtctctttcaacctctcacttgcccggactgaccacacatagcaataaaacttttacccagcgtcccaaacccattgatcagaactttcaacccatgtcaagcagctgtagggagctcagacgtcaccctatggatcaaagttaccattctgccgaccagccataccacgctaccgatcagtcttaccattctatgtcaccattgcaatcagagactcctacctattccgaatgttttgccagcaaagggctggaaaactcgatgtgctgcaaacccctgcactgcggcgactttgactaccacaggacatgcagttattcttgttcagtgcaaggagcactagtacatgatccatgcatctattgctctggcgagatttgccccgctctgctgaagaggaacatgatgcccaattgctacaactgccgatgccatcaccatcagtgtatacggtgctccgtctgttaccacaacccccagcactccgcactcgaggatagctcattggcacccggtaatacatggaagccaagaaagctcaccgtacaagaatttcccggagataagtggaatcccatcacgggcaaccgcaaaactagccaatctggaagagagatggcgcacagcaaaacctcattctcttgggccacgccctttcacccgtgtctggaaaatcctgcactggacctgtcctcgtatagagctattagctccctggacctactgggggactttaaacacgccctgaagaaaagcgaggagacttcagtttacgaggagggcagctctttagccagtatgccgcatccacttcgttctagagctttttctgagtcccacataagcttggcaccccagtccacacgcgcttggggacaacaccgcagggaactgttctctaagggagatgagacacagagcgatctactgggagcccgtaaaaaagcctttcctcctcccagacccccaccgccaaactgggagaagtatagactgttcagagctgcacagcaacagaagcagcagcagcagcagcaaaaacaacaggaggaggaagaggaggaggaagaagaggaggaggaggaagaagaggaggaagaagaagaggcggaagaggaggaagaagaactgcctccacagtacttctcatccgaaacatcaggttcttgcgctctgaacccagaggaggtcttggagcaaccccaaccactcagttttggccatctggaagggagtcggcagggctctcagagtgttcctgctgaacaagagagtttcgctctgcacagttccgattttttaccccctatcaggggtcatttggggagccagcccgagcaggctcaaccgccttgctactacggaatagggggtctgtggcggaccagcgggcaggaggctactgagtccgccaagcaggagttccagcacttctccccccctagcggtgcccctggaattcctacaagttacagcgcttactacaatatcagcgtggcaaaagctgagctactgaacaagctgaaggaccagccggagatggccgagattggactcggcgaggaggaggtcgatcatgagttggcccaaaaaaaaattcagctcattgagtccatctcccggaagctctcggtgctgcgggaggctcagcggggactgttggaggatattaacgccaactccgctttgggggaggaagtggaagctaatctgaaagcagtttgcaagagtaatgagttcgagaaataccacctgttcgttggggatctggacaaagtggtgaatctcctgcttagtttgagcggaaggctggcgcgagtcgaaaatgcgttaaacagtatagactccgaagccaaccaggagaagctcgtgctcatcgagaagaagcagcagctgacaggccaactcgcagatgcaaaggagctgaaagagcacgtcgacagaagagagaaactggtgttcggaatggtgtcccgctacctcccacaagaccagctccaggattaccagcactttgttaagatgaagagcgccttgatcatcgagcagcgagagctggaggagaaaatcaagcttggggaagagcaactcaagtgcctgcgggagtctcttctgcttggtcccagtaactttta

SEQ ID NO: 205295 - DNA, 9556 bp, Artificial Sequence
  derived and/or modified sequence
ccggcggcgcctgagcccagccgaggatggagaaccggcctgggtccttccagtacgtccctgtgcagctgcaagggggggcaccctggggcttcacccttaaggggggtctggaacactgtgagccgctcacagtgtctaagattgaagatggaggcaaggcagctttgtcccagaagatgaggactggtgatgagctggtgaatatcaatggcactccattatatggctcccgccaagaggccctcattctcatcaaaggctccttccggattctcaagctgattgtcaggaggaggaacgcccctgtcagtaggccgcactcatggcatgtggccaagctgctggagggatgccctgaagcagccaccaccatgcatttcccttctgaagccttcagcttgtcctggcattctggctgcaacacaagtgacgtgtgtgtgcagtggtgtccactctcccggcattgcagcaccgagaaaagcagctccattggcagcatggagagcctggagcaaccaggccaagccacctatgagagccatctgttgcctattgaccagaacatgtaccctaaccagcgtgactcagcctacagctccttctcggccagctcaaatgcttctgactgtgccctttccctcaggccagaggagccagcctctacagactgcatcatgcaaggcccagggccaactaaggcccccagtggccggcctaatgtggctgagacctcaggaggtagtcggcgcaccaatgggggccacctgacccccagctctcagatgtcatcccgtccacaggagggataccagtcagggcccgccaaagcagtcaggggcccaccacaacctccagtgaggcgggacagccttcaggcctccagagcccaactcctcaatggagagcagcgcagggcatctgagcctgtggtccccttgccacagaaggagaaactgagcttagagcctgtgctacccgcaaggaaccctaataggttctgttgcctcagtgggcatgaccaagtgacaagtgagggccatcagaactgtgagttcagtcagcctcctgaatccagccaacagggctctgagcatctactgatgcaggcctcaaccaaagctgttggatccccaaaagcctgtgacagagcttccagcgtggattccaacccactcaatgaggcttctgcagagctagctaaggcttcttttggcagacctccacatctcataggacccacagggcatcgccatagtgcccctgaacagctgctggcatcccacctgcagcatgtgcaccttgataccaggggcagcaaagggatggagctcccacccgtacaggatgggcaccagtggactctgtcccctttgcacagcagccacaaagggaagaaaagtccatgcccccctacaggaggaacccatgaccagtccagcaaagaaagaaagaccagacaagtggatgacaggtctttagttttgggacaccagagccaaagcagtcccccacatggagaggctgatggacacccctcagaaaaaggtttcctggacccaaacagaacaagcagagcagccagtgaattggccaaccagcaaccctctgcctctggctcccttgttcaacaagccacggactgttcttcaaccactaaagcagctagtggcacagaggcaggtgaagaaggggacagcgagcccaaggagtgcagccggatgggtggtaggcgaagtggagggacccggggccgctcgatccaaaaccggcggaagagtgagcgttttgctaccaatctgcgtaatgaaattcagaggaggaaggcccagctccagaaaagcaagggtcccttgtcacagctgtgtgacactaaggagccagtggaagagacccaggagcccccagaaagtcctccactcactgcctctaacacatctcttctatcttcatgtaaaaaacctcccagccccagagacaagctcttcaacaaaagcatgatgctcagagctaggtcttccgagtgcctcagccaagcccctgagagccatgaatctaggacaggcttagagggacgaataagccctggccagaggcctggccagtcctctttgggcctgaacacctggtggaaagcacctgacccatcctcctcagaccctgagaaagcacatgctcactgtggagtccgtggaggtcattggagatggtctccagagcataattcacagccacttgtggcagcagccatggaaggcccttccaacccaggtgacaacaaggaattgaaggcttctactgctcaagctggggaggatgccatcctcttgccttttgcagacagaagaaagttctttgaagagagtagcaaatccttatctacatctcatttgccaggtttaaccactcatagcaacaagacttttacccagagaccaaaacctatagaccaaaacttccagccaatgagctccagctgtagggaattgaggcgccatcccatggaccaatcatatcattccgcagaccaaccatatcatgccacagaccaatcatatcattccatgtcaccccttcagtcagaaactcccacttactcagaatgttttgcaagcaaaggtctagaaaattccatgtgttgtaagccactacactgtggtgattttgattaccacaggacctgctcttactcctgcagtgttcaaggagctctagtccatgatccttgcatttattgttctggggaaatctgccctgccttgctaaagagaaatatgatgccaaattgctacaactgccggtgccaccaccaccaatgcattcggtgttcagtttgctatcataatcctcagcacagtgccctcgaggacagcagcttggcacctggcaacacttggaaacccaggaagctgacagtgcaggaatttcctggggacaaatggaatccaataacaggaaacaggaagaccagccagtcagggagggaaatggctcattccaagactagcttttcatgggcaacccctttccatccttgccttgagaacccagcactggacttgtcaagctaccgagcaatttcttctcttgacctccttggagacttcaaacatgctttgaaaaaatcagaggaaacttcagtttatgaggaggggagctcccttgcctccatgccccacccactgcgcagccgtgccttctcagagagtcacatcagcttggcgccccaaagcacccgggcctgggggcagcataggagggagctctttagcaaaggtgatgagacccagtcggatcttctcggagccaggaagaaggcctttcctcctcctcgccctcctcctcccaactgggagaagtacaggctctttcgtgcagcccagcagcagaagcagcaacagcagcagcagaagcaacaggaggaggaggaggaggaggaagaagaagaagaagaggaagaggaagaggaggaggaggaggcagaggaggaggaagaggagctgccaccccagtatttcagttcagaaacctctggttcctgtgctctcaatcctgaggaggtcctagagcagccacaacccctcagctttggccacctggagggctcgagacagggttcacaaagtgtcccagcagagcaagaatcctttgcactccattccagtgatttcttgcctccaataaggggtcacttgggatctcaacctgagcaggctcagcccccttgctactatggcattggtgggctttggaggacatcgggacaggaagccactgaatccgccaaacaagagtttcagcacttttcgcctccttcaggggccccaggaatccctacctcttactcagcttattacaatatttctgtggccaaggcagagctgctgaacaaactgaaagaccaacctgagatggcagagattggcctaggagaggaggaagttgaccatgaactggctcaaaaaaagatacagcttatcgaaagcatcagcagaaaactttctgtcttgcgggaggcccagcgagggctgctagaggacatcaatgccaattctgcccttggggaggaggtggaggccaacttaaaagccgtctgcaaatccaatgaatttgaaaagtaccacttgtttgttggggacctggacaaagtggtcaacctgttgctgtcactctctggacgactggcccgggtggagaatgctctgaacagcatcgattcagaggccaaccaggagaagttggtactgatagagaagaagcagcagctgacggggcagttggcagatgccaaggagctgaaggagcacgtggaccgccgggagaagttggtgtttggcatggtctcccgctacctgcctcaggaccagctccaagattaccagcactttgtcaagatgaaatctgctctcatcattgaacagcgagagctggaggagaagatcaagctcggggaagagcaactcaaatgtctcagggagagtctactcctggggcccagcaatttctaattctaccagcactctgccacagcatccctgcccagccatgtgggaagtgctttcaatcttctttgttagcagtttctcagcaagtagatagcaattagcagtttgttccagccctctaccctggatgtctctcactaccccttccctagcagtggtcctaaccagctaggagaccctggggaagccacaagcttctacccaagggagctgcagcaaggtgtgatcttagaaccacactctccttcccacagttgccaagggcaagtacttgctgcacagagaaccaaggaagtgccttcattctgctttgtactaggacaccaaagacatcaagtactcatcacccacccatatcatcaacagcctctaaaggctcagagggaatctgccttgcagctctactctgccccagggcttgtggccagccatttctcacagagagctggctgccttgagggcattcacctggcaccagtttcagggcctcacccaagctttgcaggggaaagcacagagggaggaattacactgaaaaaaatgcaagcaaaggttgagtacccccaggtgccccttaggaaggaaccaggtttaaataggctctacccttacctttcccagcagcaagttcaggggaagaggcctactcttagccctggctagtgtgaccctcttcctgtcctaagactttggtcctaccacctcttgtttcatctttcctttacattgctgggggttaccgcaggtgcctaccccagggcttcaccatatgggccattaatagctctactaaaactgacttctagatgtaggtttcattattgggggagggggttcttattgttatattttaaatggccttttgattttatttatttttatgttttgattatttttttcttttttaactaataaggcgagaagagggaagttggagagggaaaagttagcccagaaggaaagcattttctgcagatcagcctgaatccaccgtggctaggtaagcaagtgccaaggcgttgaattgttcccaccatagctaccgatgtctaggaaggagttttccccttgaactcagagcctccctactgtggcctggccttgtgcttcccttaaagtctaagtgacttgagtttagcattccccagcagggtttaagtttttcttactgatttctttttgaaaccaaagaaatctcctgaaatggagaaaggttcagtcatttctctaccatctccaagctatgggatcagtagaggtgagctcagaaggaactcctctaaccattgctttctcagcctgtggcctggctcaagggaaccaaaactcaaggtagctgggagctccagccagagccagctccccagagcaattgaagacccagccaggatcttaggcatacaaacaactaaaactgctgctgttgccaaggccctgacaccagtagctagtttctatgctggaaaagcagccctcaggtggacgatggcaagaagggggttatggccaaatgctgccctgttatccagcttagctccctgttcctcactaactggggccaatccttggtatcacacaacccagccaaggcctggcatctcttctagttactgctgagttcctcagggtccttgaaggtcaactgtagcagcagggatgtctcattcaaccaaagaatttgccaaggaacttttgctgctgttacaaatacttgtcactagcttccatttcctcttcattgtatttgaaaacaatgggagaatcttggccagcagggtgtcctggggtagggggtggggtaagcctttctgtggagctctgggtttgctcttagtactgctgccagaaacactgttagaatggcaaccctgccattctcccctccagtggaagattctactttattcaggaaggctggtggcttgcaggggctaggcttacacaagccagccaagattgagaaggtaggggagtgctttcaatggaggccatagttgtcatcttttcttctgagcaggctctaggacaaacaatgagcaaattgagatgtcctgtattgggaggatgaggctgatatgtttcatcattctcagaatttgtgggctagagcacctttttgggaatatgggcctagggaaaagaacggtcacttacctggacactatggccatagtcttgagtttttctagtcagcatgtgattggttgtaccttaagtttatgacaccaaaaatactattaactctgttatttttgttcttaatcccatctcaaattagtttctagagttagaatcagaacacaaggatgctcattttcacatggagggaaagttgccaaagcatttaaaaaataaccccaaaagtatatctagcagtgaagcttggtagataaaggtgaactgctaaacagacactggcgtgccacactcctgccagggcagtctcattgtgtgtgacggtgctgcaacactgccagtattacttgagatgcagtctctctcccctgttctcagttcctgggctcagccctcctccaaggcctgccagtgagtagcagtttggaaggcaggccaagggagatccccaaagacagttatcagtcttaacttctgctgtctcccgtcaaatacttatacaggcccccatgggtaataggcaagcatgatggctgatagagaagtcagtgcatgagttactatcacatgtccccccaacccctcctgccacctcccagggctctggataattgaatcttcctgagtcccacagctggagactcaaccaggatatagctgtaaatgcccaagtagaatctgacagaataagacagagacactgaaaataaagccctagaaaggaagaaattggaagcaaagaaaaggagaggtgaaaagataaaaagcctccttcaaggttaggttcaggttctgttttccatttaacctcatgtgccataaagctgcccaggcacaccagagccacatcctgaacccgaccctccctgacagtgctgctctgccagtagcaagccccagatggaggaagctgggcccatttctggccacttccacccatttggagctttgccagaggagtcgtctatgccaataatatttctgcaacagcatattatattatttgaagattagtagatctttttgggggggtggggcaggggacagtttctatagatgaagaaccagtgttggttgtacagctgttgggggtcatctatcccatgtgaagctattctttttccaaatcttgttgtttctgcatttgtgtcctccaccactcccttcttggctgacatagatatgcctgccagattgtcatcaagggtcatatttcaataaaaggtgctaaggacaaaaaaaaatctcatgtgttttaactcaggtgatggaagtctaaagattctgctgaaaagtactggaaaggaatttggtcacctatccatagtccttcacagataaacatatgaccagacccttacccacatccctaaacccttaccctggcctctgagggatggtattgatgctataccattcatcatccccagttaaatagcaggatctgccatagcctttttaggggaacagcttttagacatctatttcaagaccatcctgagtagggggtacagagtttaagccattggttatttctgttgttatcacagtattgaagcatggtatttttctactcagaaggatctcaggatcacagccctgccctttagctcactgatatatttcttcctctctggttactcagtggcaacatcacatccagtctaaccccatgtttagaatgcagaaaaagtcaacaataggtgtaatctcaggtatagacctaagcagtatacagagtctagttctggagtctagcctgatcgaaggtaagccattctttctagacttcttccaatcttgaattctgtctagtattttcatcttacttctagctgatagtccaatctcacaccttcatgctcagctccctggaaagcaagggccttggtgatctgctctccaaggcaacctcaaagattagactcaaatgtattccaggaagcaactctgacattgaaaagctttcttttttcgtgatccatattctgttcacattccaactatcctccttctactcaagatatccattgtggtagagtagaaagagtccagctttggcattagaatgaactgtgttcaaatcctggttctgccacttattcaatgaacctgggctactagctcaacttctgaggtcattttcttatctgtaaaatgggaacagtattatcttgcttgcagttattgtaacttgaaaataataaataaaagccactaacaatccaagaagttattaggcagaatcccaggcccaccccaaacccagtgatagcagtctgaattttaactagatttccaggagattcatgaacatattacagcatgggaagtactgacttgttgaaaacatattcagtacatggtaaccattattatagtcctgatctactcaattcattttttccttatcccaggcatattcttgctcttctcgtgttgctcacaactacctgcctggatgaatttaggaaagttgcaggatacaaggttaaaacacaagatcaaatgaacaatccgaaaatgttattaagaaaacagttccggccgggcatggtggctcacgcctgaaatcccagcactttgggaggccgaggcaggtggatcacgaggtcaggagatcaagaccatcctggctaacacggtgaaaccctatctctactaaaaatacaaaaaattagccaggtgtggtggcacgcaccagtagtcccagctactcgggaggctgaggcaggagaattgcttgaacctggaaggcagagattgcagtgagctgagaccacaccactgcactccatcctgggcaacagagtgagactttgtctcaaaaagaaagaaagaaagaaagaaagaaagaaagaaagaaaagaaagaaagaaagaaagaaagaaaacagttccatttacaatagcatc

SEQ ID NO: 205296 - DNA, 4482 bp, Artificial Sequence
  derived and/or modified sequence
atggaaaaccggcctggaagctttcagtacgtgccggtgcaactgcagggcggtgctccatggggatttacactgaaaggcggtctggagcactgtgagccactcacggttagcaagatcgaggatgggggaaaggctgcgcttagtcaaaagatgaggactggcgacgaactcgtcaatatcaacggaacccctctgtatggatcaagacaagaggccctgatcttgatcaaaggttctttccgtatcctcaaactaatcgtcaggaggcgcaacgccccggtgtcacgaccccatagttggcatgtggctaagctcctcgagggctgccctgaggcggccaccaccatgcattttccctccgaagctttttcactgtcttggcattcagggtgtaacacgagcgacgtgtgtgttcagtggtgcccactgtcacgccattgctcgactgagaagtcatccagtattggctcaatggagtcactagagcagcctggacaagctacttacgaatcccaccttttgcctatcgaccagaacatgtaccctaatcagcgggatagtgcttacagctctttttccgcgagttctaacgcttctgattgcgctttgagcctccgtcccgaggagcctgcaagcacagattgtatcatgcagggcccagggcccacaaaagcacctagcggacggcctaatgtcgccgaaacctcaggaggtagcagacggaccaatgggggccaccttacaccctcaagtcagatgtcctcccgtccccaggaaggctatcagagcggcccggcaaaggccgtccgcggcccacctcagccccctgtaagacgcgactccttgcaagcctcacgggcccagcttctcaacggcgagcaacgtagagccagcgagccggtggttcccctgccccagaaagaaaagctctctttggaaccggtgttacccgcaaggaaccctaatcggttctgctgcctgtctggacatgatcaagttactagtgagggacatcagaattgtgaattttcccagccgcccgaatctagccaacaagggtccgagcacctactcatgcaggcttccaccaaggctgtgggatcccccaaggcatgcgaccgcgcttcatcggttgacagcaatccccttaatgaagcctccgcagaactcgctaaagccagcttcggcaggccaccacacctaatcggccctactggacatagacattctgctcctgaacagttactggccagccatctccagcatgtccacctggatacacgcggatctaaagggatggaactgccccccgttcaagatggccatcagtggactctgagccctctgcactcttctcacaagggaaagaagagtccgtgcccccccaccggaggaacgcatgatcagtcatccaaggagaggaagacaagacaggtggacgacaggagccttgtgctaggtcaccagagtcagagctcacctcctcacggagaggctgacggacaccccagcgagaagggctttcttgacccgaaccggacctcgcgcgctgcgagcgagctggcaaaccagcagccatccgcttctgggagtttggttcagcaggccaccgactgctcaagcaccacaaaagctgcatcgggcacagaggcaggagaggagggggatagcgagccaaaggaatgcagccgtatgggaggacgccgtagcggaggtaccaggggaagaagtatacaaaatcgccggaaaagcgagaggttcgcaacaaatctacggaacgagatacagcggcggaaggcccagctgcagaaatctaaggggcccctgtcccagctctgtgataccaaggagccagtggaggagacacaagaaccgcccgaatctccccctctaacggcaagcaatacttctttgctttcatcatgtaagaagcctccttctccccgcgataagctattcaacaaatctatgatgctcagagcaaggtcatcagaatgtctctcacaggcccctgaatcccacgaatccaggaccggcttagagggcaggatttcacctgggcagagacctggccagtcttctctgggcctgaacacttggtggaaggccccggaccccagctcatctgatcccgaaaaggcacatgcacattgtggagtgagggggggccactggagatggtctcccgagcacaattcacaacccctcgtggccgcagcgatggaggggccatcaaatccaggtgacaacaaagaactgaaggcgtccaccgcccaggctggagaggatgcaattcttcttccattcgctgatcggagaaaattcttcgaggaaagctccaagtctctgagtacttcacacctccccggactgacaacccacagcaataaaaccttcacccagagacccaaacctatcgatcagaattttcagccaatgtcaagcagctgccgggagctccgtcggcaccccatggatcaaagctaccatagcgccgaccaaccttaccatgccactgaccaaagctaccatagcatgtcccctcttcagagcgagacaccaacctactctgaatgtttcgcttctaagggacttgagaattctatgtgctgtaagccattacattgcggggactttgactaccatagaacttgtagttatagctgcagcgtccaaggcgcactcgtgcatgacccatgcatctactgttctggggagatttgccctgcccttctcaaaaggaacatgatgcctaattgttacaattgtcggtgccaccatcatcagtgcattagatgctctgtttgctatcacaacccgcagcattctgcactggaagactcatctctggctccgggcaacacttggaagccaagaaaactgaccgttcaggaatttccaggggacaagtggaaccctataacagggaatcgcaagacctcccagtctggcagggaaatggctcacagcaagacgtctttctcttgggctacaccattccacccctgtcttgaaaatccagcacttgatctatctagttacagggcaatctcatcattggatctgctaggcgacttcaagcatgctctgaaaaagtccgaagagactagcgtttacgaggaagggagcagcctggcctcaatgcctcacccattgaggtctcgtgctttttctgaatctcacattagcttggccccccagagcactcgcgcatggggccaacataggagggaactcttcagcaagggagacgaaacacagtctgacctgctcggcgctaggaaaaaagcattcccacccccgcggcctcccccacccaactgggagaagtatcgcttgtttcgtgctgcacagcagcaaaaacagcagcagcaacagcaaaagcagcaggaggaggaggaggaagaagaagaggaagaagaagaagaagaagaggaggaagaggaggaagcggaagaagaagaagaggagctaccgccccagtatttctccagcgagacatctggttcctgcgccctgaaccccgaagaggtgctagagcagccccagccactaagcttcggacatctcgaaggttcacgccaagggagtcagtccgtgccggcagagcaggaatctttcgcactgcatagctcagacttcctaccccccatcagagggcacctcggatcacagccagaacaggctcagcctccctgttattatggcattggtggtctgtggcgaacaagcggccaggaagcaaccgagtcagctaaacaggagtttcagcacttctcccctccctcaggcgcccccggtatccctacaagctattctgcgtattacaacattagcgtggcaaaggctgaactgctgaacaaactgaaggaccaacctgagatggctgagatcggtttgggggaggaggaggtggatcacgagctggctcagaaaaagattcagctcattgagtccatcagccgcaagctttccgttctgcgcgaagctcagcgcggactcctggaagacattaatgcgaatagtgctctgggagaagaggtcgaggccaacctgaaggcagtttgcaaaagcaatgaattcgagaagtatcatctattcgtgggcgaccttgataaggttgtaaatctcctgctgtccctgtccggtaggctggctagggttgaaaacgctctcaatagcatagattcggaagctaaccaggagaaactggttctgatcgagaagaaacaacagcttacaggacagctggccgacgccaaggagctgaaagagcacgtggacagacgggagaaactggtctttggaatggtgagcagataccttccccaggaccagctccaggattatcagcacttcgttaagatgaagtctgctctgataatcgaacagagggagctggaagagaaaatcaagctcggcgaagagcagctcaagtgtctgcgcgagtccctgttactgggcccttctaacttttag

SEQ ID NO: 205297 - DNA, 4482 bp, Artificial Sequence
  derived and/or modified sequence
atggaaaaccggcccgggtctttccagtacgttccggttcagctccagggaggcgcaccatggggattcacgctgaaaggaggccttgagcactgtgaacccttgaccgtttcaaagattgaggatggaggtaaagccgctttatcgcagaagatgcggaccggcgacgagttggtgaacatcaacggcaccccgctgtacggcagtcgtcaagaagccctgatcctgatcaaggggtccttccgaatccttaaattgatagtcagaaggagaaacgcccccgtgagccgaccacattcgtggcatgtagctaaactgctggagggttgcccagaggctgccacgactatgcatttccctagcgaagctttttctctctcttggcacagcggttgtaacaccagtgacgtctgtgtacagtggtgcccgctgagcagacattgttcaaccgagaagagctcgtccatcgggtccatggagagcctcgagcagcctgggcaagcgacgtatgagagtcacctgctgcctattgaccaaaacatgtatcctaaccagcgcgactccgcatactcatctttcagcgcatcctctaatgcaagcgactgtgctctctcactgaggccagaggaaccagcaagcactgattgtatcatgcagggtcctgggcctaccaaagcgccgagcggtcgacctaacgtggctgagaccagcggagggtccaggaggactaacggagggcacttaacaccgtcaagccagatgtctagccgcccgcaagagggctaccagtctggccctgcaaaggccgtgaggggtccaccccagccccctgtccgcagggacagtctccaggcatctcgtgcgcagctactgaacggagaacaacgcagggcttctgaaccggtggtgcccctgccgcagaaagagaaactctccctcgagccagtgttgccggctcggaatccaaacagattttgttgtctcagtggacatgatcaggtgacctctgaaggtcaccagaattgtgagttttcccagcctcccgagtcttctcaacagggctccgagcatctgctgatgcaggcctccaccaaagcagtgggcagccctaaggcttgtgatagggccagctcggtggattctaatccgctgaacgaggcctcggcggagctggcaaaggccagcttcggacgccccccccatcttattgggccaaccggccaccggcactcagcaccagaacagcttcttgcgagccatctacagcacgtacaccttgacactagaggtagcaagggcatggagctgccccctgtgcaggatggacaccagtggactctttccccactccattcgtctcacaagggcaaaaaaagtccctgtcccccaacaggtggaacgcatgatcagtctagtaaggaaagaaagaccaggcaggtcgacgaccgatcgctggttctcggtcatcagtcccaaagtagcccaccgcacggggaggctgatgggcatcccagtgagaaaggatttctggatccgaatcgaacatctagggctgcctcagagcttgctaaccagcaaccctcggccagcggctcactggtgcagcaggccacagactgctcttctactactaaggctgcctctggcaccgaggctggagaggaaggcgattcagagcccaaggagtgtagtcgaatggggggccggcgaagcgggggaacacgcggcaggagtattcagaatcgtcgcaaatccgagcgcttcgccactaatcttcgcaatgagatccagcggcggaaagcccagctccagaagtctaagggaccattatctcagctttgtgacacaaaggaaccggttgaggaaactcaggagccgcccgagtcgcctccactgactgccagcaacacatctctgttgtcctcttgtaagaaaccaccctctcccagagacaagttatttaacaagagtatgatgctgcgcgccagaagttcagaatgcctttctcaggcccctgagtcccacgagagtcgaacagggctggagggccgcattagtcccgggcagaggcctgggcagtctagtctggggctgaacacgtggtggaaagccccggacccgagctcctcggaccccgagaaagcacacgcacactgtggcgtgcggggaggacattggcgctggagtccggagcataattcacagcccctcgtcgccgcggcaatggaggggccatctaatccgggggacaataaagagctcaaagcgagcactgctcaggctggtgaagatgccatcctcctgccgtttgccgataggcgtaaattctttgaagagagcagcaagtctctgtcgacgagccatctacctggactcaccactcactctaacaaaaccttcacccaacggcccaagccaattgaccagaactttcagccaatgagttcaagttgccgcgagctccgtagacacccaatggaccagagctaccactctgctgatcaaccctaccacgctactgaccagtcataccactctatgtcacccctacagtcagaaactcctacgtattccgagtgctttgcctcaaaaggccttgagaacagtatgtgttgcaaaccgttgcactgcggcgactttgactaccacagaacgtgttcatactcatgtagcgtgcagggggcacttgttcacgatccttgcatctactgttccggagagatttgccctgcattgctcaagaggaatatgatgccaaattgctacaattgtaggtgtcaccatcaccaatgtataagatgttccgtgtgctatcacaatccccagcacagtgcgctggaggatagctcactcgcccctggaaatacctggaaaccgaggaagctcaccgttcaagagttccccggagataagtggaacccgattactgggaacaggaagacgagtcagagcgggagggagatggcacactcgaaaacatccttttcatgggccacccctttccacccatgtctggaaaatcctgctttggacctttcctcctatcgtgctatctcgtccctggacctgctgggcgatttcaaacacgccctgaaaaaatccgaggaaacttccgtttacgaggaggggagttccttggctagcatgcctcatccgctgagaagtcgtgccttcagtgaatcccacataagcttggccccccagtccacccgtgcctggggacagcacagaagagaactgttctcaaagggggacgagacgcaatctgacctgctcggagccagaaaaaaggcgtttccccccccccggcctccccctcctaactgggaaaaatatcggctgttccgggccgctcaacaacaaaaacaacagcagcaacagcagaagcagcaggaggaggaggaggaggaagaggaggaggaggaggaggaagaagaagaggaagaggaagaagcagaggaggaggaagaggaactaccacctcagtacttttcgagcgaaactagcggatcgtgtgctcttaacccagaagaggtgctcgagcagccacagccactgtctttcggacatcttgaagggtcacgacagggctcccagtccgttcccgcagagcaggagagctttgctctgcattcatccgatttcttaccaccaattcgcggacatttgggctctcagccagagcaggctcaaccgccttgctattatggcatcgggggattgtggcgcacatcaggccaagaagctaccgaatcagccaagcaggagttccagcatttctcccccccatctggggcccccgggatccccacctcctatagcgcttattataacatcagcgtggccaaggcggaacttctcaataagctcaaggatcaacccgagatggcagagattggacttggagaggaggaggtcgaccacgagctggcacagaagaagatccagctgatagaatctatcagccggaaactcagcgtgctgcgtgaagctcagcgcggtttgctggaggacatcaatgccaattcggccttaggcgaagaggtcgaagctaatctcaaagcagtctgtaagagcaacgagtttgaaaaataccacttgtttgtgggcgacctcgacaaggtggtcaatctgctgctgagcctcagtggccgactggctagagtcgaaaacgctctaaattccatagattccgaggccaatcaagaaaagctggtactcattgagaaaaaacagcagctgactgggcagctggcagatgccaaagagctgaaggagcacgttgataggagggaaaagctggtctttggtatggtctcacgctatctaccccaggatcaactacaggattatcagcattttgtgaagatgaaaagtgctctaattatcgagcagcgggagctggaggaaaaaattaagctgggtgaggagcagctcaagtgtctgagagagtcccttctgctgggccccagcaacttttag

SEQ ID NO: 205298 - DNA, 4134 bp, Artificial Sequence
  derived and/or modified sequence
atgcactttcctagcgaagcctttagtcttagctggcactccgggtgcaatacttccgatgtgtgtgtccagtggtgccccttatctcgccactgttctaccgagaagagcagtagcattgggtccatggaatccctcgagcagcctggtcaagccacctatgaatcccacttactcccgatcgaccaaaacatgtaccctaatcaaagggatagcgcctacagtagtttctccgctagtagcaatgccagtgattgcgctctgtcccttagacccgaagaacctgctagtaccgattgcattatgcagggccccgggccaacaaaagctccaagtggacggccaaacgttgcggaaacttctggaggcagtagaaggacaaatggtggccacctcactccaagttcacagatgtcctcacggccacaagagggctaccaatccggccccgccaaggcagtaaggggacctccccagccgcctgtccgacgagacagcctacaggcatcgagggcccagctgctgaacggtgagcagagacgcgcttccgagccggttgtgcctttaccacaaaaggagaagctttccctggagcctgtgctgccagccaggaatcctaataggttttgttgcctgtcaggccacgatcaagtaacaagtgaaggccatcagaattgcgaattttcccagccgcccgaatcaagccagcaaggcagcgagcacttgctgatgcaggcctctaccaaagcagtgggcagcccgaaagcctgcgaccgggcgtcctctgtggattccaaccctctgaatgaagctagcgcggaactggccaaggcttcctttggccggccaccccacttgattggccccaccggtcacagacatagtgcacccgagcaattgctcgcgagccacctgcagcatgtacatctggacacccgcggctcaaaggggatggagctaccccccgtccaagacggtcaccaatggacgttgtcccctttacactcttcccataaggggaaaaaatctccgtgccccccaactggggggacccacgaccagagctctaaagagagaaaaactcggcaggtcgatgacagaagcctggtgctcggccatcagagtcaaagctcccctccccacggagaggctgatggacatccatctgagaaggggtttctggatccgaatcgaactagcagggcagccagcgagttagctaatcagcaaccctcagcttctgggtccctggtccaacaggccacggactgttcatccaccaccaaagccgccagcggcacagaggctggcgaggagggcgacagcgaacctaaggaatgcagccgcatgggaggaagaagaagcggcggtaccagaggtcgttctatacagaacagacggaaatccgagcgtttcgccacaaatctacgcaatgagattcagcgccgaaaggctcagttacaaaaatctaagggccctctcagccagctttgtgatacaaaagagcctgtcgaggagacccaagagcctccagaatcccccccactcaccgcaagcaatacttctctgctttcgagctgtaagaagcctccatctccaagagacaaactcttcaataagagcatgatgctgcgtgcacgttcatctgaatgcctgtcccaggcacctgaatcacatgagtctcgcacaggcctggaaggccgaattagcccagggcagcgccccggacagtcatcgctcggactgaatacttggtggaaagctcctgacccttcatccagcgacccagagaaggctcacgcgcattgcggagtgcgcggaggccactggcggtggagtccagagcataacagccagcccctcgtggcggctgcgatggaaggtccatccaaccccggtgataataaggaattgaaagccagtacagcacaggccggcgaggatgccattctcctacccttcgccgatcgccggaaattttttgaggagtcttccaagtctctgtctacctctcatctgcccggcctcactacccacagcaacaagaccttcacacagagacctaagcccatcgaccagaacttccagccaatgtcgtccagctgccgtgagctgcgccgtcaccccatggatcagtcctaccacagtgctgaccagccataccatgccacggaccagtcttaccattcgatgagccctctgcaatccgaaaccccgacttacagcgagtgctttgccagtaaggggctggaaaacagtatgtgttgtaaacccctgcattgcggcgatttcgattaccatcggacgtgctcctacagctgttctgttcagggcgccctcgtccacgacccttgcatctattgctccggagagatctgtccggctctgctgaagcgcaatatgatgccgaactgttacaactgccggtgccaccaccaccaatgcattcggtgctctgtttgttatcacaacccccagcacagcgctctagaagattcctcactcgcccccgggaatacatggaaaccacgtaaattgactgttcaggagttccctggtgataaatggaaccctatcactggaaaccgtaaaactagtcaatccggacgtgagatggcacactccaagacgtccttctcctgggccaccccttttcatccctgcctggaaaatcccgccttggacctgtcaagctatagagcaatatccagcctcgacctattaggggactttaagcatgcgctaaaaaagtccgaagaaacctctgtttacgaagagggctcaagcctggcaagtatgccccacccactgagaagcagggccttttctgagtctcacatctcccttgccccgcagagtacgcgggcctgggggcagcacagacgagagctcttcagcaagggagatgagacccagtcagatctgttgggtgcgcggaaaaaagctttccctcctccccggcctcccccccccaattgggaaaaataccggctgttccgagccgcacagcaacagaagcagcaacagcagcaacagaagcagcaggaagaagaagaggaggaggaggaggaggaggaagaggaagaggaagaggaggaagaggaggctgaagaggaagaagaggagctgccccctcaatacttcagctcagaaacttctggttcttgtgccctaaatcctgaggaagtcctggagcaaccccagcctcttagtttcgggcatcttgagggctctaggcagggtagccagtcagtgcccgcggagcaggaaagctttgcactacattcctcagatttcttgccaccaatccgcggtcatctgggctcacagccagagcaggcccaaccaccttgctattatgggataggaggcctgtggagaacgtccgggcaggaagccaccgaatcagcaaaacaggaatttcagcactttagtccaccatcaggagccccagggatccccacctcctacagcgcctattacaacatctctgttgccaaggccgagctcttgaacaaactgaaagaccagcccgagatggcagaaatcggtttaggcgaagaggaggtggatcacgaactcgcccagaagaagatccagctgatcgaaagtatcagcaggaagctctccgtgctgcgggaggctcagcggggactgcttgaggatatcaatgctaattcagcgctcggagaggaggtagaagcaaacttaaaagctgtatgcaagtcaaacgagttcgagaaataccacctgttcgtgggcgatctggataaggtggtgaatctcctgctgagcctatctgggaggttggcaagagtggagaatgccctgaattctattgattctgaagctaaccaggaaaagctggtgttaatcgagaagaagcaacagctgaccggtcagctcgccgatgctaaggaacttaaggagcatgtcgaccggcgggaaaagcttgttttcggcatggtttctcggtacttaccacaagatcagttacaggattaccagcacttcgttaagatgaaaagcgccctcatcatcgaacaacgtgagctcgaggaaaagattaagcttggcgaggagcagctgaagtgtctcagagagagccttctattgggtccctccaacttctag

SEQ ID NO: 205299 - DNA, 4134 bp, Artificial Sequence
  derived and/or modified sequence
atgcacttccccagcgaggccttcagcctgtcctggcacagcggctgcaacaccagtgatgtgtgtgtgcagtggtgccccctgagccgccactgcagcacagagaagagcagcagcatcggctccatggagagcctggagcagcccggccaggccacctatgagagccacctgctgcccatcgaccagaacatgtaccccaaccagagggacagcgcctacagcagcttcagcgccagcagcaatgccagtgactgtgccctgagcctgcggcctgaggagcccgccagcacagactgcatcatgcagggccctggccccaccaaggcccccagcggccggcccaacgtggccgagaccagcggcggcagcaggaggaccaacggcggccacctgacccccagcagccagatgagcagccggccccaggagggctaccagagcggccctgccaaggctgtgcggggccccccccagccccctgtgagaagagacagcctgcaggccagccgggcccagctgctgaatggagagcagaggcgggccagcgagcctgtggtgcccctgccccagaaggagaagctgagcctggagcctgtgctgcctgccaggaaccccaaccgcttctgctgcctgagcggccatgaccaggtgaccagcgagggccaccagaactgtgagttcagccagcccccagagagcagccagcagggcagcgagcacctgctgatgcaggccagcaccaaggctgtgggcagccccaaggcctgtgaccgggccagctctgtggacagcaaccccctgaatgaggccagcgctgagctggccaaggccagctttggccggcccccccacctgattggccccaccggccaccgccacagcgcccctgagcagctgctggccagccacctgcagcacgtgcacctggacacccggggcagcaagggcatggagctgccccctgtgcaggacggccaccagtggaccctgagccccctgcacagcagccacaagggcaagaagagcccctgcccccccaccggcggcacccatgaccagagcagcaaggagaggaagacccggcaggtggatgacaggagcctggtgctgggccaccagagccagagcagcccccctcatggagaggctgatggccaccccagcgagaagggcttcctggaccccaacagaaccagccgggccgccagcgagctggccaaccagcagcccagcgccagcggcagcctggtgcagcaggccacagactgcagcagcaccaccaaggccgccagcggcacagaggccggggaggagggggacagcgagcccaaggagtgcagcaggatgggcggcagaagaagtggcggcacccggggccgcagcatccagaacagaaggaagtcagaaagatttgccaccaacctgagaaatgagatccagaggaggaaggcccagctgcagaagagcaagggccccctgagccagctgtgtgacaccaaggagcctgtggaggagacccaggagcccccagagagcccccccctgacagccagcaacaccagcctgctgagcagctgcaagaagccacccagcccccgggacaagctgttcaacaagtccatgatgctgcgggcccggagcagcgagtgcctgagccaggcccctgagagccatgagagcaggacaggcctggagggccgcatcagccctggccagaggcctggccagagcagcctgggcctgaacacctggtggaaggccccagaccccagcagcagtgaccctgagaaggcccacgcccactgcggcgtgcggggcggccactggcgctggagccctgagcacaacagccagcccctggtggccgccgccatggagggccccagcaaccctggggacaacaaggagctgaaggccagcacagcccaggccggagaagatgccatcctgctgccctttgctgacaggaggaagttctttgaggagagcagcaagagcctgagcaccagccacctgcccggcctgaccacccacagcaacaagaccttcacccagaggcccaagcccatcgaccagaacttccagcccatgagcagcagctgccgggagctgcggcggcaccccatggaccagagctaccacagcgctgaccagccctaccacgccacagaccagagctaccacagcatgagccccctgcagagcgagacccccacctacagtgaatgttttgccagcaagggcctggagaacagcatgtgctgcaagcccctgcactgtggggactttgactaccacaggacctgcagctacagctgcagcgtgcagggcgccctggtgcatgacccctgcatctactgcagcggggagatctgcccagccctgctgaagaggaacatgatgcccaactgctacaactgccgctgccaccaccaccagtgcatccgctgcagcgtgtgctaccacaacccccagcacagcgccctggaggacagcagcctggcccctggcaacacctggaagcccaggaagctgactgtgcaggagttccctggggacaagtggaaccccatcaccggcaacaggaagaccagccagagcggccgggagatggcccacagcaagaccagcttctcctgggccacccccttccacccctgcctggagaacccagccctggacctgagcagctaccgggccatcagcagcctggacctgctgggggacttcaagcacgccctgaagaagtctgaggagacctctgtgtatgaggagggcagcagcctggcctccatgccccaccccctgcggagccgggccttcagcgagagccacatcagcctggccccccagagcacccgggcctggggccagcacagaagagagctgttcagcaaaggagatgagacccagagcgacctgctgggcgccaggaagaaggccttccccccaccccggcccccaccacccaactgggagaagtaccgcctcttccgggccgcccagcagcagaagcagcagcagcagcagcagaagcagcaggaggaggaggaggaggaggaggaggaggaggaggaggaggaggaggaggaggaggaggaggccgaggaggaggaggaggagctgcccccccagtacttcagcagcgagaccagcggcagctgtgccctgaaccctgaggaggtgctggagcagccccagcccctgagctttggccacctggagggcagccggcagggcagccagagcgtgcctgctgagcaggagagctttgccctgcacagcagtgacttcctgccccccatccggggccacctgggcagccagcctgagcaggcccagcccccctgctactacggcatcggcggcctgtggaggaccagcggccaggaggccacagagagcgccaagcaggagttccagcacttcagcccccccagcggggcccctggcatccccaccagctacagcgcctactacaacatctctgtggccaaggccgagctgctgaacaagctgaaggaccagcctgagatggccgagatcggcctgggggaggaggaggtggaccacgagctggcccagaagaagatccagctgattgagagcatcagcaggaagctgtctgtgctgcgggaggcccagaggggcctgctggaggacatcaatgccaacagcgccctgggggaggaggtggaggccaacctgaaggctgtgtgcaagagcaatgaatttgagaagtaccacctgtttgtgggggacctggacaaggtggtgaacctgctgctgagcctgagcggccgcctggcccgggtggagaatgccctgaacagcattgacagcgaggccaaccaggagaagctggtgctgattgagaagaagcagcagctgaccggccagctggctgatgccaaggagctgaaggagcacgtggaccggcgggagaagctggtgtttggcatggtgagccgctacctgccccaggaccagctgcaggactaccagcactttgtgaagatgaagagcgccctgatcatcgagcagcgggagctggaggagaagatcaagctgggggaggagcagctgaagtgcctgcgggagagcctgctgctgggccccagcaacttctag

SEQ ID NO: 205300 - DNA, 4482 bp, Artificial Sequence
  derived and/or modified sequence
atggagaaccggcccggcagcttccagtacgtgcccgtgcagctgcaaggaggagccccctggggatttacgctcaagggaggcctggagcactgcgaaccccttaccgtctcaaaaattgaagacgggggcaaagctgcgctaagtcagaaaatgcggacaggtgatgaactggtcaacattaacggcactcccctgtatggatctaggcaagaagcacttatattaattaaaggttcattccgcatccttaagctaatcgtccgtaggaggaatgccccggtgtctcgtccccactcatggcacgtggctaaactcctggaaggttgccctgaagcagcaactacgatgcattttcccagtgaagcctttagcttaagttggcatagtggatgcaatacgtctgacgtttgcgtgcagtggtgtcctctgtccagacattgctccacagagaaaagtagttctatcggcagtatggagagcctggaacagcctgggcaagcaacgtatgaatctcacctcctgccaatagaccaaaacatgtaccctaaccaaagggattcagcctactcgtccttcagcgcctcatcaaatgcctctgattgcgccctctcactgcgacctgaggagcctgcctctactgattgcatcatgcaaggcccagggccaactaaggcccctagcggtaggcctaatgtggccgagacaagcggcggtagcaggcgtacaaacggtgggcacttaaccccatcctcccagatgtcaagccgccctcaagagggctatcagtcgggacccgccaaggccgttcggggccctccccagcccccagtgaggcgagatagtcttcaggcatctagggctcaactcctgaacggagagcaacgcagggcctccgagcctgttgtgccattacctcagaaggagaaactctcactggagcccgttttgcccgccagaaaccctaatcggttctgctgtttgtctgggcacgatcaggtgactagcgaggggcatcagaactgcgagtttagccaaccaccagagagctcccagcaaggttctgagcatttacttatgcaggctagcacaaaggccgtcggctcccctaaagcctgtgaccgagcttcctcagtcgactccaaccctctgaatgaggcatccgccgagcttgccaaggcctctttcggcaggcctccccatctgattggccccacaggccacaggcacagtgcacctgagcaactgttagcgtcccatcttcaacacgtgcatcttgatactcgcggcagcaaagggatggagctgccacccgtacaggacgggcaccaatggactctctcacccctccacagctctcacaaaggaaaaaagagtccctgtccccctaccggaggtacacacgatcagagctctaaagaaagaaagacccgccaggtagacgatagaagtctggttctgggccaccagtcacagtcctcgcccccacacggcgaggcggacgggcatcccagtgagaaaggattcctggaccctaaccggacaagccgcgcggcatctgaactggcaaaccagcagccttcagcctccggatctctggtacagcaggccactgattgctccagcaccacaaaagcagcatctggcaccgaggccggagaggaaggagactcagaacccaaagagtgtagtcgcatggggggcagacgctcaggcggaacacggggccgtagtatacaaaacagaagaaagtccgaacgattcgccaccaaccttagaaacgagattcagagacgcaaggctcagctgcaaaagtcaaaaggaccattaagccaactgtgtgacaccaaggaacctgtcgaagaaactcaagagccccccgagtccccccctttaacagcatccaacacttcactgctttcctcctgcaagaagcccccgtcaccgagggataaactattcaataagtccatgatgctccgggccaggtcatcagaatgtctcagtcaggccccggagtcccacgagagtcgaacgggtcttgagggacggatatccccaggacagcgacctggtcagtcctctctgggacttaacacctggtggaaagctccagatccatcttcttctgatcccgagaaagcccatgcacactgtggcgtgagggggggccactggaggtggtctcctgagcacaattcccagcctctagtcgccgcggccatggagggcccttctaacccgggtgacaataaggagctgaaagcttctactgcgcaagcaggcgaggatgcgattctcctcccttttgccgatagacggaagttttttgaagagtcctccaagtctctctctacttcccatctccctggcctgactacccatagtaacaaaaccttcactcaacggcccaaacctattgaccagaacttccagcctatgagctcctcttgccgcgagctcagaaggcaccccatggatcagtcttaccattcagcagaccaaccgtatcatgccaccgaccagtcttaccattccatgagccctcttcagagcgagacgccaacatactccgagtgttttgctagtaagggcctcgagaactccatgtgctgtaagcctctacattgtggagacttcgactaccatagaacctgctcctactcctgcagtgtgcagggtgccctggtacacgatccttgcatatattgtagcggtgagatttgcccagcacttcttaagcggaatatgatgccaaactgctataattgtcgctgccatcaccatcagtgcattagatgttccgtgtgctaccacaatccacagcattccgcactcgaggacagttccctggctccaggcaacacttggaagcctagaaagctgaccgttcaggagttccctggcgataaatggaatcctataacaggcaatagaaaaacatcacagagtggtcgggagatggcgcactctaagacttcattctcttgggccactccttttcatccctgtctcgagaatcctgctctcgatctgagcagttacagggctatctctagtctggatctgttaggggattttaaacacgctttaaaaaagtcagaagagacgtccgtgtacgaggagggctccagtcttgcctccatgccccacccacttcggagccgcgccttctcggaatctcacatctcattggcaccacaatcgacccgagcttgggggcagcaccgccgagaactcttcagcaagggcgacgagactcagtctgacttacttggggctaggaaaaaggcattcccccctccccggcctccacctcccaactgggagaaataccggctctttcgagccgctcagcagcagaaacagcaacagcaacagcaaaaacagcaagaagaagaagaagaggaagaggaggaggaggaggaggaagaagaggaagaggaagaagaggctgaagaagaagaggaagagctccctcctcaatacttttcttctgagacttcaggcagctgtgcattgaaccccgaagaagtgctggagcagcctcaacccctctctttcggacacctcgaaggtagccggcaaggcagccaatccgtgccagcagaacaagaatcattcgctctgcattcatcagacttcctgccaccaatacgtggtcacctcggcagtcaacccgagcaagcccagcctccatgttactacggtatcgggggtctctggaggactagcggtcaagaggcaactgagtccgctaaacaggagttccagcacttctcaccaccaagtggggcaccgggcattcctacctcatacagcgcctattacaatatcagcgtggccaaggcagagttgttgaataagttaaaggatcagccagaaatggctgagattggacttggggaggaggaagtcgatcacgagctggcccagaaaaaaattcagctgatcgagtccatttcacgcaagctgagcgtgctgagagaggcccagaggggactgctggaggacattaacgctaatagtgcactgggtgaggaagtcgaggcaaacttgaaagcggtctgtaaatccaatgaatttgagaagtaccatcttttcgtgggcgaccttgataaagtggtaaacctgctgttatcactttctggcaggctcgctagggtcgagaatgcgttaaatagcattgacagcgaggcaaaccaggagaagcttgtactgatcgagaagaagcagcagttgacggggcagctcgctgatgccaaagagctaaaggaacatgttgaccgcagagagaagttagtttttggcatggtgtcacggtatttgccgcaggaccaacttcaggattatcagcactttgtcaagatgaagagtgcgttaatcattgagcagcgggagctcgaggagaaaataaagttaggagaggagcagctgaagtgtctgagagaatccttgctgcttggaccaagcaatttctag

SEQ ID NO: 205301 - DNA, 4482 bp, Artificial Sequence
  derived and/or modified sequence
atggagaaccggcccggcagcttccagtacgtgcccgtgcagctgcaagggggagcaccctggggatttactttaaaagggggcctggagcactgtgaacctctgacagtttccaaaattgaggacggcgggaaagccgcgttatctcagaagatgcgaaccggcgatgaactggtcaatattaatggcactccgctgtacgggagccggcaggaggctctcatcctgatcaagggtagcttcagaatcctgaaactcatcgttcggagaagaaatgcaccagtgagcaggccacattcttggcatgttgctaagctgctggagggttgtccagaggccgccaccactatgcacttcccatcggaggctttctccttgtcctggcacagtggctgtaatacaagtgatgtctgtgtgcagtggtgtcccctcagtcggcactgcagtaccgagaagtccagtagcataggcagcatggaatccctggaacaacccggccaggctacttacgaaagccacctgctaccaatagaccagaatatgtaccctaaccagcgggatagcgcctattcctctttcagtgcaagctctaacgccagcgactgcgccctcagccttcggcccgaggaacctgcatccactgattgcatcatgcaaggccctggccccaccaaggccccaagcgggaggcccaacgtggcggaaacttctggtggttcaagacggaccaacgggggacatctgactcccagtagtcaaatgtcatcccgcccccaggagggctaccaatccgggcccgcaaaggcggttcgcggcccaccacaaccacccgtcagacgagactcacttcaggccagccgagcccaattactgaacggtgaacagagacgagcctcggagccagtggtccctctgccacagaaggaaaagctaagtctggagccagtcctacctgccagaaaccccaatcgcttctgttgcctgtcaggccacgatcaggtcacatcagaaggacatcagaattgcgagttctcccagccacctgagtcttcacagcagggcagcgaacatctgcttatgcaggcaagtactaaggcagtaggctcccctaaggcttgtgatagagcctcatcagtagactccaatccgctgaacgaagcgagtgccgagctggcaaaggcctcctttggccggccacctcacctgatagggcccaccggacatcggcatagcgccccggagcagctcctggcctcccacctccaacatgtgcacctcgatactcggggctccaagggaatggagttgcctcccgtgcaggatggtcatcagtggaccttgagccctcttcactcctcacataagggcaaaaagagtccatgcccccccacaggggggacacacgatcaatctagcaaggaacgaaagacccgacaagtggacgatagatcccttgttctgggccatcagtctcagtccagcccccctcatggagaggctgatggccatccttcggaaaaggggttccttgatcctaatcgcactagtagggctgcctcagaactggctaatcagcagccaagcgccagcgggtccctggtgcagcaggcaaccgactgctccagcacaactaaggccgcatctgggaccgaagcaggcgaggaaggcgactcggagccaaaagagtgctctaggatgggcgggcggagaagcggaggaacgcgggggagaagcatccagaaccggcggaaaagcgagcgttttgccacaaatctcaggaacgagatacaacgccgcaaagctcagctgcaaaaatctaaaggacctctctcacagctgtgtgatactaaagagccagtagaagagacccaggaaccacctgagtctccgcccctaaccgcttcaaatacctcactgcttagctcatgcaaaaagcccccatccccaagagacaaactctttaataagtcaatgatgctacgggcccgtagtagtgagtgcctatctcaagccccggaatctcatgagtcccgtacaggactggaagggcgcatttctcctggccaaagacccggccagagctcactgggattgaacacatggtggaaagccccagatccatcttcctctgatcccgaaaaggctcatgcccactgcggcgtccggggcggacattggcgctggtcacccgagcataactctcagcctctagtggcagcagctatggaaggcccctcaaatcccggagacaacaaggaactcaaggctagtactgctcaagctggggaggatgctatcttactgcccttcgcagataggagaaagttcttcgaagaaagctctaaaagtctaagtactagccacctaccgggtttgaccacccatagcaataagacatttactcagaggcccaagcccattgatcagaactttcagcctatgagcagttcctgccgcgaattaagacggcatcccatggaccagtcttatcattcggctgatcagccttatcatgcgaccgaccagagctaccacagtatgagcccactgcagtccgagacccccacctactccgagtgcttcgcttccaaagggctcgaaaatagcatgtgttgcaagccactgcactgcggcgacttcgattaccaccgaacttgttcctactcttgttcggtgcagggcgccttggttcacgacccctgtatatattgcagtggggagatatgcccagccctcctaaagcggaatatgatgcccaattgctacaactgcagatgtcaccaccaccaatgcatccggtgctccgtgtgctatcacaatcctcaacatagtgcgctggaagactcctctttagcacctggaaacacatggaaacccagaaagctgacagtgcaggaatttcctggggacaagtggaacccaattacagggaatcggaagacaagtcagtcagggcgggagatggcacattctaagacctcatttagttgggcaacccccttccacccctgcctcgagaaccctgctctcgatctgagctcttatagggctatatcctcactggacttgttaggagattttaagcatgctcttaagaagtctgaagagacttcagtgtacgaggaaggcagttccctggctagcatgccgcacccactccgtagtagggctttcagtgaaagtcatattagcttggccccccaatcaactcgagcctggggccaacatagacgggagctgttctccaaaggggacgaaacacagagcgaccttctgggcgcccgcaagaaagcctttcctccccctcgcccaccaccgccaaactgggagaaataccgcctattcagagccgcccagcagcaaaagcaacaacagcagcagcagaagcagcaggaggaggaggaggaggaggaagaggaagaagaagaggaagaggaagaggaagaagaggaggctgaggaagaagaggaggaactgccgcctcaatattttagttccgagacttccggctcatgcgcactcaatccagaggaggtgctggagcaaccccagccgctgtccttcggccatctggaggggagccgacaagggagccagagcgtgcccgcagagcaggaaagctttgccctgcactctagcgatttcctgcctccaattcggggacacttgggaagtcagcccgaacaagcacagcctccatgctattatggcatcggcggactctggaggactagcggccaagaagccacggagagtgcaaaacaggagttccagcactttagcccaccttccggtgctcccggcattcctacgtcctatagtgcctactataatatctctgtcgccaaagcggagttactcaataagctgaaagaccagccagagatggcggagatcggcctgggtgaggaggaagtggatcacgagctggcacagaaaaagatccagttaatagaatctataagccgcaagctcagtgtcctccgcgaggcccaacggggtctgttggaagatataaacgcaaattcggctctcggagaagaggtggaggcaaatcttaaggctgtgtgtaagtctaatgagttcgaaaaataccatctattcgtaggagatcttgacaaagtggttaacctgttattatccctgtctggacgacttgccagggttgagaatgcccttaattctattgacagcgaggctaaccaggagaagcttgtgctgatcgaaaaaaagcagcagctcactgggcagctggcggatgccaaagaactgaaggaacatgtggaccgccgcgaaaaattggtgttcggaatggtaagcaggtatctcccgcaagatcagttgcaagactatcagcattttgtgaagatgaaatctgctttgattattgaacagcgagaattggaggagaaaattaagctgggagaagagcagctgaaatgcctccgcgaatccctgctgctggggcccagtaatttttag

SEQ ID NO: 205302 - DNA, 4134 bp, Artificial Sequence
  derived and/or modified sequence
atgcacttccccagcgaggccttcagcctgagctggcacagcggctgcaatacctccgatgtttgtgtgcagtggtgccctctcagtcgccattgctccacggaaaaatcatcctccatcgggtcgatggagtccctggaacaacccggacaagctacatatgaaagccatctgctgcctattgaccagaatatgtaccctaatcagagagacagtgcgtatagtagttttagcgcttccagcaatgcttcagattgcgccttgtcgctgcgtcccgaggagccagctagcaccgattgtattatgcaaggtccaggtccaactaaggccccaagtggccggcccaacgtggccgaaacatcaggaggatccaggcgcactaacggaggccacctgactccttcatcccaaatgagttctcgccctcaagaaggatatcagtccgggccggcaaaggccgtgcggggtccaccgcagcctccagtgcgcagagacagtctccaggcgtcgcgcgcacagttactaaatggcgagcagagacgcgcatctgagccagtggtacctctgccccagaaggaaaaactctccttagagccagtcttgcccgcaaggaatcccaaccgcttttgctgcctaagtggtcacgaccaggtgacttccgagggacaccagaactgtgagttcagtcagccacctgagtcatcacaacaggggagcgagcacctgctgatgcaggccagtaccaaggccgtgggctcaccaaaagcctgtgacagagcctcctccgttgacagtaatcctctgaacgaggcttccgccgaattggccaaggcaagttttgggcggcctccccacctcatcgggcccaccggccatcgccatagtgctccagaacagttgctagcatctcatctgcagcatgtgcatctggacaccaggggcagtaaaggtatggaactgccccctgtccaggatggccaccaatggacattgtctcctttacattcatcccacaagggaaaaaagagcccatgtccgccgactgggggcacacatgatcaatctagcaaagagaggaagactcggcaggtagatgatcgcagcctcgtattgggacaccaatcccaaagctcacctccgcacggggaggcagacgggcatccatcagagaagggtttcctcgatcccaacagaactagcagggcagccagcgagctggccaatcagcaacctagcgcgtcaggctcgttagtacagcaagccaccgactgcagctcaactacgaaggccgcctctgggacggaggccggtgaggagggcgatagcgagccgaaggaatgtagcaggatgggcgggcggcgcagcggagggacccgtggacggagcattcagaaccgtaggaaatctgagcgctttgctactaacctcagaaacgagatccagagaagaaaggcgcagctccaaaagtcaaagggaccattgtcacaactgtgcgacaccaaggagccagtcgaagagacacaggagcccccggagagcccaccactgactgcttccaatacgtccctgctgtcgtcttgtaaaaaaccaccctcaccacgcgacaagcttttcaacaagtctatgatgctgcgagcaagatcatcagagtgtctcagccaggctcctgaaagccatgagagccggacaggactcgaaggtcggatttcgcctggacagaggcccggacagtcctctttaggccttaacacctggtggaaggcacccgatcctagcagtagtgaccctgagaaggcacatgcccactgtggcgtgaggggcgggcactggcggtggagcccggagcacaactcccagccattggtcgctgctgccatggaaggtcctagcaaccccggggacaacaaggaacttaaagcgagtactgcacaagctggtgaggatgctatcctgttgcccttcgctgaccgtcggaaatttttcgaggaaagcagtaaaagtctctctactagtcacctgcccgggctaactacacacagcaataagactttcactcagcggccaaaacccattgatcagaatttccagccaatgtcgtctagttgtcgggagctacgcaggcatcccatggaccagagctatcactcagccgaccagccctaccatgcaaccgatcaatcgtaccactccatgagtcccctccagtccgagacaccaacatactctgaatgtttcgcctcaaaaggactggaaaactcgatgtgttgcaaaccgctgcattgtggagactttgactaccatagaacgtgtagttattcatgttcggtgcagggagctctcgtgcatgacccttgtatttactgtagcggagaaatctgccccgcactcctcaagaggaacatgatgccaaattgttacaattgtagatgccaccaccatcaatgcatcaggtgctcagtgtgctaccacaacccacagcactcagccctggaagattcgtcactcgccccagggaacacatggaaaccccggaaactgaccgttcaggaattcccaggagataaatggaaccccatcactggcaatagaaagaccagtcagagcggtagggagatggcacatagcaaaacctctttttcatgggccacccccttccatccctgcctggagaatcctgccctggaccttagcagctatcgggccatcagcagcctggacttactgggggatttcaaacacgccttgaagaagagcgaagagacatcagtgtacgaagaaggctccagtctggcttctatgccccatcctcttcggagcagagcattttcagagagccatatctctctggcaccacaatcaacacgcgcctgggggcagcacaggagagaactgttctcaaagggcgacgaaacccaatcagatcttctgggtgccagaaagaaagccttccctcctcctcggccaccgccccctaactgggaaaaatatagactatttcgggctgcccagcagcaaaagcagcagcagcagcaacagaaacagcaggaggaagaagaagaagaggaagaagaggaagaagaagaggaggaagaagaagaagaggaagctgaggaggaagaggaggagcttccaccccagtacttctcctcagagaccagcgggagttgcgcactgaacccggaggaagttttagaacaacctcagcccttgagttttggccatttagagggcagcaggcagggtagccagagcgtcccagccgagcaggagagctttgccctccacagctcagattttttgccacccattcgtgggcatctcggctcacagccggagcaggcccagcccccgtgttattatggcattggcggactctggaggaccagcggccaagaagcaactgaaagcgcaaaacaggaatttcaacattttagcccgccctctggcgcaccaggtatccctacatcctattctgcctattacaatatttcagtagcaaaggccgaactcctgaacaagctaaaagaccagccagaaatggcagagatcggcctgggcgaagaggaagtcgatcatgaattagctcagaagaagattcagctgatcgagtcgatctctaggaagttgtctgttcttagagaagctcagcgtggcttgctcgaggacattaatgctaactcagctctcggtgaggaagtggaagccaaccttaaggctgtctgcaaatccaacgagttcgagaaataccatctgtttgtcggtgatctggacaaggtcgtgaacctcctgctttctctctccggacgcctagcccgggtggagaacgccctaaacagcatcgacagcgaagctaatcaggagaagctcgttcttatcgagaagaagcaacaactcactggacaactggccgacgccaaggaactgaaggaacatgttgatagacgggagaagttggtgtttgggatggtctccaggtacttgccccaagatcagctgcaggattatcagcacttcgtaaaaatgaaatcggcactgatcatcgagcagcgggaactcgaggaaaaaatcaagctcggggaggagcaactgaaatgcctccgtgagagtctgctgctcggaccaagtaatttttag

SEQ ID NO: 205303 - DNA, 4482 bp, Artificial Sequence
  derived and/or modified sequence
atggagaataggcctgggagttttcagtacgtccctgtccagctgcaaggcggtgcaccttgggggtttaccttgaaggggggtctggaacactgtgagcccctcactgtcagtaagatcgaggacgggggtaaggcagcactgagtcaaaagatgcggacaggggacgagcttgtgaatattaatggcactcctctgtacggttcccggcaggaggctttgattcttattaaggggagctttcgcattctgaaactgatcgtgcggcgacgtaacgcccctgtttctcgacctcacagctggcacgttgcaaagctactggaaggatgtccagaggcagcgaccaccatgcatttcccttctgaggctttctctctgtcctggcactccggatgtaacaccagcgacgtgtgtgtgcagtggtgtcccttatcccggcactgcagtacagaaaaatctagcagcattgggtccatggaatctttggaacaaccgggtcaagcaacgtacgaatcccatctgctacccattgatcagaacatgtatcccaatcaacgtgactccgcctacagcagcttctccgcctcaagtaacgctagcgactgcgctctgagtctccggcctgaggagccagcttccacagattgcatcatgcaaggcccaggcccaacaaaagctccctcaggtcggcctaatgtggcggagactagtggcggatccagaaggacaaatggcggtcacctgacaccaagtagccaaatgtcatcacgccctcaagagggttaccaaagcggacctgctaaggcagtccgtggacctccacagcctccggtgcggagagacagtcttcaggcaagcagggcacagctcctcaatggcgagcagagacgcgcaagtgaacctgtggtgccgcttccacagaaggagaaactttctctggagcctgtccttccagctagaaaccctaaccggttttgttgcctctctggacacgatcaggtcactagtgagggtcatcagaactgcgagttcagccagccgcctgagtcaagccagcaaggcagtgaacatctactgatgcaagccagtaccaaggccgtcggctcccctaaagcttgcgatagggcgtctagtgttgatagcaaccctctaaatgaagcaagcgccgaactcgctaaggcgagctttggcagaccaccccacctcataggccctacaggacacagacacagcgcgcctgaacagctcctcgctagccatctgcagcacgtgcacctggataccaggggctccaagggcatggagttgcctcctgtgcaagacgggcaccagtggaccctgtctccacttcactcatcccataagggcaagaagtcgccctgtccacccactggcggtacacacgaccagagctctaaagagagaaagacaagacaagtcgacgaccgctcgctcgtgcttgggcatcagtcacagtcctctccgcctcacggcgaagcagacgggcatccttcagaaaaaggctttctcgaccccaacagaacctcgagagctgctagtgaacttgccaaccagcagccaagcgcctctgggagcctcgtgcagcaggctaccgactgttctagcacaacgaaggccgctagtggcaccgaagctggtgaggagggcgacagcgaacccaaggagtgcagccgcatgggaggccgacggagcggtggcacccgcggacggagcattcaaaatcggcgaaagagcgagcgtttcgccaccaatctgaggaacgagattcaacggagaaaggcacagctccagaaatccaaggggcctctgagccagctgtgcgacacaaaggaaccagttgaggaaacacaagagccccctgaatcgccgccactaaccgcatccaacacttccctgcttagctcctgtaagaagcccccaagtcctcgcgataaattgttcaacaaaagcatgatgctccgggcaaggtcgtcagagtgtctgtctcaggccccagaatctcacgagagtaggacaggcctggagggtcgcatctcacctgggcaacggcctggacagtcctcgctggggctgaatacgtggtggaaagccccagaccctagcagcagcgatcctgagaaggcccacgcacattgtggtgtcaggggtggacactggcgatggtcccccgagcacaatagccaacctcttgtcgccgcagcaatggagggacccagcaaccctggtgataataaagagttgaaagcttctactgctcaagccggtgaagacgccatcctgctgcctttcgcagatcgtcggaaattttttgaagaatccagtaaatccctgagtacatcacatctccctggattgaccacacactctaacaagactttcactcagagacctaaacccattgaccagaattttcagcctatgagttcgagttgcagggaactgaggagacacccgatggaccaatcataccattccgcggaccagccttaccatgcaaccgatcagagttaccactccatgtcacccttgcagagcgaaacccccacctacagcgagtgcttcgcctcaaagggactcgaaaactccatgtgctgtaagccgctgcattgcggcgacttcgactaccacaggacctgttcttattcatgttcagtgcaaggagctctcgtccacgacccttgcatctattgctccggggagatctgtcccgcactacttaagagaaatatgatgccaaattgttacaattgcaggtgtcaccaccatcagtgcattagatgtagcgtgtgctatcacaatcctcagcatagcgccttggaggacagtagtctggccccaggcaacacctggaagccaaggaaactcactgttcaagagtttcctggcgacaagtggaacccaatcacgggtaatcggaaaacctcccagagtggcagagagatggcccactcaaagacatccttcagttgggctacaccttttcacccctgtttagagaaccccgcattggatctgtcgagctacagagcaatttcctccctggatctcctaggcgactttaaacacgcactcaagaaatctgaggagacctcagtgtacgaggaaggatctagcctcgcctcaatgccgcaccccttgaggtcccgcgctttcagtgaatcccatataagtctggctccacagagcacacgggcttggggacagcacaggcgcgaactgttcagtaagggagacgagacccagagcgacctcctcggagccaggaagaaagccttcccccctccgagaccccctccccctaactgggaaaaatataggctcttccgggctgcccagcagcagaagcagcagcagcagcagcaaaagcagcaggaagaagaagaggaggaagaagaggaggaagaggaagaggaagaagaagaggaagaggaggctgaggaagaggaggaggaactcccaccccagtatttctcttccgaaacgtcaggctcctgcgcgctgaaccccgaagaggtgttggaacagccacagcctttgagttttggacaccttgagggtagccggcaaggttcccagagcgtgcccgctgaacaagaaagtttcgccctccatagctcagactttctgccaccaatcagagggcatctcggctcccagcccgagcaggcccagccaccatgctactatggcataggaggtctgtggaggacttctggacaggaggccacggaaagtgccaaacaggagtttcagcatttcagccctccgagtggcgctcctggaatccccaccagctattctgcttattacaatatcagtgtggcaaaggctgagctgttgaataagctgaaagatcagccggagatggccgagattggactcggcgaagaagaagtggaccacgagttggcccagaagaagattcagctgattgaaagtatcagcagaaagctgtccgtgctgagggaagctcagagagggctgctcgaggacatcaatgctaatagtgcactgggggaagaggtggaggctaacctgaaagcagtctgcaagtccaacgaattcgagaagtaccacttattcgttggtgacctggacaaggttgttaatctactgctatccctcagtggcaggctggctagagtcgaaaacgcactaaatagcattgattccgaggcaaaccaggagaaactcgtcctgattgagaaaaaacagcagctgactggacagctggccgatgctaaggaacttaaagagcatgtggacagaagggagaaattggtttttggtatggtcagccgctatctaccacaggatcagctgcaagattaccagcattttgtgaagatgaaaagcgccctgattatcgaacaaagagagctggaggaaaagatcaaactcggcgaggagcagctgaagtgcctaagggaaagcctgctgctgggaccaagcaatttctag

SEQ ID NO: 205304 - DNA, 4481 bp, Artificial Sequence
  derived and/or modified sequence
atggagaacagacctgggagcttccagtacgtacccgtccagctccagggcggagccccttggggttttactctgaaagggggtctggagcactgcgagccacttactgtgagcaagatcgaggatggtggcaaagccgctctctcacagaaaatgagaacaggggacgagcttgtaaacatcaatggtacccccctatacggaagtagacaagaggcactcatcctcatcaaagggtcctttcggatcctaaagttaatcgtgcgcagacgaaatgccccagtctccaggccccattcgtggcatgtggcaaagctcctggaaggctgccctgaggcggcaaccactatgcatttccctagtgaggcattctctctgtcttggcactctgggtgtaacactagcgacgtttgcgtgcagtggtgcccgttgagtcgtcattgtagcactgaaaagtccagtagtattggttcgatggagagcttggagcagccgggtcaggccacttacgagtcacatttgctaccaatcgaccagaatatgtatccgaaccagcgcgacagcgcctatagcagtttctcagccagcagcaacgcatcagactgtgcactgagtttgaggcccgaagagcccgctagtaccgactgtatcatgcagggaccaggcccaaccaaggccccttccggcaggccaaatgttgccgaaacaagcgggggatcaaggcgaaccaatggcggacatctgacccccagcagccagatgagctcccgcccacaggaaggataccagtctgggcctgctaaagcggttcgcggaccaccccagccaccagtcaggagagatagtttacaggctagcagagcccaactgttaaatggagagcagcgcagggccagcgagcccgtggtgccactgcctcaaaaggagaagctgtcgttggagccggtgttaccagccaggaatcctaataggttctgctgcctatccggtcacgaccaggtgacctcagaagggcaccagaattgtgagttcagccagcccccagagtcctcccaacagggatccgagcatcttcttatgcaggcgtcaacaaaagccgtggggtcaccaaaggcttgcgatagggcatcatccgtggactcaaatcctctgaatgaggcttccgccgagttggccaaggcctcgtttgggagacccccacatttgataggtcctactggccataggcactctgcccctgaacagctactggcctctcatttgcaacatgttcatttagatacacgaggctccaaaggcatggagctacctcccgtgcaggacggacaccagtggacattgtccccattacacagctcccataaaggtaaaaagagcccctgccccccaacaggtggtacgcatgaccaatcctcaaaggagagaaagacacgtcaagtggacgatcgtagtctggtgctagggcaccaatcccagagctctcctccccatggagaggctgacggacatccatccgaaaagggtttcctggaccctaaccgtacttcaagagcagcatccgaactagcaaaccagcaaccttctgcttcaggcagtctcgtgcagcaggccaccgactgtagttcaaccactaaagcggcaagcggaactgaagccggtgaggaaggcgactctgagcccaaggagtgttccagaatgggaggaagaaggtccggagggacacgcggtagatcgatccagaacagaaggaagtcagagcgctttgctaccaaccttaggaatgaaatacagcggagaaaagcgcagctgcaaaaatctaagggccctctcagccagctgtgtgacaccaaggaacccgtggaggaaacccaggaacctccggagtcgccgcctctgacggcaagcaatacttctctcttgtcatcttgtaagaaaccacccagtccacgggacaaactattcaataaaagtatgatgcttagagccaggtctagtgagtgcctgtcccaagctcctgagtcccatgaaagccgcacagggttagaggggaggattagccccggtcaaaggccaggacagagttccttaggcctcaacacctggtggaaagccccagacccaagcagctccgaccctgagaaggcccatgcccactgcggcgtgcggggtggtcactggcggtggtcccccgagcacaattcccagcctttagtagctgctgcaatggagggcccatcaaacccaggagataataaagaattaaaggcctcaaccgcccaggcaggcgaagatgccatcctactgcctttcgctgatcgcagaaagttttttgaggagtcctctaaatctctttctacatcccatctaccgggattaacaacccactcaaataaaacctttactcaacggccaaaacctattgatcagaatttccagcccatgtcttcatcctgccgggagctccgcaggcacccaatggaccagagttaccattcggcagatcaaccgtaccacgccacagaccagagctatcattctatgtctcccctgcagtctgagacccctacatattcagagtgtttcgcaagtaaagggttggagaatagcatgtgttgcaagcctcttcactgtggggatttcgattaccataggacctgcagctatagctgtagtgtgcagggcgctcttgtgcacgacccatgcatttattgctcaggcgagatctgccctgctctccttaaaaggaacatgatgcccaactgttataactgtagatgccatcaccatcagtgcattagatgtagcgtctgctatcataatccccaacattctgctctggaagacagcagcctcgcacctgggaacacatggaagcccagaaagctgacagttcaagagttccctggggacaaatggaaccctatcaccggaaacaggaaaaccagccaatcagggagggaaatggcacattccaagaccagctttagttgggctaccccatttcacccttgcctcgagaaccctgccctcgatttgagttcctatcgagctatcagctcattagacctgctgggcgatttcaaacatgcactcaagaagtcagaagaaacttccgtgtatgaggaagggtccagcctggcatcaatgccgcacccccttcgaagcagggcgttttcagaaagccacatcagcctcgctccccagtctacccgcgcttggggacaacatcggagagagttattcagtaagggcgacgagacccagagcgatctgcttggggcaaggaaaaaggcctttcctccccctcgacctccgcctccaaactgggaaaagtatcgtctgttccgtgccgctcagcagcagaagcagcagcaacagcagcagaagcagcaagaggaagaagaggaagaggaagaggaggaggaggaggaggaggaagaggaagaggaggaggccgaagaagaagaagaggaacttccaccacagtacttctccagcgagacatctgggtcatgtgctttgaaccctgaagaggtgcttgaacaaccccaaccattgtcattcggacatctggagggaagcaggcagggtagtcagtccgtccccgctgaacaggaaagcttcgctttgcatagtagtgactttttacctccaatcaggggccacctggggagccagcccgaacaagctcaaccaccttgttattacggaattggcggactgtggagaacaagtggacaagaggccactgaatctgcaaaacaggagtttcaacatttttcccccccttcaggagctccgggaatccctacatcgtactctgcttactacaacatttccgtggcgaaggcagagttgctgaacaagttgaaggaccaacccgagatggctgagattggactgggagaagaagaagtggaccatgaactcgctcaaaagaaaatacagctgatagagagtatctcccgtaaactgagcgttttacgagaggcacagaggggcttgctggaggatatcaacgccaacagtgcactcggggaggaagtcgaagcaaacttaaaggcagtgtgtaaaagtaatgagttcgagaaataccacctattcgtgggggatctggacaaagtggtgaatcttctgctgagtctgagcgggagattggctagagttgagaatgccctcaacagtatagactcagaagctaaccaggagaaactggttctgatcgaaaagaaacaacaactgacaggccagctggccgatgccaaggagctgaaagagcacgtggataggcgggaaaagctagtttttgggatggtgagtaggtacctccctcaggatcaactgcaagattaccagcacttcgtaaaaatgaaatccgcattgatcattgagcaacgtgaactggaggagaaaattaaactcggggaggaacagctgaagtgtctaagggaatcgctgctgctgggtccctctaacttcta

SEQ ID NO: 205305 - DNA, 4134 bp, Artificial Sequence
  derived and/or modified sequence
atgcattttccaagcgaggctttctctctgagctggcacagcgggtgcaatacttctgacgtgtgcgttcagtggtgtccgctatcgcgacattgttccaccgagaagagcagctccatcggctcaatggagagtctagaacagcctggtcaggccacttacgaaagccacctcctgcctatcgaccaaaacatgtatccaaatcagcgcgattctgcatacagctcctttagcgcttcatccaatgcatctgactgcgctctctcgctccgcccagaagaacctgcgtctacagattgtataatgcagggccctggccctactaaagcgccatccggcaggccaaacgtggccgagacgtcagggggttcaaggcggacaaatgggggacatttaacaccctccagccagatgtcgtcccggcctcaggaaggctaccagtctggtccagctaaagctgtgcggggtccaccccagcccccagtgaggagggatagtctgcaggcctctagagcacagctccttaacggcgagcaaaggcgagcctccgagcccgtggtgccattaccacagaaggaaaagctgtccctcgaacctgtgctccctgcccgaaaccctaacagattctgttgcctgtctggtcacgatcaggtgacatcggagggccaccaaaactgtgagtttagtcagccccctgagtcaagccagcaaggatcagaacacctcctcatgcaagccagtactaaggcagtagggtctccaaaggcctgcgacagagcctccagcgtggatagtaacccactcaacgaggcttccgcggaattggccaaagcgtcatttggccgacctcctcaccttatcggacctaccggacatcggcattccgccccagagcagctacttgcttcccatctgcagcatgtccatctcgatacaagaggatctaaaggcatggagttgcctcctgtccaggacggccaccagtggaccctttcccccttacacagctcacacaagggtaagaagtccccctgcccacctactggaggcacgcatgaccagtcatctaaagagcggaagacgagacaagtggatgatcgcagccttgttcttggacaccaatcccagtcctcacctcctcatggggaagccgatgggcacccatctgagaaggggttcctcgacccgaatagaacgagcagagccgcatcagaactcgcgaatcaacagccttccgcgtcaggcagtctcgtgcagcaagcaactgattgctccagcaccactaaggcggcttccggcactgaagcaggagaggagggcgatagtgagcctaaggagtgtagtcggatgggcggacggagaagtgggggaacccgagggagatcaatacagaacagacgaaaatccgagcgcttcgcgacaaatctcagaaacgagatacagcgccgtaaggctcagcttcaaaagagcaaaggcccactctcacagctgtgcgacacgaaagaaccagtggaagagactcaggaacctcccgagagcccaccactcacagcttcgaatacctccctgctctcatcgtgcaagaaacccccatcaccacgggataagcttttcaataagagcatgatgttgagagcgagatctagcgagtgcctatcccaggcgcctgagtcccacgaatcaagaactgggctggagggacgcattagtccgggtcaacgtccgggtcagagctctctaggactcaatacctggtggaaagctcctgacccgtcctcttctgacccagaaaaagcccatgcacactgcggagtccgtggaggacattggcgttggagcccagagcataatagtcaacctttggttgctgcagccatggaaggcccttccaatcccggtgataataaggagctcaaggcctctacagctcaggctggcgaggatgcgattctgctgccctttgccgatcggagaaagttctttgaggagtcttccaagagcctgtccaccagtcatctgccagggcttaccacacactctaacaaaactttcacgcaacgtcctaagcctattgaccagaatttccagcccatgtcgtcgtcctgcagagaacttcgaaggcacccgatggatcagtcatatcactctgccgatcagccataccacgccacagaccaaagctaccatagcatgtctcctctccagagcgaaacaccgacctatagcgagtgttttgcaagcaaaggcttagaaaactccatgtgctgcaaacctctccactgcggagacttcgactaccaccgcacatgttcatacagttgcagcgtacaaggtgccctcgtccacgatccttgcatatactgtagcggggagatctgccctgcacttcttaagcgcaacatgatgcccaactgttacaactgcagatgccatcatcaccaatgcatccgttgttccgtatgttaccataatccccagcatagcgcacttgaagatagttcactggcacctggcaacacctggaagccacggaaactgacggtgcaggaattccccggtgacaaatggaacccaatcacaggtaaccgcaagacttcgcaaagcggcagagagatggcccactccaagacatcttttagctgggctactcccttccatccttgtctggaaaatcctgccctagacctgtcaagctaccgagctatttctagtctcgatctgctgggggacttcaagcacgccctgaagaagagcgaagaaactagtgtctatgaggagggcagttcacttgcttcaatgccacaccccctgagatcaagagctttcagcgagtcacatatctccctagctcctcagtccacaagagcctggggacagcatcggagagaacttttctccaaaggcgacgagacacagtcggatctgcttggcgctcgcaagaaggcgtttccccctcctagaccccctcccccaaactgggagaagtatcgtctcttcagagccgctcagcaacaaaagcagcaacagcagcagcagaaacagcaggaggaagaggaggaggaggaggaggaagaagaggaggaggaggaagaggaggaagaagaagccgaggaagaagaggaagagttaccaccgcaatattttagtagcgaaacaagcggctcctgcgctctgaacccggaagaagtgctggagcagcctcaacctctgtccttcgggcatctggagggctctcgccaagggagccagagtgtacctgctgagcaagagtcatttgcactccacagcagcgattttctgccaccaattagaggccacctcgggagtcaacccgagcaggcccagcccccatgctattatggtataggagggctctggcggacaagcggtcaggaggcaaccgaatccgccaagcaggagttccagcattttagtcctccctctggggctccaggcatccccacctcgtatagcgcctattataacattagtgtcgccaaggcagaattactcaacaagctgaaggatcaaccagagatggccgagatcggcctcggtgaggaggaagtcgatcacgagctggctcaaaagaaaatacaacttattgagtccatatcgagaaagctttcagtgctcagggaggcgcagaggggattgttggaagatatcaacgcaaattcggccctgggagaggaagtcgaggcaaacctgaaagcagtctgtaaatccaatgagttcgagaagtatcatctttttgtaggagatctagacaaagtcgtaaacttgctgttgtcactgtcgggacggctcgcacgggtcgagaatgccctcaactcaatcgactcggaagctaatcaagagaaactcgtgctgattgagaagaagcagcagctgactgggcagctggccgatgctaaggagcttaaagagcatgtcgatagaagagagaaacttgttttcggtatggtcagtcgatatctaccgcaggaccagctgcaggactaccagcacttcgtgaaaatgaagtccgccttaattattgaacagcgcgagcttgaggaaaaaatcaagttgggggaagagcagctaaaatgcctgagggaaagcttgctgttaggcccaagcaacttctag

SEQ ID NO: 205306 - DNA, 6261 bp, Artificial Sequence
  derived and/or modified sequence
ccgttttcttgtccattacgcgctatccctccgcctctccttctttcttttcttttctttttttcccttctccttttcccccctctctccccctttctccagctccgtgtcatttcctccttgcgctcgctcgctgcctgagcgtctccagccgggagagtaggcggagcagggcggtgcggggtggcgtagagctggagggcgatggtggcggagctgctgggggcggaggcaacgtagccccctcggaaaaggagcccggcggcgcctgagcccagccgaggatggagaaccggcctgggtccttccagtacgtccctgtgcagctgcaagggggggcaccctggggcttcacccttaaggggggtctggaacactgtgagccgctcacagtgtctaagattgaagatggaggcaaggcagctttgtcccagaagatgaggactggtgatgagctggtgaatatcaatggcactccattatatggctcccgccaagaggccctcattctcatcaaaggctccttccggattctcaagctgattgtcaggaggaggaacgcccctgtcagtaggccgcactcatggcatgtggccaagctgctggagggatgccctgaagcagccaccaccatgcatttcccttctgaagccttcagcttgtcctggcattctggctgcaacacaagtgacgtgtgtgtgcagtggtgtccactctcccggcattgcagcaccgagaaaagcagctccattggcagcatggagagcctggagcaaccaggccaagccacctatgagagccatctgttgcctattgaccagaacatgtaccctaaccagcgtgactcagcctacagctccttctcggccagctcaaatgcttctgactgtgccctttccctcaggccagaggagccagcctctacagactgcatcatgcaaggcccagggccaactaaggcccccagtggccggcctaatgtggctgagacctcaggaggtagtcggcgcaccaatgggggccacctgacccccagctctcagatgtcatcccgtccacaggagggataccagtcagggcccgccaaagcagtcaggggcccaccacaacctccagtgaggcgggacagccttcaggcctccagagcccaactcctcaatggagagcagcgcagggcatctgagcctgtggtccccttgccacagaaggagaaactgagcttagagcctgtgctacccgcaaggaaccctaataggttctgttgcctcagtgggcatgaccaagtgacaagtgagggccatcagaactgtgagttcagtcagcctcctgaatccagccaacagggctctgagcatctactgatgcaggcctcaaccaaagctgttggatccccaaaagcctgtgacagagcttccagcgtggattccaacccactcaatgaggcttctgcagagctagctaaggcttcttttggcagacctccacatctcataggacccacagggcatcgccatagtgcccctgaacagctgctggcatcccacctgcagcatgtgcaccttgataccaggggcagcaaagggatggagctcccacccgtacaggatgggcaccagtggactctgtcccctttgcacagcagccacaaagggaagaaaagtccatgcccccctacaggaggaacccatgaccagtccagcaaagaaagaaagaccagacaagtggatgacaggtctttagttttgggacaccagagccaaagcagtcccccacatggagaggctgatggacacccctcagaaaaaggtttcctggacccaaacagaacaagcagagcagccagtgaattggccaaccagcaaccctctgcctctggctcccttgttcaacaagccacggactgttcttcaaccactaaagcagctagtggcacagaggcaggtgaagaaggggacagcgagcccaaggagtgcagccggatgggtggtaggcgaagtggagggacccggggccgctcgatccaaaaccggcggaagagtgagcgttttgctaccaatctgcgtaatgaaattcagaggaggaaggcccagctccagaaaagcaagggtcccttgtcacagctgtgtgacactaaggagccagtggaagagacccaggagcccccagaaagtcctccactcactgcctctaacacatctcttctatcttcatgtaaaaaacctcccagccccagagacaagctcttcaacaaaagcatgatgctcagagctaggtcttccgagtgcctcagccaagcccctgagagccatgaatctaggacaggcttagagggacgaataagccctggccagaggcctggccagtcctctttgggcctgaacacctggtggaaagcacctgacccatcctcctcagaccctgagaaagcacatgctcactgtggagtccgtggaggtcattggagatggtctccagagcataattcacagccacttgtggcagcagccatggaaggcccttccaacccaggtgacaacaaggaattgaaggcttctactgctcaagctggggaggatgccatcctcttgccttttgcagacagaagaaagttctttgaagagagtagcaaatccttatctacatctcatttgccaggtttaaccactcatagcaacaagacttttacccagagaccaaaacctatagaccaaaacttccagccaatgagctccagctgtagggaattgaggcgccatcccatggaccaatcatatcattccgcagaccaaccatatcatgccacagaccaatcatatcattccatgtcaccccttcagtcagaaactcccacttactcagaatgttttgcaagcaaaggtctagaaaattccatgtgttgtaagccactacactgtggtgattttgattaccacaggacctgctcttactcctgcagtgttcaaggagctctagtccatgatccttgcatttattgttctggggaaatctgccctgccttgctaaagagaaatatgatgccaaattgctacaactgccggtgccaccaccaccaatgcattcggtgttcagtttgctatcataatcctcagcacagtgccctcgaggacagcagcttggcacctggcaacacttggaaacccaggaagctgacagtgcaggaatttcctggggacaaatggaatccaataacaggaaacaggaagaccagccagtcagggagggaaatggctcattccaagactagcttttcatgggcaacccctttccatccttgccttgagaacccagcactggacttgtcaagctaccgagcaatttcttctcttgacctccttggagacttcaaacatgctttgaaaaaatcagaggaaacttcagtttatgaggaggggagctcccttgcctccatgccccacccactgcgcagccgtgccttctcagagagtcacatcagcttggcgccccaaagcacccgggcctgggggcagcataggagggagctctttagcaaaggtgatgagacccagtcggatcttctcggagccaggaagaaggcctttcctcctcctcgccctcctcctcccaactgggagaagtacaggctctttcgtgcagcccagcagcagaagcagcaacagcagcagcagaagcaacaggaggaggaggaggaggaggaagaagaagaagaagaggaagaggaagaggaggaggaggaggcagaggaggaggaagaggagctgccaccccagtatttcagttcagaaacctctggttcctgtgctctcaatcctgaggaggtcctagagcagccacaacccctcagctttggccacctggagggctcgagacagggttcacaaagtgtcccagcagagcaagaatcctttgcactccattccagtgatttcttgcctccaataaggggtcacttgggatctcaacctgagcaggctcagcccccttgctactatggcattggtgggctttggaggacatcgggacaggaagccactgaatccgccaaacaagagtttcagcacttttcgcctccttcaggggccccaggaatccctacctcttactcagcttattacaatatttctgtggccaaggcagagctgctgaacaaactgaaagaccaacctgagatggcagagattggcctaggagaggaggaagttgaccatgaactggctcaaaaaaagatacagcttatcgaaagcatcagcagaaaactttctgtcttgcgggaggcccagcgagggctgctagaggacatcaatgccaattctgcccttggggaggaggtggaggccaacttaaaagccgtctgcaaatccaatgaatttgaaaagtaccacttgtttgttggggacctggacaaagtggtcaacctgttgctgtcactctctggacgactggcccgggtggagaatgctctgaacagcatcgattcagaggccaaccaggagaagttggtactgatagagaagaagcagcagctgacggggcagttggcagatgccaaggagctgaaggagcacgtggaccgccgggagaagttggtgtttggcatggtctcccgctacctgcctcaggaccagctccaagattaccagcactttgtcaagatgaaatctgctctcatcattgaacagcgagagctggaggagaagatcaagctcggggaagagcaactcaaatgtctcagggagagtctactcctggggcccagcaatttctaattctaccagcactctgccacagcatccctgcccagccatgtgggaagtgctttcaatcttctttgttagcagtttctcagcaagtagatagcaattagcagtttgttccagccctctaccctggatgtctctcactaccccttccctagcagtggtcctaaccagctaggagaccctggggaagccacaagcttctacccaagggagctgcagcaaggtgtgatcttagaaccacactctccttcccacagttgccaagggcaagtacttgctgcacagagaaccaaggaagtgccttcattctgctttgtactaggacaccaaagacatcaagtactcatcacccacccatatcatcaacagcctctaaaggctcagagggaatctgccttgcagctctactctgccccagggcttgtggccagccatttctcacagagagctggctgccttgagggcattcacctggcaccagtttcagggcctcacccaagctttgcaggggaaagcacagagggaggaattacactgaaaaaaatgcaagcaaaggttgagtacccccaggtgccccttaggaaggaaccaggtttaaataggctctacccttacctttcccagcagcaagttcaggggaagaggcctactcttagccctggctagtgtgaccctcttcctgtcctaagactttggtcctaccacctcttgtttcatctttcctttacattgctgggggttaccgcaggtgcctaccccagggcttcaccatatgggccattaatagctctactaaaactgacttctagatgtaggtttcattattgggggagggggttcttattgttatattttaaatggccttttgattttatttatttttatgttttgattatttttttcttttttaactaataaggcgagaagagggaagttggagagggaaaagttagcccagaaggaaagcattttctgcagatcagcctgaatccaccgtggctaggcatattcttgctcttctcgtgttgctcacaactacctgcctggatgaatttaggaaagttgcaggatacaaggttaaaacacaagatcaaatgaacaatccgaaaatgttattaagaaaacagttccggccgggcatggtggctcacgcctgaaatcccagcactttgggaggccgaggcaggtggatcacgaggtcaggagatcaagaccatcctggctaacacggtgaaaccctatctctactaaaaatacaaaaaattagccaggtgtggtggcacgcaccagtagtcccagctactcgggaggctgaggcaggagaattgcttgaacctggaaggcagagattgcagtgagctgagaccacaccactgcactccatcctgggcaacagagtgagactttgtctcaaaaagaaagaaagaaagaaagaaagaaagaaagaaagaaaagaaagaaagaaagaaagaaagaaaacagttccatttacaatagcatc

SEQ ID NO: 205307 - DNA, 7966 bp, Artificial Sequence
  derived and/or modified sequence
ctttcatccttccctttgccaccagggtgctggctggttcctggagcagcgtcttcactcctatccagctcttgacactggctttcgttccctaaggctgtggccatatctaggtccatccaggctgatggtcataccttgccttcagtgctactccttcctgttcttagaactggaacctgactgtgcctgagccccttggatcacactcagcatcttgggctgatggtccctcgccccagaaggtcttaactggagggcagatgggtcccagctaagggaggacgctggctggagggtttgtcaacgagagtctgagctagccggataccccgctctctcccaagccatctctccaccctgggcaacttccatggaggaacgcccctgtcagtaggccgcactcatggcatgtggccaagctgctggagggatgccctgaagcagccaccaccatgcatttcccttctgaagccttcagcttgtcctggcattctggctgcaacacaagtgacgtgtgtgtgcagtggtgtccactctcccggcattgcagcaccgagaaaagcagctccattggcagcatggagagcctggagcaaccaggccaagccacctatgagagccatctgttgcctattgaccagaacatgtaccctaaccagcgtgactcagcctacagctccttctcggccagctcaaatgcttctgactgtgccctttccctcaggccagaggagccagcctctacagactgcatcatgcaaggcccagggccaactaaggcccccagtggccggcctaatgtggctgagacctcaggaggtagtcggcgcaccaatgggggccacctgacccccagctctcagatgtcatcccgtccacaggagggataccagtcagggcccgccaaagcagtcaggggcccaccacaacctccagtgaggcgggacagccttcaggcctccagagcccaactcctcaatggagagcagcgcagggcatctgagcctgtggtccccttgccacagaaggagaaactgagcttagagcctgtgctacccgcaaggaaccctaataggttctgttgcctcagtgggcatgaccaagtgacaagtgagggccatcagaactgtgagttcagtcagcctcctgaatccagccaacagggctctgagcatctactgatgcaggcctcaaccaaagctgttggatccccaaaagcctgtgacagagcttccagcgtggattccaacccactcaatgaggcttctgcagagctagctaaggcttcttttggcagacctccacatctcataggacccacagggcatcgccatagtgcccctgaacagctgctggcatcccacctgcagcatgtgcaccttgataccaggggcagcaaagggatggagctcccacccgtacaggatgggcaccagtggactctgtcccctttgcacagcagccacaaagggaagaaaagtccatgcccccctacaggaggaacccatgaccagtccagcaaagaaagaaagaccagacaagtggatgacaggtctttagttttgggacaccagagccaaagcagtcccccacatggagaggctgatggacacccctcagaaaaaggtttcctggacccaaacagaacaagcagagcagccagtgaattggccaaccagcaaccctctgcctctggctcccttgttcaacaagccacggactgttcttcaaccactaaagcagctagtggcacagaggcaggtgaagaaggggacagcgagcccaaggagtgcagccggatgggtggtaggcgaagtggagggacccggggccgctcgatccaaaaccggcggaagagtgagcgttttgctaccaatctgcgtaatgaaattcagaggaggaaggcccagctccagaaaagcaagggtcccttgtcacagctgtgtgacactaaggagccagtggaagagacccaggagcccccagaaagtcctccactcactgcctctaacacatctcttctatcttcatgtaaaaaacctcccagccccagagacaagctcttcaacaaaagcatgatgctcagagctaggtcttccgagtgcctcagccaagcccctgagagccatgaatctaggacaggcttagagggacgaataagccctggccagaggcctggccagtcctctttgggcctgaacacctggtggaaagcacctgacccatcctcctcagaccctgagaaagcacatgctcactgtggagtccgtggaggtcattggagatggtctccagagcataattcacagccacttgtggcagcagccatggaaggcccttccaacccaggtgacaacaaggaattgaaggcttctactgctcaagctggggaggatgccatcctcttgccttttgcagacagaagaaagttctttgaagagagtagcaaatccttatctacatctcatttgccaggtttaaccactcatagcaacaagacttttacccagagaccaaaacctatagaccaaaacttccagccaatgagctccagctgtagggaattgaggcgccatcccatggaccaatcatatcattccgcagaccaaccatatcatgccacagaccaatcatatcattccatgtcaccccttcagtcagaaactcccacttactcagaatgttttgcaagcaaaggtctagaaaattccatgtgttgtaagccactacactgtggtgattttgattaccacaggacctgctcttactcctgcagtgttcaaggagctctagtccatgatccttgcatttattgttctggggaaatctgccctgccttgctaaagagaaatatgatgccaaattgctacaactgccggtgccaccaccaccaatgcattcggtgttcagtttgctatcataatcctcagcacagtgccctcgaggacagcagcttggcacctggcaacacttggaaacccaggaagctgacagtgcaggaatttcctggggacaaatggaatccaataacaggaaacaggaagaccagccagtcagggagggaaatggctcattccaagactagcttttcatgggcaacccctttccatccttgccttgagaacccagcactggacttgtcaagctaccgagcaatttcttctcttgacctccttggagacttcaaacatgctttgaaaaaatcagaggaaacttcagtttatgaggaggggagctcccttgcctccatgccccacccactgcgcagccgtgccttctcagagagtcacatcagcttggcgccccaaagcacccgggcctgggggcagcataggagggagctctttagcaaaggtgatgagacccagtcggatcttctcggagccaggaagaaggcctttcctcctcctcgccctcctcctcccaactgggagaagtacaggctctttcgtgcagcccagcagcagaagcagcaacagcagcagcagaagcaacaggaggaggaggaggaggaggaagaagaagaagaagaggaagaggaagaggaggaggaggaggcagaggaggaggaagaggagctgccaccccagtatttcagttcagaaacctctggttcctgtgctctcaatcctgaggaggtcctagagcagccacaacccctcagctttggccacctggagggctcgagacagggttcacaaagtgtcccagcagagcaagaatcctttgcactccattccagtgatttcttgcctccaataaggggtcacttgggatctcaacctgagcaggctcagcccccttgctactatggcattggtgggctttggaggacatcgggacaggaagccactgaatccgccaaacaagagtttcagcacttttcgcctccttcaggggccccaggaatccctacctcttactcagcttattacaatatttctgtggccaaggcagagctgctgaacaaactgaaagaccaacctgagatggcagagattggcctaggagaggaggaagttgaccatgaactggctcaaaaaaagatacagcttatcgaaagcatcagcagaaaactttctgtcttgcgggaggcccagcgagggctgctagaggacatcaatgccaattctgcccttggggaggaggtggaggccaacttaaaagccgtctgcaaatccaatgaatttgaaaagtaccacttgtttgttggggacctggacaaagtggtcaacctgttgctgtcactctctggacgactggcccgggtggagaatgctctgaacagcatcgattcagaggccaaccaggagaagttggtactgatagagaagaagcagcagctgacggggcagttggcagatgccaaggagctgaaggagcacgtggaccgccgggagaagttggtgtttggcatggtctcccgctacctgcctcaggaccagctccaagattaccagcactttgtcaagatgaaatctgctctcatcattgaacagcgagagctggaggagaagatcaagctcggggaagagcaactcaaatgtctcagggagagtctactcctggggcccagcaatttctaattctaccagcactctgccacagcatccctgcccagccatgtgggaagtgctttcaatcttctttgttagcagtttctcagcaagtagatagcaattagcagtttgttccagccctctaccctggatgtctctcactaccccttccctagcagtggtcctaaccagctaggagaccctggggaagccacaagcttctacccaagggagctgcagcaaggtgtgatcttagaaccacactctccttcccacagttgccaagggcaagtacttgctgcacagagaaccaaggaagtgccttcattctgctttgtactaggacaccaaagacatcaagtactcatcacccacccatatcatcaacagcctctaaaggctcagagggaatctgccttgcagctctactctgccccagggcttgtggccagccatttctcacagagagctggctgccttgagggcattcacctggcaccagtttcagggcctcacccaagctttgcaggggaaagcacagagggaggaattacactgaaaaaaatgcaagcaaaggttgagtacccccaggtgccccttaggaaggaaccaggtttaaataggctctacccttacctttcccagcagcaagttcaggggaagaggcctactcttagccctggctagtgtgaccctcttcctgtcctaagactttggtcctaccacctcttgtttcatctttcctttacattgctgggggttaccgcaggtgcctaccccagggcttcaccatatgggccattaatagctctactaaaactgacttctagatgtaggtttcattattgggggagggggttcttattgttatattttaaatggccttttgattttatttatttttatgttttgattatttttttcttttttaactaataaggcgagaagagggaagttggagagggaaaagttagcccagaaggaaagcattttctgcagatcagcctgaatccaccgtggctaggtaagcaagtgccaaggcgttgaattgttcccaccatagctaccgatgtctaggaaggagttttccccttgaactcagagcctccctactgtggcctggccttgtgcttcccttaaagtctaagtgacttgagtttagcattccccagcagggtttaagtttttcttactgatttctttttgaaaccaaagaaatctcctgaaatggagaaaggttcagtcatttctctaccatctccaagctatgggatcagtagaggtgagctcagaaggaactcctctaaccattgctttctcagcctgtggcctggctcaagggaaccaaaactcaaggtagctgggagctccagccagagccagctccccagagcaattgaagacccagccaggatcttaggcatacaaacaactaaaactgctgctgttgccaaggccctgacaccagtagctagtttctatgctggaaaagcagccctcaggtggacgatggcaagaagggggttatggccaaatgctgccctgttatccagcttagctccctgttcctcactaactggggccaatccttggtatcacacaacccagccaaggcctggcatctcttctagttactgctgagttcctcagggtccttgaaggtcaactgtagcagcagggatgtctcattcaaccaaagaatttgccaaggaacttttgctgctgttacaaatacttgtcactagcttccatttcctcttcattgtatttgaaaacaatgggagaatcttggccagcagggtgtcctggggtagggggtggggtaagcctttctgtggagctctgggtttgctcttagtactgctgccagaaacactgttagaatggcaaccctgccattctcccctccagtggaagattctactttattcaggaaggctggtggcttgcaggggctaggcttacacaagccagccaagattgagaaggtaggggagtgctttcaatggaggccatagttgtcatcttttcttctgagcaggctctaggacaaacaatgagcaaattgagatgtcctgtattgggaggatgaggctgatatgtttcatcattctcagaatttgtgggctagagcacctttttgggaatatgggcctagggaaaagaacggtcacttacctggacactatggccatagtcttgagtttttctagtcagcatgtgattggttgtaccttaagtttatgacaccaaaaatactattaactctgttatttttgttcttaatcccatctcaaattagtttctagagttagaatcagaacacaaggatgctcattttcacatggagggaaagttgccaaagcatttaaaaaataaccccaaaagtatatctagcagtgaagcttggtagataaaggtgaactgctaaacagacactggcgtgccacactcctgccagggcagtctcattgtgtgtgacggtgctgcaacactgccagtattacttgagatgcagtctctctcccctgttctcagttcctgggctcagccctcctccaaggcctgccagtgagtagcagtttggaaggcaggccaagggagatccccaaagacagttatcagtcttaacttctgctgtctcccgtcaaatacttatacaggcccccatgggtaataggcaagcatgatggctgatagagaagtcagtgcatgagttactatcacatgtccccccaacccctcctgccacctcccagggctctggataattgaatcttcctgagtcccacagctggagactcaaccaggatatagctgtaaatgcccaagtagaatctgacagaataagacagagacactgaaaataaagccctagaaaggaagaaattggaagcaaagaaaaggagaggtgaaaagataaaaagcctccttcaaggttaggttcaggttctgttttccatttaacctcatgtgccataaagctgcccaggcacaccagagccacatcctgaacccgaccctccctgacagtgctgctctgccagtagcaagccccagatggaggaagctgggcccatttctggccacttccacccatttggagctttgccagaggagtcgtctatgccaataatatttctgcaacagcatattatattatttgaagattagtagatctttttgggggggtggggcaggggacagtttctatagatgaagaaccagtgttggttgtacagctgttgggggtcatctatcccatgtgaagctattctttttccaaatcttgttgtttctgcatttgtgtcctccaccactcccttcttggctgacatagatatgcctgccagattgtcatcaagggtcatatttcaataaaaggtgctaaggacaaaaaaaaa

SEQ ID NO: 205308 - DNA, 4134 bp, Artificial Sequence
  derived and/or modified sequence
atgcacttccccagcgaggccttcagcctgagctggcacagcggctgcaacaccagcgacgtgtgcgtgcagtggtgccccctgagcagacactgcagcaccgagaagagcagcagcatcggcagcatggagagcctggagcagcccggccaggccacctacgagagccacctgctgcccatcgaccagaacatgtaccccaaccagagagacagcgcctacagcagcttcagcgccagcagcaacgccagcgactgcgccctgagcctgagacccgaggagcccgccagcaccgactgcatcatgcagggccccggccccaccaaggcccccagcggcagacccaacgtggccgagaccagcggcggcagcagaagaaccaacggcggccacctgacccccagcagccagatgagcagcagaccccaggagggctaccagagcggccccgccaaggccgtgagaggccccccccagccccccgtgagaagagacagcctgcaggccagcagagcccagctgctgaacggcgagcagagaagagccagcgagcccgtggtgcccctgccccagaaggagaagctgagcctggagcccgtgctgcccgccagaaaccccaacagattctgctgcctgagcggccacgaccaggtgaccagcgagggccaccagaactgcgagttcagccagccccccgagagcagccagcagggcagcgagcacctgctgatgcaggccagcaccaaggccgtgggcagccccaaggcctgcgacagagccagcagcgtggacagcaaccccctgaacgaggccagcgccgagctggccaaggccagcttcggcagacccccccacctgatcggccccaccggccacagacacagcgcccccgagcagctgctggccagccacctgcagcacgtgcacctggacaccagaggcagcaagggcatggagctgccccccgtgcaggacggccaccagtggaccctgagccccctgcacagcagccacaagggcaagaagagcccctgcccccccaccggcggcacccacgaccagagcagcaaggagagaaagaccagacaggtggacgacagaagcctggtgctgggccaccagagccagagcagccccccccacggcgaggccgacggccaccccagcgagaagggcttcctggaccccaacagaaccagcagagccgccagcgagctggccaaccagcagcccagcgccagcggcagcctggtgcagcaggccaccgactgcagcagcaccaccaaggccgccagcggcaccgaggccggcgaggagggcgacagcgagcccaaggagtgcagcagaatgggcggcagaagaagcggcggcaccagaggcagaagcatccagaacagaagaaagagcgagagattcgccaccaacctgagaaacgagatccagagaagaaaggcccagctgcagaagagcaagggccccctgagccagctgtgcgacaccaaggagcccgtggaggagacccaggagccccccgagagcccccccctgaccgccagcaacaccagcctgctgagcagctgcaagaagccccccagccccagagacaagctgttcaacaagagcatgatgctgagagccagaagcagcgagtgcctgagccaggcccccgagagccacgagagcagaaccggcctggagggcagaatcagccccggccagagacccggccagagcagcctgggcctgaacacctggtggaaggcccccgaccccagcagcagcgaccccgagaaggcccacgcccactgcggcgtgagaggcggccactggagatggagccccgagcacaacagccagcccctggtggccgccgccatggagggccccagcaaccccggcgacaacaaggagctgaaggccagcaccgcccaggccggcgaggacgccatcctgctgcccttcgccgacagaagaaagttcttcgaggagagcagcaagagcctgagcaccagccacctgcccggcctgaccacccacagcaacaagaccttcacccagagacccaagcccatcgaccagaacttccagcccatgagcagcagctgcagagagctgagaagacaccccatggaccagagctaccacagcgccgaccagccctaccacgccaccgaccagagctaccacagcatgagccccctgcagagcgagacccccacctacagcgagtgcttcgccagcaagggcctggagaacagcatgtgctgcaagcccctgcactgcggcgacttcgactaccacagaacctgcagctacagctgcagcgtgcagggcgccctggtgcacgacccctgcatctactgcagcggcgagatctgccccgccctgctgaagagaaacatgatgcccaactgctacaactgcagatgccaccaccaccagtgcatcagatgcagcgtgtgctaccacaacccccagcacagcgccctggaggacagcagcctggcccccggcaacacctggaagcccagaaagctgaccgtgcaggagttccccggcgacaagtggaaccccatcaccggcaacagaaagaccagccagagcggcagagagatggcccacagcaagaccagcttcagctgggccacccccttccacccctgcctggagaaccccgccctggacctgagcagctacagagccatcagcagcctggacctgctgggcgacttcaagcacgccctgaagaagagcgaggagaccagcgtgtacgaggagggcagcagcctggccagcatgccccaccccctgagaagcagagccttcagcgagagccacatcagcctggccccccagagcaccagagcctggggccagcacagaagagagctgttcagcaagggcgacgagacccagagcgacctgctgggcgccagaaagaaggccttccccccccccagaccccccccccccaactgggagaagtacagactgttcagagccgcccagcagcagaagcagcagcagcagcagcagaagcagcaggaggaggaggaggaggaggaggaggaggaggaggaggaggaggaggaggaggaggaggaggccgaggaggaggaggaggagctgcccccccagtacttcagcagcgagaccagcggcagctgcgccctgaaccccgaggaggtgctggagcagccccagcccctgagcttcggccacctggagggcagcagacagggcagccagagcgtgcccgccgagcaggagagcttcgccctgcacagcagcgacttcctgccccccatcagaggccacctgggcagccagcccgagcaggcccagcccccctgctactacggcatcggcggcctgtggagaaccagcggccaggaggccaccgagagcgccaagcaggagttccagcacttcagcccccccagcggcgcccccggcatccccaccagctacagcgcctactacaacatcagcgtggccaaggccgagctgctgaacaagctgaaggaccagcccgagatggccgagatcggcctgggcgaggaggaggtggaccacgagctggcccagaagaagatccagctgatcgagagcatcagcagaaagctgagcgtgctgagagaggcccagagaggcctgctggaggacatcaacgccaacagcgccctgggcgaggaggtggaggccaacctgaaggccgtgtgcaagagcaacgagttcgagaagtaccacctgttcgtgggcgacctggacaaggtggtgaacctgctgctgagcctgagcggcagactggccagagtggagaacgccctgaacagcatcgacagcgaggccaaccaggagaagctggtgctgatcgagaagaagcagcagctgaccggccagctggccgacgccaaggagctgaaggagcacgtggacagaagagagaagctggtgttcggcatggtgagcagatacctgccccaggaccagctgcaggactaccagcacttcgtgaagatgaagagcgccctgatcatcgagcagagagagctggaggagaagatcaagctgggcgaggagcagctgaagtgcctgagagagagcctgctgctgggccccagcaacttctag

SEQ ID NO: 205309 - protein, 1233 aa, Artificial Sequence
  derived and/or modified sequence
MGTRAFSHDSIFIPDGGAESEQTVQAMSQDNILGKVKTLQQQLGKNIKFGQRSPNAIPMNKANSGEASLEEDLFLTSPMEIVTQQDIVLSDAENKSSDTPSSLSPLNLPGAGSEMEEKVAPVKPSRPKRHFSSAGTIESVNLDAIPLAIARLDNSAAKHKLAVKPKKQRVSKKHRRLAQDPQHEQGGLESRPCLDQNGHPGEDKPTWHEEEPNPLDSEEERRRQEDYWRELEAKCKRQKAEAAEKRRLEEQRLQALERRLWEENRRQELLEEEGEGQEPPLEAERAPREEQQRSLEAPGWEDAERREREERERLEAEEERRRLQAQAQAEERRRLEEDARLEERRRQEEEEGRCAEELKRQEEEEAEGWEELEQQEAEVQGPPEALEETGEGRRGAEEEDLGEEEEEGQAHLEDWRGQLSELLNDFEERLEDQERLKPEGQREHSEEPGICEEQNPEAERRREQQGRSGDFQGADRPGPEEKREEGDTEPLLKQEGPVEAAQPPVERKEAAALEQGRKVEELRWQEVDERQTMPRPYTFQVSSGGKQILFPKVNLSPVTPAKDTGLTAAPQEPKAPKASPVQHALPSSLSVPHTAILVTGAQLCGPAVNLSQIKDTACKSLLGLEEKKHAEAPAGENPPRGPGDARAGSGKAKPRQESPSSASALAEWASIRSRILKNAESDPRSSERDQLRPGDESTPRGRCDSRGNQRKTPPVNAKFSIMPAWQKFSDGGTETSKQSTEAESIRKRPMLGPSEETAPQPPPAGVRELGKGPEKSEMHREPADTTEGCKFAKDLPSFLVPSLPYPPQKVVAHTEFTTSSDSETANGIAKPDPVMPGGEEKASPFGIKLRRTNYSLRFNCDQQAEQKKKKRHSSTGDSADAGPPAAGSARGEKEMEGVALKHGPSLPQERKQAPSTRRDSAEPSSSRSVPVAHPGPPPASSQTPAPEHDKAANKMPLAQKPALAPKPTSQTPPASPLSKLSRPYLVELLSRRAGRPDPEPSEPSKEDQESSDRRPPSPPGPEERKGQKRDEEEEATERKPASPPLPATQQEKPSQTPEAGRKEKPMLQSRHSLDGSKLTEKVETAQPLWITLALQKQKGFREQQATREERKQAREAKQAEKLSKENVSVSVQPGSSSVSRAGSLHKSTALPEEKRPETAVSRLERREQLKKANTLPTSVTVEISDSAPPAPLVKEVTKRFSTPDAAPVSTEPAWLALAKRKAKAWSDCPQIIK

SEQ ID NO: 205310 - DNA, 3702 bp, Artificial Sequence
  derived and/or modified sequence
atgggcaccagagccttcagccacgacagcatcttcatccccgacggcggcgccgagagcgagcagaccgtgcaggccatgagccaggacaacatcctgggcaaggtgaagaccctgcagcagcagctgggcaagaacatcaagttcggccagagaagccccaacgccatccccatgaacaaggccaacagcggcgaggccagcctggaggaggacctgttcctgaccagccccatggagatcgtgacccagcaggacatcgtgctgagcgacgccgagaacaagagcagcgacacccccagcagcctgagccccctgaacctgcccggcgccggcagcgagatggaggagaaggtggcccccgtgaagcccagcagacccaagagacacttcagcagcgccggcaccatcgagagcgtgaacctggacgccatccccctggccatcgccagactggacaacagcgccgccaagcacaagctggccgtgaagcccaagaagcagagagtgagcaagaagcacagaagactggcccaggacccccagcacgagcagggcggcctggagagcagaccctgcctggaccagaacggccaccccggcgaggacaagcccacctggcacgaggaggagcccaaccccctggacagcgaggaggagagaagaagacaggaggactactggagagagctggaggccaagtgcaagagacagaaggccgaggccgccgagaagagaagactggaggagcagagactgcaggccctggagagaagactgtgggaggagaacagaagacaggagctgctggaggaggagggcgagggccaggagccccccctggaggccgagagagcccccagagaggagcagcagagaagcctggaggcccccggctgggaggacgccgagagaagagagagagaggagagagagagactggaggccgaggaggagagaagaagactgcaggcccaggcccaggccgaggagagaagaagactggaggaggacgccagactggaggagagaagaagacaggaggaggaggagggcagatgcgccgaggagctgaagagacaggaggaggaggaggccgagggctgggaggagctggagcagcaggaggccgaggtgcagggcccccccgaggccctggaggagaccggcgagggcagaagaggcgccgaggaggaggacctgggcgaggaggaggaggagggccaggcccacctggaggactggagaggccagctgagcgagctgctgaacgacttcgaggagagactggaggaccaggagagactgaagcccgagggccagagagagcacagcgaggagcccggcatctgcgaggagcagaaccccgaggccgagagaagaagagagcagcagggcagaagcggcgacttccagggcgccgacagacccggccccgaggagaagagagaggagggcgacaccgagcccctgctgaagcaggagggccccgtggaggccgcccagccccccgtggagagaaaggaggccgccgccctggagcagggcagaaaggtggaggagctgagatggcaggaggtggacgagagacagaccatgcccagaccctacaccttccaggtgagcagcggcggcaagcagatcctgttccccaaggtgaacctgagccccgtgacccccgccaaggacaccggcctgaccgccgccccccaggagcccaaggcccccaaggccagccccgtgcagcacgccctgcccagcagcctgagcgtgccccacaccgccatcctggtgaccggcgcccagctgtgcggccccgccgtgaacctgagccagatcaaggacaccgcctgcaagagcctgctgggcctggaggagaagaagcacgccgaggcccccgccggcgagaacccccccagaggccccggcgacgccagagccggcagcggcaaggccaagcccagacaggagagccccagcagcgccagcgccctggccgagtgggccagcatcagaagcagaatcctgaagaacgccgagagcgaccccagaagcagcgagagagaccagctgagacccggcgacgagagcacccccagaggcagatgcgacagcagaggcaaccagagaaagaccccccccgtgaacgccaagttcagcatcatgcccgcctggcagaagttcagcgacggcggcaccgagaccagcaagcagagcaccgaggccgagagcatcagaaagagacccatgctgggccccagcgaggagaccgccccccagcccccccccgccggcgtgagagagctgggcaagggccccgagaagagcgagatgcacagagagcccgccgacaccaccgagggctgcaagttcgccaaggacctgcccagcttcctggtgcccagcctgccctaccccccccagaaggtggtggcccacaccgagttcaccaccagcagcgacagcgagaccgccaacggcatcgccaagcccgaccccgtgatgcccggcggcgaggagaaggccagccccttcggcatcaagctgagaagaaccaactacagcctgagattcaactgcgaccagcaggccgagcagaagaagaagaagagacacagcagcaccggcgacagcgccgacgccggcccccccgccgccggcagcgccagaggcgagaaggagatggagggcgtggccctgaagcacggccccagcctgccccaggagagaaagcaggcccccagcaccagaagagacagcgccgagcccagcagcagcagaagcgtgcccgtggcccaccccggccccccccccgccagcagccagacccccgcccccgagcacgacaaggccgccaacaagatgcccctggcccagaagcccgccctggcccccaagcccaccagccagaccccccccgccagccccctgagcaagctgagcagaccctacctggtggagctgctgagcagaagagccggcagacccgaccccgagcccagcgagcccagcaaggaggaccaggagagcagcgacagaagaccccccagcccccccggccccgaggagagaaagggccagaagagagacgaggaggaggaggccaccgagagaaagcccgccagcccccccctgcccgccacccagcaggagaagcccagccagacccccgaggccggcagaaaggagaagcccatgctgcagagcagacacagcctggacggcagcaagctgaccgagaaggtggagaccgcccagcccctgtggatcaccctggccctgcagaagcagaagggcttcagagagcagcaggccaccagagaggagagaaagcaggccagagaggccaagcaggccgagaagctgagcaaggagaacgtgagcgtgagcgtgcagcccggcagcagcagcgtgagcagagccggcagcctgcacaagagcaccgccctgcccgaggagaagagacccgagaccgccgtgagcagactggagagaagagagcagctgaagaaggccaacaccctgcccaccagcgtgaccgtggagatcagcgacagcgccccccccgcccccctggtgaaggaggtgaccaagagattcagcacccccgacgccgcccccgtgagcaccgagcccgcctggctggccctggccaagagaaaggccaaggcctggagcgactgcccccagatcatcaagtag

SEQ ID NO: 205311 - DNA, 3681 bp, Artificial Sequence
  derived and/or modified sequence
atgggcgagcagaaggtgagcagacagttcaagcagtgccacagaaccaccagctgggccaagagcaagctgttcagcagactgagcagcatgttcctgcagcagctgggcaagaacatcaagttcggccagagaagccccaacgccatccccatgaacaaggccaacagcggcgaggccagcctggaggaggacctgttcctgaccagccccatggagatcgtgacccagcaggacatcgtgctgagcgacgccgagaacaagagcagcgacacccccagcagcctgagccccctgaacctgcccggcgccggcagcgagatggaggagaaggtggcccccgtgaagcccagcagacccaagagacacttcagcagcgccggcaccatcgagagcgtgaacctggacgccatccccctggccatcgccagactggacaacagcgccgccaagcacaagctggccgtgaagcccaagaagcagagagtgagcaagaagcacagaagactggcccaggacccccagcacgagcagggcggcctggagagcagaccctgcctggaccagaacggccaccccggcgaggacaagcccacctggcacgaggaggagcccaaccccctggacagcgaggaggagagaagaagacaggaggactactggagagagctggaggccaagtgcaagagacagaaggccgaggccgccgagaagagaagactggaggagcagagactgcaggccctggagagaagactgtgggaggagaacagaagacaggagctgctggaggaggagggcgagggccaggagccccccctggaggccgagagagcccccagagaggagcagcagagaagcctggaggcccccggctgggaggacgccgagagaagagagagagaggagagagagagactggaggccgaggaggagagaagaagactgcaggcccaggcccaggccgaggagagaagaagactggaggaggacgccagactggaggagagaagaagacaggaggaggaggagggcagatgcgccgaggagctgaagagacaggaggaggaggaggccgagggctgggaggagctggagcagcaggaggccgaggtgcagggcccccccgaggccctggaggagaccggcgagggcagaagaggcgccgaggaggaggacctgggcgaggaggaggaggagggccaggcccacctggaggactggagaggccagctgagcgagctgctgaacgacttcgaggagagactggaggaccaggagagactgaagcccgagggccagagagagcacagcgaggagcccggcatctgcgaggagcagaaccccgaggccgagagaagaagagagcagcagggcagaagcggcgacttccagggcgccgacagacccggccccgaggagaagagagaggagggcgacaccgagcccctgctgaagcaggagggccccgtggaggccgcccagccccccgtggagagaaaggaggccgccgccctggagcagggcagaaaggtggaggagctgagatggcaggaggtggacgagagacagaccatgcccagaccctacaccttccaggtgagcagcggcggcaagcagatcctgttccccaaggtgaacctgagccccgtgacccccgccaaggacaccggcctgaccgccgccccccaggagcccaaggcccccaaggccagccccgtgcagcacgccctgcccagcagcctgagcgtgccccacaccgccatcctggtgaccggcgcccagctgtgcggccccgccgtgaacctgagccagatcaaggacaccgcctgcaagagcctgctgggcctggaggagaagaagcacgccgaggcccccgccggcgagaacccccccagaggccccggcgacgccagagccggcagcggcaaggccaagcccagacaggagagccccagcagcgccagcgccctggccgagtgggccagcatcagaagcagaatcctgaagaacgccgagagcgaccccagaagcagcgagagagaccagctgagacccggcgacgagagcacccccagaggcagatgcgacagcagaggcaaccagagaaagaccccccccgtgaacgccaagttcagcatcatgcccgcctggcagaagttcagcgacggcggcaccgagaccagcaagcagagcaccgaggccgagagcatcagaaagagacccatgctgggccccagcgaggagaccgccccccagcccccccccgccggcgtgagagagctgggcaagggccccgagaagagcgagatgcacagagagcccgccgacaccaccgagggctgcaagttcgccaaggacctgcccagcttcctggtgcccagcctgccctaccccccccagaaggtggtggcccacaccgagttcaccaccagcagcgacagcgagaccgccaacggcatcgccaagcccgaccccgtgatgcccggcggcgaggagaaggccagccccttcggcatcaagctgagaagaaccaactacagcctgagattcaactgcgaccagcaggccgagcagaagaagaagaagagacacagcagcaccggcgacagcgccgacgccggcccccccgccgccggcagcgccagaggcgagaaggagatggagggcgtggccctgaagcacggccccagcctgccccaggagagaaagcaggcccccagcaccagaagagacagcgccgagcccagcagcagcagaagcgtgcccgtggcccaccccggccccccccccgccagcagccagacccccgcccccgagcacgacaaggccgccaacaagatgcccctggcccagaagcccgccctggcccccaagcccaccagccagaccccccccgccagccccctgagcaagctgagcagaccctacctggtggagctgctgagcagaagagccggcagacccgaccccgagcccagcgagcccagcaaggaggaccaggagagcagcgacagaagaccccccagcccccccggccccgaggagagaaagggccagaagagagacgaggaggaggaggccaccgagagaaagcccgccagcccccccctgcccgccacccagcaggagaagcccagccagacccccgaggccggcagaaaggagaagcccatgctgcagagcagacacagcctggacggcagcaagctgaccgagaaggtggagaccgcccagcccctgtggatcaccctggccctgcagaagcagaagggcttcagagagcagcaggccaccagagaggagagaaagcaggccagagaggccaagcaggccgagaagctgagcaaggagaacgtgagcgtgagcgtgcagcccggcagcagcagcgtgagcagagccggcagcctgcacaagagcaccgccctgcccgaggagaagagacccgagaccgccgtgagcagactggagagaagagagcagctgaagaaggccaacaccctgcccaccagcgtgaccgtggagatcagcgacagcgccccccccgcccccctggtgaaggaggtgaccaagagattcagcacccccgacgccgcccccgtgagcaccgagcccgcctggctggccctggccaagagaaaggccaaggcctggagcgactgcccccagatcatcaagtag

SEQ ID NO: 205312 - DNA, 2607 bp, Artificial Sequence
  derived and/or modified sequence
atgggcatcaccgagagcagcgacacccccagcagcctgagccccctgaacctgcccggcgccggcagcgagatggaggagaaggtggcccccgtgaagcccagcagacccaagagacacttcagcagcgccggcaccatcgagagcgtgaacctggacgccatccccctggccatcgccagactggacaacagcgccgccaagcacaagctggccgtgaagcccaagaagcagagagtgagcaagaagcacagaagactggcccaggacccccagcacgagcagggcggcctggagagcagaccctgcctggaccagaacggccaccccggcgaggacaagcccacctggcacgaggaggagcccaaccccctggacagcgaggaggagagaagaagacaggaggactactggagagagctggaggccaagtgcaagagacagaaggccgaggccgccgagaagagaagactggaggagcagagactgcaggccctggagagaagactgtgggaggagaacagaagacaggagctgctggaggaggagggcgagggccaggagccccccctggaggccgagagagcccccagagaggagcagcagagaagcctggaggcccccggctgggaggacgccgagagaagagagagagaggagagagagagactggaggccgaggaggagagaagaagactgcaggcccaggcccaggccgaggagagaagaagactggaggaggacgccagactggaggagagaagaagacaggaggaggaggagggcagatgcgccgaggagctgaagagacaggaggaggaggaggccgagggctgggaggagctggagcagcaggaggccgaggtgcagggcccccccgaggccctggaggagaccggcgagggcagaagaggcgccgaggaggaggacctgggcgaggaggaggaggagggccaggcccacctggaggactggagaggccagctgagcgagctgctgaacgacttcgaggagagactggaggaccaggagagactgaagcccgagggccagagagagcacagcgaggagcccggcatctgcgaggagcagaaccccgaggccgagagaagaagagagcagcagggcagaagcggcgacttccagggcgccgacagacccggccccgaggagaagagagaggagggcgacaccgagcccctgctgaagcaggagggccccgtggaggccgcccagccccccgtggagagaaaggaggccgccgccctggagcagggcagaaaggtggaggagctgagatggcaggaggtggacgagagacagaccatgcccagaccctacaccttccaggtgagcagcggcggcaagcagatcctgttccccaaggtgaacctgagccccgtgacccccgccaaggacaccggcctgaccgccgccccccaggagcccaaggcccccaaggccagccccgtgcagcacgccctgcccagcagcctgagcgtgccccacaccgccatcctggtgaccggcgcccagctgtgcggccccgccgtgaacctgagccagatcaaggacaccgcctgcaagagcctgctgggcctggaggagaagaagcacgccgaggcccccgccggcgagaacccccccagaggccccggcgacgccagagccggcagcggcaaggccaagcccagacaggagagccccagcagcgccagcgccctggccgagtgggccagcatcagaagcagaatcctgaagaacgccgagagcgaccccagaagcagcgagagagaccagctgagacccggcgacgagagcacccccagaggcagatgcgacagcagaggcaaccagagaaagaccccccccgtgaacgccaagttcagcatcatgcccgcctggcagaagttcagcgacggcggcaccgagaccagcaagcagagcaccgaggccgagagcatcagaaagagacccatgctgggccccagcgaggagaccgccccccagcccccccccgccggcgtgagagagctgggcaagggccccgagaagagcgagatgcacagagagcccgccgacaccaccgagggctgcaagttcgccaaggacctgcccagcttcctggtgcccagcctgccctaccccccccagaaggtggtggcccacaccgagttcaccaccagcagcgacagcgagaccgccaacggcatcgccaagcccgaccccgtgatgcccggcggcgaggagaaggccagccccttcggcatcaagctgagaagaaccaactacagcctgagattcaactgcgaccagcaggccgagcagaagaagaagaagagacacagcagcaccggcgacagcgccgacgccggcccccccgccgccggcagcgccagaggcgagaaggagatggagggcgtggccctgaagcacggccccagcctgccccaggagagaaagcaggcccccagcaccagaagagacagcgccgagcccagcagcagcagaagcgtgcccgtggcccaccccggccccccccccgccagcagccagacccccggcccccccgtgagaccccaccagcacccccacttccccaactag

SEQ ID NO: 205313 - DNA, 3702 bp, Artificial Sequence
  derived and/or modified sequence
atgggcacccgggcctttagccatgacagcattttcatccccgatggtggtgctgaatctgagcagacggttcaagccatgtctcaggacaacatacttggcaaggtcaagacacttcaacagcagttaggcaagaatataaaatttggacagcggtcacccaacgcgattcccatgaataaggctaactctggagaggcatcgttggaggaggatctgtttctgacatcacctatggagattgttacacaacaggacattgtactgtctgacgctgagaataaaagctccgatactccatcttctctgagccccctgaatctgcctggcgctggtagcgaaatggaggaaaaagttgcgccagtcaagcccagcagaccaaaacggcatttcagtagcgccgggacaattgagtctgttaatcttgacgcaatccctctggccatcgcccgacttgataattccgctgcaaagcataaactggccgttaaaccaaaaaaacagagggtgtccaagaaacatagaaggttagctcaggaccctcagcacgaacagggtgggcttgagtcccggccatgtctggaccagaacgggcacccgggagaagacaaacctacatggcatgaggaggagccgaaccctttagactctgaggaagaaagaagaaggcaggaggattactggcgagagctggaagccaaatgcaagagacagaaagcagaggctgccgaaaagcgacggctggaggagcagagattgcaggcactggagcggcgcttgtgggaggagaataggagacaggaattgttagaggaagaaggtgaggggcaggaaccccctttggaggcagaacgtgcacctagagaggagcagcagcgaagcctcgaagctccagggtgggaggatgcagagaggcgcgaacgagaggagcgggaacgactggaggctgaggaggaacgtaggaggctgcaggctcaggcacaggctgaagaaagacggcgtctggaggaggacgcccgcctcgaagaacggcgcaggcaagaagaggaggagggaagatgtgctgaggaattaaaacgacaggaagaggaggaggctgaaggctgggaggagcttgagcagcaggaggcagaggtccaggggccccctgaggctctggaagagactggcgagggaagaagaggggctgaggaagaggatctaggagaggaggaagaggagggtcaggcacatctggaggattggcgcgggcagctgtccgaactcctgaacgattttgaagaacgattagaggaccaagaacgcctgaagcctgaggggcagcgtgagcactccgaggagccagggatatgtgaggagcagaaccccgaagcggaaaggcggcgggaacaacagggcagatctggagacttccagggcgctgaccggccgggcccagaggaaaagcgcgaggagggggatacagaaccattgctgaagcaagaaggccccgtggaggctgcacaaccacccgtggaaagaaaggaggctgctgctctcgaacagggccggaaagtggaagagttgcgatggcaggaagtggatgaacggcaaaccatgcccaggccatatacgttccaagtctcaagtgggggaaagcagattctcttccccaaggtgaatctcagccccgtgacacccgccaaagacaccgggctgactgctgccccccaagagcccaaggcgccaaaggcatcaccagtacagcatgccttgccatcgtcgctgagtgtcccacacactgctatcctggtgacaggagcgcagctgtgcgggccagcggtgaacttgtctcagatcaaggataccgcctgtaaatcccttctgggtttggaagagaagaaacacgccgaggctcccgctggagagaatcctcctagaggacctggggacgcccgtgcggggtctgggaaagcgaagccacggcaagaatcaccctctagcgcaagtgctctagcagaatgggccagtataagatccaggatactcaagaacgcagagtcggatccaaggtctagcgagcgggaccaacttcgtcccggcgacgagagtactcccagggggagatgtgacagccgcggcaaccagaggaaaacaccccccgtcaatgctaaatttagcatcatgcccgcatggcaaaaattcagtgatggaggaaccgaaacctctaagcagagcaccgaggccgaaagcatacggaaacggcctatgctcgggcccagcgaggagaccgctccccagccacctcctgcgggagtgcgtgagctcggcaagggccccgaaaaatctgagatgcatagggagccggcagacaccaccgaggggtgcaaatttgctaaagacttgcccagcttcctcgtccccagtctgccgtatcctccccagaaggtagtcgctcacactgaattcacaacatcttcagactctgaaaccgcgaatggaatcgcgaaacctgaccccgttatgcccggcggcgaagagaaagccagccccttcggcatcaaattacgccggacgaactatagcctgcgctttaactgtgatcaacaagcggagcagaagaaaaaaaagcgccattcttccactggagatagcgccgacgccggtccaccagcggcagggtccgcacgaggtgagaaggagatggagggcgtcgccctcaaacacggaccctccctgccccaagagcgcaagcaggcgcccagcaccagaagggacagcgccgaaccatcttcatcccgctcagtgcccgtggctcatccaggaccccccccagccagtagccagactccagccccagagcacgacaaggccgcgaataaaatgccattggctcagaagcctgccctcgccccgaagccaacatcacagacccctccagcgagcccactgtcgaagctgtctcgaccctacctcgttgagctactgtctcggagggcaggtcggccggatcccgagccgagcgaaccatccaaagaggaccaagaatcctccgacaggcggccacccagcccacctggcccggaggagaggaagggacagaaacgtgatgaagaggaggaggctaccgagaggaagccggcaagtcccccattacctgccacacagcaagagaaaccatcccaaactccagaagccgggaggaaagaaaagccaatgctgcagtctcgtcattccctggatggaagcaaattgaccgagaaggttgagacagcacagcccctgtggatcaccttggccctgcagaagcaaaaaggcttccgagaacagcaggcaacccgcgaggaacggaagcaggccagagaggccaaacaggcagaaaaactaagcaaagaaaatgtgtccgtcagcgtgcagcccggcagctccagcgttagccgggccggaagtttacacaaatccacagctctgccggaggaaaaacggcccgagactgccgtgtctcgccttgagcggcgagaacaactgaagaaagccaacactctacccacatctgtgaccgtggagataagtgacagcgctccacctgcacctctggtgaaggaggtgaccaaaagattcagcacgccagatgccgctcccgtgtcgactgagccggcctggctagccctagctaagcgaaaagccaaagcgtggagtgattgtccacagatcattaaatag

SEQ ID NO: 205314 - DNA, 3681 bp, Artificial Sequence
  derived and/or modified sequence
atgggcgagcagaaagtgagccggcagtttaagcaatgccacagaactaccagttgggcaaagagcaaacttttcagtcgtctgtcatctatgtttcttcagcagttgggcaagaacataaaattcggtcagcgctcacctaacgccattccgatgaacaaagctaatagcggggaggcctctctcgaagaagacctgtttctcaccagccctatggagatagttacacagcaggacatcgtgctgtccgatgccgagaacaaatcaagtgatacacccagctccctcagtccactgaacttgccgggcgccggctctgagatggaggagaaggtcgcaccggttaaaccgagtcgtcctaagagacactttagtagcgctggaaccattgagagtgtgaacctggatgctattcctttagctatcgcaaggctcgacaacagtgccgccaagcataaactggcagtgaagcccaagaaacagagggtatcaaagaaacacagacgtctcgcccaggaccctcagcatgaacaagggggtttggaatccagaccatgtcttgaccagaatggccacccaggggaggataaacccacctggcacgaggaggaacctaaccccttggattccgaggaggaaaggcgcagacaggaggactattggagagaactggaggcaaagtgcaaaagacagaaggcagaagctgcggaaaagcgcagactcgaagaacagaggttgcaggcgctggaacgcaggctatgggaagaaaaccgcaggcaggaactgttggaggaggagggcgaagggcaagagccacctttagaagctgaaagggccccccgggaagaacagcagcgaagtttggaagcacctgggtgggaagacgcagagcgacgcgagcgggaagaacgggagcgcctggaggccgaggaagagagacggagacttcaggcacaagcccaagccgaggagcggagacgtctagaagaggacgcgcgactggaggaacgccggagacaggaagaggaagaggggaggtgcgcagaagagctcaagagacaggaggaggaggaagcagagggatgggaggagctggaacaacaggaggcggaggtgcagggtccacccgaagctctggaggaaactggcgaagggcggaggggcgctgaagaggaagatctgggggaggaagaagaggaaggacaggcccatttggaggactggcgcgggcaactgagtgaactgttgaacgacttcgaggaaagactagaagaccaggaaagactgaagccagagggacaacgggagcacagcgaggagccaggaatttgtgaagagcagaatcccgaagccgagcggcgcagggagcagcagggtcgctcaggagacttccaaggagctgacaggccaggacccgaagaaaagagggaggagggggacacagagcctctgttgaagcaggagggtcccgtcgaggccgcgcagcctcccgttgaacgcaaggaagctgccgcactggaacagggccgaaaggtggaagagttgcggtggcaggaagtggacgagaggcaaaccatgccccgcccttacacatttcaagtatccagcggcggcaagcaaattctgtttcccaaggttaacctctcccccgtcacaccagcaaaagatactggcctgacagcagcgccgcaggagccgaaggccccgaaggcaagtcccgtccagcatgccctgccatcctccctgtccgtgccccacactgccatacttgtgactggcgcgcaactgtgcggccctgccgtgaacctgagccagattaaagatactgcctgcaagtctcttcttgggctggaggaaaaaaagcacgccgaagcccctgctggtgagaacccaccacgaggccctggcgacgcccgcgcaggtagcggaaaagctaaacctcgacaagagtccccatcgtccgccagtgccctggcagagtgggcgtctattcgcagtcgcattttaaaaaacgccgagtccgacccccgctcctccgaaagagatcagctacggcccggcgacgagtccaccccaagaggtaggtgtgacagcaggggcaatcagcgcaaaaccccaccagtgaacgccaaattttctatcatgcccgcatggcaaaaattttccgacggagggacggaaacttctaagcagtccaccgaggcagaatctatacgaaagaggccaatgctggggccctctgaagagaccgctcctcaacctccacctgccggggtgcgcgagctggggaaggggccagaaaaatctgaaatgcatagagagcccgcggatacaaccgaaggctgtaaattcgccaaagacctccccagctttctggttccgtcactcccctatccaccccagaaggtcgtggcccacactgaatttactacatcgagcgacagcgagaccgccaatggaattgctaagccagaccccgtcatgcccggcggagaggaaaaagcctcccctttcgggatcaaacttcgtaggacaaattattctctgcgcttcaactgcgaccagcaagccgaacagaagaagaagaaaaggcactcatctacaggagatagcgcagatgctgggcccccggccgccgggagtgctcgaggggagaaggaaatggagggagtggcacttaagcacggtccatctctcccgcaggaaagaaaacaggcgccgtccacccgaagagattctgctgagccatcatcaagtcgatccgtgcccgtggcccatcccggaccaccacccgcaagtagtcagactcccgctcccgagcatgataaagctgccaacaagatgccgctagcccagaagcccgcgttggccccaaagcccacatcccagactccccctgcatcaccactaagtaagctgtctcgcccgtatcttgtggagctgctttctcgacgcgccggcagaccagatccagaaccgagcgagccaagtaaggaggaccaggagtcatctgataggcgccccccgtccccccctggaccggaggagagaaaaggccagaaacgcgatgaggaagaggaggcaactgagcgcaaacccgcttcaccccctctgcctgccacgcagcaggagaagccctcacaaacccccgaggccggacggaaagaaaagccaatgctacagtcccgtcactccctggatggaagcaaactaacggaaaaagtagaaactgcccagcctctttggatcactcttgcccttcagaaacagaagggtttcagggaacagcaagctacacgcgaggagaggaagcaggcccgggaggctaaacaagcagagaagctgagcaaggaaaacgtgagtgtgtcagtgcagcccgggtcttccagtgttagccgtgctggaagtctacataagtctactgcgctgccagaggaaaagaggcccgagacggctgtgtctagacttgagaggcgagagcagctgaaaaaagcgaacaccctacctacctccgtgactgtggaaatttctgactctgctccgcctgcacccctggtcaaggaggtgacaaagcgatttagtacccctgatgccgcaccggtctccacagagcctgcctggctggccctcgccaagaggaaagccaaagcgtggagcgactgtccacaaataattaagtag

SEQ ID NO: 205315 - DNA, 2607 bp, Artificial Sequence
  derived and/or modified sequence
atgggcattactgaatcatcagacacccctagcagcctctctcctctgaacctcccaggggcgggttcagaaatggaagaaaaagtcgcccccgtcaagccgtcgagaccgaaacggcatttctccagtgctggaacaatagagtctgtgaaccttgacgctatcccactcgccattgcccgtctggacaactcagctgccaagcacaagttagcagtgaaacctaagaagcagcgtgtgtccaagaagcacagacgactcgcacaggatccccagcacgaacaaggtggtctcgagtcacgcccatgtttggatcagaacggccatcccggcgaagacaagcctacttggcatgaagaggaacctaacccattagattccgaggaagaaaggcgtcgtcaggaagactactggagggagctcgaagccaaatgtaaaagacagaaagccgaggctgccgagaaacgtcggctcgaggaacagcggctccaggccctcgaaagacgtctctgggaggaaaacaggaggcaggagctgcttgaggaggaaggagaggggcaggaacccccattggaagctgagcgcgcaccacgcgaggagcagcaacgctctcttgaggctccaggctgggaggacgcagaacgaagagaacgagaggaacgggaacgccttgaagccgaggaagagaggaggagactccaggctcaggcgcaggcagaggagcggcgcagactggaggaagatgcccgcctggaagaaaggaggcggcaggaagaggaggagggccggtgcgctgaggagctgaagcgtcaagaggaggaggaggccgagggctgggaggagttggaacagcaagaggctgaggtccagggtccgccggaggctttggaagagactggtgagggaagaagaggggcggaggaggaggacctgggtgaagaggaagaggagggacaagcccacttggaagactggagaggacaactgtccgagctcctgaacgattttgaggagcgcctggaagaccaggagcgcctgaaacctgagggacagcgtgagcatagtgaggaaccaggcatctgcgaagagcaaaaccctgaagctgagcgaagaagggagcagcagggacgcagcggagacttccaaggtgccgataggcctggcccagaagaaaagcgagaagagggcgacacagagcccctgttgaagcaggagggacccgttgaggctgctcaacctccagttgagcgcaaggaggccgcagctctggagcagggccggaaagtggaagagctgagatggcaggaggtggatgaaagacagaccatgccacgtccctacactttccaggtgtcctctggtgggaagcagatcctcttccccaaagtgaatctgtcccccgtcactccggcaaaagataccggactgaccgctgcacctcaggaaccaaaagctccaaaggccagccccgtccagcacgcactgccttctagtttatcagtcccccacactgccatactggttacaggcgcccagctatgtggacctgctgtgaatctgagccagattaaggacactgcatgcaaatctctgctggggctcgaagaaaaaaaacacgccgaagctcctgctggtgagaatccacccagaggccccggcgatgctagagcagggtccgggaaggcaaagccgcgccaagaatccccatctagtgcttctgccctggcagagtgggcctcaatccggtcccggatcctcaaaaatgccgaaagcgacccacggagttctgagcgcgatcagctccggccaggcgacgaaagtacgccccgcggacgatgcgactccagagggaatcaacgcaagactccacccgtcaatgctaagttcagtatcatgcctgcttggcagaagttttcagatggggggaccgagacctctaagcagagcacggaggctgagtccattcgcaagcgcccaatgttgggcccatcagaggagaccgcacctcagcctccacctgccggcgtgcgcgagttgggcaagggcccagagaagagtgagatgcatcgggaacctgcggacacgaccgaaggttgtaagttcgcaaaagatctaccatcctttttagtgcctagccttccctatccacctcaaaaggtcgtagcacataccgagtttacaacgtctagcgacagcgagaccgccaacgggatcgctaagcctgaccctgtgatgccgggaggagaagagaaagcaagcccatttggcatcaaattgagacgcacaaattattctctgcgcttcaactgtgaccaacaagcagagcagaaaaagaaaaagcggcactctagcactggcgactcagccgacgctggacccccggccgcaggatccgcacgcggcgaaaaggagatggaaggggttgctttgaaacatggcccgagcctgcctcaggaaagaaagcaggcaccctcgacgcgcagggactctgctgaaccgagtagctctcgctctgtacctgtggctcacccaggtccaccacccgcttcatcccagactcctgggccccctgtgcgccctcatcagcacccgcacttccccaactag

SEQ ID NO: 205316 - DNA, 3702 bp, Artificial Sequence
  derived and/or modified sequence
atgggcacccgggccttcagccatgacagcatcttcatcccagatggaggagctgagagcgagcagacagtgcaggccatgagccaggacaacatcctgggcaaggtgaagaccctgcagcagcagctgggcaagaacatcaagtttggccagaggagccccaatgccatccccatgaacaaggccaacagcggggaggccagcctggaggaggacctcttcctgaccagccccatggagatcgtgacccagcaggacatcgtgctgagtgatgctgagaacaagagcagtgacacccccagcagcctgagccccctgaacctgcctggagctggcagcgagatggaggagaaggtggcccctgtgaagcccagccggcccaagaggcacttcagcagcgctggcaccattgaatctgtgaacctggatgccatccccctggccatcgcccggctggacaacagcgctgccaagcacaagctggccgtgaagcccaagaagcagagggtgtccaagaagcaccggcggctggcccaggacccccagcacgagcagggcggcctggagagccggccctgcctggaccagaatggccaccctggagaggacaagcccacctggcatgaggaggagcccaaccccctggacagcgaggaggagcggcggcggcaggaggactactggagggagctggaggccaagtgcaagaggcagaaggccgaggccgctgagaagaggcggctggaggagcagaggctgcaggccctggagcggcggctgtgggaggagaacagacggcaggagctgctggaggaggagggggagggccaggagccccccctggaggccgagcgggccccccgggaggagcagcagaggagcctggaggcccctggctgggaggatgctgagcggcgggagcgggaggagcgggagcggctggaggccgaggaggagcggcggcggctgcaggcccaggcccaggccgaggagcggcggcggctggaggaggatgcccggctggaggagcggcggcggcaggaggaggaggagggccgctgtgccgaggagctgaagaggcaggaggaggaggaggccgagggctgggaggagctggagcagcaggaggccgaggtgcagggccccccagaggccctggaggagactggagagggcagaagaggagctgaggaggaggacctgggggaggaggaggaggagggccaggcccacctggaggactggaggggccagctgtctgagctgctgaatgactttgaggagcggctggaggaccaggagcggctgaagccagagggccagcgggagcacagcgaggagcccggcatctgtgaggagcagaaccctgaggccgagaggagaagagagcagcagggccgcagcggggacttccagggcgctgacaggcctggccctgaggagaagcgggaggagggggacacagagcccctgctgaagcaggagggccctgtggaggccgcccagccccctgtggagaggaaggaggccgccgccctggagcagggcaggaaggtggaggagctgcgctggcaggaggtggatgagcggcagaccatgccccggccctacaccttccaggtgtcctctgggggcaagcagatcctcttccccaaggtgaacctgagccctgtgaccccagccaaggacaccggcctgacagctgccccccaggagcccaaggcccccaaggccagccctgtgcagcacgccctgcccagcagcctgtctgtgccccacacagccatcctggtgactggagcccagctgtgtggccctgctgtgaacctgagccagatcaaggacacagcctgcaagagcctgctgggcctggaggagaagaagcacgccgaggccccagctggggagaaccccccccggggccctggagatgcccgggccggcagcggcaaggccaagccccggcaggagagccccagcagcgccagcgccctggccgagtgggccagcatccgcagccgcatcctgaagaatgctgagagtgaccccaggagcagcgagcgggaccagctgcggcctggagatgagagcaccccccggggccgctgtgacagccggggcaaccagaggaagaccccacctgtgaatgccaagttcagcatcatgcctgcctggcagaagttcagtgatggcggcacagagaccagcaagcagagcacagaggccgagagcatcaggaagaggcccatgctgggccccagcgaggagacagccccccagcccccacctgctggggtgcgggagctgggcaaaggacctgagaagtctgagatgcaccgggagcctgctgacaccacagagggctgcaagtttgccaaggacctgcccagcttcctggtgcccagcctgccctacccaccccagaaggtggtggcccacacagagttcaccaccagcagtgacagcgagacagccaacggcatcgccaagccagaccctgtgatgcctggaggagaggagaaggccagccccttcggcatcaagctgcggaggaccaactacagcctgcgcttcaactgtgaccagcaggccgagcagaagaagaagaagaggcacagcagcactggagacagcgcagatgctggccccccagctgctggcagcgcccggggggagaaggagatggagggcgtggccctgaagcacggccccagcctgccccaggagaggaagcaggcccccagcacccggcgggacagcgctgagcccagcagcagccgctctgtgcctgtggcccaccctggccccccaccagccagcagccagaccccagcccctgagcatgacaaggccgccaacaagatgcccctggcccagaagccagccctggcccccaagcccaccagccagaccccaccagccagccccctgagcaagctgagccggccctacctggtggagctgctgagcagaagagctggccgcccagaccctgagcccagcgagcccagcaaggaggaccaggagagcagtgacagaagaccacccagccccccaggccctgaggagaggaagggccagaagagagatgaggaggaggaggccacagagaggaagccagccagcccccccctgcctgccacccagcaggagaagcccagccagaccccagaggccggcaggaaggagaagcccatgctgcagagccgccacagcctggatggcagcaagctgacagagaaggtggagacagcccagcccctgtggatcaccctggccctgcagaagcagaagggcttccgggagcagcaggccacccgggaggagaggaagcaggcccgggaggccaagcaggccgagaagctgagcaaagaaaatgtgtctgtgtctgtgcagcccggcagcagctctgtgtccagagctggcagcctgcacaagagcacagccctgcctgaggagaagaggcctgagacagctgtgtcccggctggagcggcgggagcagctgaagaaggccaacaccctgcccacctctgtgacagtggagatcagtgacagcgcccccccagcccccctggtgaaggaggtgaccaagcgcttcagcaccccagatgctgcccctgtgtccacagagcccgcctggctggccctggccaagaggaaggccaaggcctggagcgactgcccccagatcatcaagtag

SEQ ID NO: 205317 - DNA, 3681 bp, Artificial Sequence
  derived and/or modified sequence
atgggagagcagaaggtgtcccggcagttcaagcagtgccacaggaccacctcctgggccaagagcaagctgttcagccggctgagctccatgttcctgcagcagctgggcaagaacatcaagtttggccagaggagccccaatgccatccccatgaacaaggccaacagcggggaggccagcctggaggaggacctcttcctgaccagccccatggagatcgtgacccagcaggacatcgtgctgagtgatgctgagaacaagagcagtgacacccccagcagcctgagccccctgaacctgcccggggccggcagcgagatggaggagaaggtggcccctgtgaagcccagccggcccaagaggcacttcagcagcgctggcaccatcgagagcgtgaacctggatgccatccccctggccatcgcccggctggacaacagcgctgccaagcacaagctggccgtgaagcccaagaagcagagggtgtccaagaagcaccggcggctggcccaggacccccagcacgagcagggcggcctggagagccggccctgcctggaccagaatggccaccctggagaggacaagcccacctggcatgaggaggagcccaaccccctggacagcgaggaggagcggcggcggcaggaggactactggagggagctggaggccaagtgcaagaggcagaaggccgaggccgctgagaagaggcggctggaggagcagaggctgcaggccctggagcggcggctgtgggaggagaacagacggcaggagctgctggaggaggagggggagggccaggagccccccctggaggccgagcgggccccccgggaggagcagcagaggagcctggaggcccctggctgggaggatgctgagcggcgggagcgggaggagcgggagcggctggaggccgaggaggagcggcggcggctgcaggcccaggcccaggccgaggagcggcggcggctggaggaggatgcccggctggaggagcggcggcggcaggaggaggaggagggccgctgtgccgaggagctgaagaggcaggaggaggaggaggccgagggctgggaggagctggagcagcaggaggccgaggtgcagggccccccagaggccctggaggagaccggggagggcagaagaggagctgaggaggaggacctgggggaggaggaggaggagggccaggcccacctggaggactggaggggccagctgtctgagctgctgaatgactttgaggagcggctggaggaccaggagcggctgaagccagagggccagcgggagcacagcgaggagcccggcatctgtgaggagcagaaccctgaggccgagcggcggcgggagcagcagggccgcagcggggacttccagggcgctgaccggcccggccctgaggagaagcgggaggagggggacacagagcccctgctgaagcaggagggccctgtggaggccgcccagccccctgtggagaggaaggaggccgccgccctggagcagggcaggaaggtggaggagctgcgctggcaggaggtggatgagcggcagaccatgccccggccctacaccttccaggtgagcagcggcggcaagcagatcctcttccccaaggtgaacctgagccctgtgaccccagccaaggacaccggcctgacagctgccccccaggagcccaaggcccccaaggccagccctgtgcagcacgccctgcccagcagcctgtctgtgccccacacagccatcctggtgactggagcccagctgtgtggccctgctgtgaacctgagccagatcaaggacacagcctgcaagagcctgctgggcctggaggagaagaagcatgctgaggccccagctggagaaaatccaccccggggccctggagatgcccgggccggcagcggcaaggccaagccccggcaggagagccccagcagcgccagcgccctggccgagtgggccagcatccgcagccgcatcctgaagaatgctgagagtgaccccaggagcagcgagcgggaccagctgcggcctggagatgagagcaccccccggggccgctgtgacagccggggcaaccagaggaagaccccacctgtgaatgccaagttcagcatcatgcctgcctggcagaagttcagtgatggcggcacagagaccagcaagcagagcacagaagctgagagcatcaggaagaggcccatgctgggccccagcgaggagacagccccccagcccccacctgctggggtgcgggagctgggcaagggccctgagaagtctgagatgcaccgggagcctgctgacaccacagagggctgcaagtttgccaaggacctgcccagcttcctggtgcccagcctgccctacccaccccagaaggtggtggcccacacagagttcaccaccagcagtgacagcgagacagccaatggaattgccaagccagaccctgtgatgcctggaggagaggagaaggccagccccttcggcatcaagctgcggaggaccaactacagcctgcgcttcaactgtgaccagcaggccgagcagaagaagaagaagaggcacagcagcactggagacagcgcagatgctggccccccagctgctggcagcgcccggggggagaaggagatggagggcgtggccctgaagcacggccccagcctgccccaggagaggaagcaggcccccagcacccggcgggacagcgctgagcccagcagcagccgctctgtgcctgtggcccaccctggccccccaccagccagcagccagaccccagcccctgagcatgacaaggccgccaacaagatgcccctggcccagaagccagccctggcccccaagcccaccagccagaccccaccagccagccccctgagcaagctgagccggccctacctggtggagctgctgagccggcgggccggccgcccagaccctgagcccagcgagcccagcaaagaagaccaggagagcagtgaccggcggccccccagccccccaggccctgaggagaggaagggccagaagagagatgaggaggaggaggccacagagaggaagccagccagcccccccctgcctgccacccagcaggagaagcccagccagaccccagaggccggcaggaaggagaagcccatgctgcagagccgccacagcctggatggcagcaagctgacagagaaggtggagacagcccagcccctgtggatcaccctggccctgcagaagcagaagggcttccgggagcagcaggccacccgggaggagaggaagcaggcccgggaggccaagcaggccgagaagctgagcaaagaaaatgtgtctgtgtctgtgcagcccggcagcagctctgtgtcccgggccggcagcctgcacaagagcacagccctgcctgaggagaagaggcctgagacagctgtgtcccggctggagcggcgggagcagctgaagaaggccaacaccctgcccacctctgtgacagtggagatcagtgacagcgcccccccagcccccctggtgaaggaggtgaccaagcgcttcagcaccccagatgctgcccctgtgtccacagagcccgcctggctggccctggccaagaggaaggccaaggcctggagcgactgcccccagatcatcaagtag

SEQ ID NO: 205318 - DNA, 2607 bp, Artificial Sequence
  derived and/or modified sequence
atgggcatcacagagagcagtgacacccccagcagcctgagccccctgaacctgcctggagctggcagcgagatggaggagaaggtggcccctgtgaagcccagccggcccaagaggcacttcagcagcgctggcaccattgaatctgtgaacctggatgccatccccctggccatcgcccggctggacaacagcgctgccaagcacaagctggccgtgaagcccaagaagcagagggtgtccaagaagcaccggcggctggcccaggacccccagcacgagcagggcggcctggagagccggccctgcctggaccagaatggccaccctggagaggacaagcccacctggcatgaggaggagcccaaccccctggacagcgaggaggagcggcggcggcaggaggactactggagggagctggaggccaagtgcaagaggcagaaggccgaggccgctgagaagaggcggctggaggagcagaggctgcaggccctggagcggcggctgtgggaggagaacagacggcaggagctgctggaggaggagggggagggccaggagccccccctggaggccgagcgggccccccgggaggagcagcagaggagcctggaggcccctggctgggaggatgctgagcggcgggagcgggaggagcgggagcggctggaggccgaggaggagcggcggcggctgcaggcccaggcccaggccgaggagcggcggcggctggaggaggatgcccggctggaggagcggcggcggcaggaggaggaggagggccgctgtgccgaggagctgaagaggcaggaggaggaggaggccgagggctgggaggagctggagcagcaggaggccgaggtgcagggccccccagaggccctggaggagactggagagggcagaagaggagctgaggaggaggacctgggggaggaggaggaggagggccaggcccacctggaggactggaggggccagctgtctgagctgctgaatgactttgaggagcggctggaggaccaggagcggctgaagccagagggccagcgggagcacagcgaggagcccggcatctgtgaggagcagaaccctgaggccgagaggagaagagagcagcagggccgcagcggggacttccagggcgctgacaggcctggccctgaggagaagcgggaggagggggacacagagcccctgctgaagcaggagggccctgtggaggccgcccagccccctgtggagaggaaggaggccgccgccctggagcagggcaggaaggtggaggagctgcgctggcaggaggtggatgagcggcagaccatgccccggccctacaccttccaggtgtcctctgggggcaagcagatcctcttccccaaggtgaacctgagccctgtgaccccagccaaggacaccggcctgacagctgccccccaggagcccaaggcccccaaggccagccctgtgcagcacgccctgcccagcagcctgtctgtgccccacacagccatcctggtgactggagcccagctgtgtggccctgctgtgaacctgagccagatcaaggacacagcctgcaagagcctgctgggcctggaggagaagaagcacgccgaggccccagctggggagaaccccccccggggccctggagatgcccgggccggcagcggcaaggccaagccccggcaggagagccccagcagcgccagcgccctggccgagtgggccagcatccgcagccgcatcctgaagaatgctgagagtgaccccaggagcagcgagcgggaccagctgcggcctggagatgagagcaccccccggggccgctgtgacagccggggcaaccagaggaagaccccacctgtgaatgccaagttcagcatcatgcctgcctggcagaagttcagtgatggcggcacagagaccagcaagcagagcacagaggccgagagcatcaggaagaggcccatgctgggccccagcgaggagacagccccccagcccccacctgctggggtgcgggagctgggcaaaggacctgagaagtctgagatgcaccgggagcctgctgacaccacagagggctgcaagtttgccaaggacctgcccagcttcctggtgcccagcctgccctacccaccccagaaggtggtggcccacacagagttcaccaccagcagtgacagcgagacagccaacggcatcgccaagccagaccctgtgatgcctggaggagaggagaaggccagccccttcggcatcaagctgcggaggaccaactacagcctgcgcttcaactgtgaccagcaggccgagcagaagaagaagaagaggcacagcagcactggagacagcgcagatgctggccccccagctgctggcagcgcccggggggagaaggagatggagggcgtggccctgaagcacggccccagcctgccccaggagaggaagcaggcccccagcacccggcgggacagcgctgagcccagcagcagccgctctgtgcctgtggcccaccctggccccccaccagccagcagccagaccccaggcccccctgtgcggccccaccagcacccccacttccccaactag

SEQ ID NO: 205319 - DNA, 3702 bp, Artificial Sequence
  derived and/or modified sequence
atgggcacccgggccttcagccacgacagcatcttcatccccgacggtggcgcagagagcgaacagactgtgcaggctatgtcacaggataatattctggggaaagtcaaaaccctgcagcagcaattaggtaaaaacataaaatttggccaaaggagtccaaacgccatacccatgaataaggctaattcgggagaagcatccctcgaagaagacctgtttcttaccagtcccatggagattgtgacccaacaggatatcgtgctgtccgatgcggagaacaagtcgtctgacaccccatcaagtctatccccactgaacctgcccggtgccggcagcgagatggaggagaaggtggctccagtcaaaccatctcgccctaagaggcacttctcatcagcgggaaccatagaatccgtgaacctggatgctatccccttagctatcgccaggttagacaattctgctgctaagcataaattagccgtcaagcccaagaaacagcgggtctctaaaaagcaccgcagactggcccaggatccacaacacgaacagggcgggctagaatcccgcccctgtcttgaccagaatggtcacccaggtgaagataagcctacctggcatgaagaggagcccaaccctctagattccgaggaagaacgccgccggcaggaggactactggcgggaactcgaagcaaaatgcaaacgacaaaaggctgaagcagccgaaaagcgccgcttggaagaacagcgcctgcaggctcttgaacgcaggctttgggaagagaacagacgtcaggagctgctggaggaagagggagagggccaggaaccgccactggaggcagaacgcgcccctcgggaggaacagcagcgatctctggaggctcctggctgggaagacgctgaacgcagggagagggaagaacgggagagactggaggctgaggaagagagacgcagactccaggcccaggctcaagccgaagagcgtcgtagactcgaagaagacgcccggctcgaggagagaagaagacaagaagaagaggagggaagatgcgccgaagagctcaaaagacaggaagaagaggaagctgagggctgggaggagcttgagcagcaagaagccgaggtgcagggccctccagaagcactggaagagacaggcgaggggcggcgaggagctgaggaggaagatctcggcgaagaagaggaggaaggccaggcgcatctggaagactggcggggacagctgagcgagctgctcaacgacttcgaggaacggctggaagatcaagaacggctcaaacctgaaggccagcgcgagcatagcgaggaacccggaatctgcgaagagcagaatcccgaggccgagagaagacgtgagcagcagggtcgttcaggagatttccagggtgcagatcgtcctggccctgaagagaagcgcgaggagggagataccgaaccactattgaaacaggaggggcccgtggaggctgcccagccacccgtggagcggaaggaagccgccgctctagagcagggccggaaagtggaagagctccgctggcaggaggttgatgagcggcagactatgccacgcccatataccttccaagtttcatcgggtggaaagcagatactctttcctaaggtgaatctatctccggtaaccccagccaaagacactgggctgactgcagctccccaggagcctaaagctccaaaggcaagcccagttcagcacgcgctgccatcatctttgtccgtcccgcacactgccatcctcgttaccggcgcccagctttgcggccctgccgtaaatctctcccagatcaaagatactgcctgcaaatcactactgggactggaggaaaagaagcacgcagaggcaccagcaggagagaacccccctcggggacccggagacgcccgggcaggatcaggtaaggcaaaacccagacaggaatcacctagcagcgcttccgccttggcagaatgggcctccattcgatcccggattttaaagaacgccgagtccgacccacgcagttctgaaagggatcaactgaggcctggtgacgagagtactccaaggggacgctgtgactcccgcggcaatcagcgtaagacccctcctgtgaacgctaagttctcaattatgcctgcctggcaaaaattttcagacggcggtactgagaccagcaaacagtcaaccgaagcagaaagcatcagaaaaagaccaatgctcggtccaagcgaggaaactgcaccccaacctccccctgccggtgtgcgcgagctgggcaaggggccagagaagtctgagatgcacagagagcctgcagatactactgaggggtgtaaatttgcaaaggatctgccctcattcctcgtgccatcattgccctacccgccccaaaaagttgtggcccacaccgaatttaccactagtagtgatagcgaaaccgcgaatggcattgcaaaaccagatcctgtcatgccaggaggggaggagaaagcttccccgttcggcataaagttgagaagaaccaactactccctccggtttaactgcgatcaacaggctgaacaaaagaaaaaaaaacgccatagtagtactggcgacagtgcagacgctggcccccccgcggccggttccgccagaggtgagaaggagatggagggcgtagccctgaagcacgggccatccctccctcaggaacggaagcaggcccccagtacacgccgtgacagcgcggagccctcatcttcccgatccgtgccagtagcccatccaggcccgcctcctgcttcttctcaaacccccgcccccgagcatgataaggccgcgaataaaatgccactggcgcagaagcctgcactggcccccaaaccaacctcccagactccaccggctagtcctctgtccaaattatcaagaccctatttggtggaattgttatcacgcagagccgggcgccccgatccagagccttcagagcccagcaaagaagatcaagaatcctcagaccgcagaccgccctcgcccccaggcccagaggagcgcaagggccagaagcgagatgaggaagaggaggcgaccgaaaggaaacccgcttctcccccccttccagcaacacagcaggagaagccctctcagacccctgaagccggacgaaaagaaaagccaatgcttcagtcaagacacagtctggacgggagtaagcttacagagaaagtcgagacggctcaaccgctctggattaccctcgcactccaaaaacaaaaaggtttcagggagcagcaggctacacgggaagaacgaaaacaggcccgcgaagccaaacaggccgaaaaactgagcaaagaaaacgtgagcgtgtcggtccagcccgggtcctctagtgtttctagagccgggtccctgcataaaagcacggctctgcccgaggaaaaacgaccggaaacagcggtgtccaggcttgaacggcgggaacagctgaaaaaggcaaatacactgccgacctccgtcaccgtcgaaatttcagactctgcccccccggcgcccctcgtcaaagaggtcaccaagcggttttctacccccgatgctgcccccgtgtccaccgagcctgcatggctggctctggccaaaaggaaggcgaaggcttggtctgattgtccccaaatcatcaaatag

SEQ ID NO: 205320 - DNA, 3681 bp, Artificial Sequence
  derived and/or modified sequence
atgggcgagcagaaggtgagccggcagttcaagcagtgccaccggaccaccagctgggccaagtctaagcttttcagcagactgtcgtccatgttcctgcagcaactgggaaaaaatatcaagttcggccagcggtcccctaatgcgataccaatgaacaaagccaattctggtgaggcaagcctagaagaggatctattcttgacctcacctatggagatcgtgactcagcaagatattgttctttccgacgcagaaaacaagagcagcgatacgccctcaagcctgtcaccactgaatctgccaggtgccgggagtgaaatggaagaaaaggtagcgcccgtcaagcccagtagacccaaaagacacttctcctctgccggaacaattgagagtgtgaacctggatgcaataccactggctattgccagattggacaattccgcagcaaagcataagctagctgtgaaacccaagaagcagagggttagcaaaaagcaccgtagactggctcaggatcctcagcatgaacaggggggcctcgaatcccggccttgcctggatcagaacggtcaccccggcgaagataagcccacttggcacgaggaagagccaaaccccctggattccgaggaagaacggagacggcaggaagactactggcgggagctcgaggccaaatgcaaacggcagaaagccgaggcagctgaaaaacggagactggaggagcagcggctgcaagcgttagaacggaggctgtgggaggagaaccgacgccaagagctgcttgaagaagagggcgagggccaggagcctccactggaggccgagagggcacctcgagaagaacaacagaggtccctcgaagccccaggttgggaggacgctgaacgacgcgagcgcgaagagcgagaaagattagaggccgaggaggaacgaagaaggctgcaggctcaggcacaagccgaggagcgtcggcggctggaggaggatgcccgtctcgaggagcgcaggcggcaggaagaagaagaaggtcggtgcgctgaagagctgaaacggcaggaggaagaagaagctgaaggctgggaagaactcgagcagcaggaagccgaagtacaagggccacccgaggcgctagaagaaaccggggaaggtcgtcgcggcgccgaagaagaggatcttggtgaggaggaggaggaagggcaggcccacctggaggattggagaggacaactctcggagctgctcaatgacttcgaggaacgcttagaggatcaagagcgcctcaagcctgaagggcaaagagagcatagcgaggagcccggaatctgcgaggagcagaaccctgaagcagagaggcgcagagagcaacagggcaggagtggagactttcaaggtgccgatcgtccaggacctgaggaaaagagagaggagggagacactgagcccttgctcaaacaggaaggaccagtggaggccgcccagccacctgttgagcgtaaggaagcagcagctctcgaacagggcaggaaggtggaggaattaagatggcaggaagttgacgaaaggcaaaccatgcccaggccttacaccttccaggtctcttcaggcggaaagcagatcctgttcccaaaggtcaacctgagcccagtgactcctgccaaggataccggtctaaccgcagctccccaagaacccaaggccccaaaagcttctcctgtgcagcacgccctgccgagcagtctctcagtgccacataccgccatcctcgtgaccggtgcccagctgtgtggaccagccgtcaatttgtcacagatcaaagatacggcgtgtaaaagcctcctgggcctggaagagaagaaacacgccgaggcacccgctggggaaaatccccccagagggcccggtgacgccagggccggcagtggaaaggctaaaccccggcaggaaagcccatccagcgcctccgccctggcagaatgggcttcaataagaagcagaattctgaaaaacgccgagtctgaccctagatcttccgaaagagaccagcttagaccaggcgatgagagcaccccccgtgggcggtgtgatagtcgggggaatcagaggaagacaccacccgtcaacgcaaaattcagtatcatgcccgcgtggcaaaaatttagcgatggcggaacagagaccagcaaacaatcaactgaagcggaaagtatccgaaaacggccgatgctgggaccatccgaagaaactgcgccccagcccccccctgccggtgtgcgagagctcggtaaagggcccgagaaatcagaaatgcatagagagcccgccgacacgaccgaaggctgtaagtttgcaaaggacctgccctcttttttggtcccttcccttccataccctccccagaaggtcgtggcccacaccgagttcacaacatcgtccgatagtgaaactgcaaacgggatcgcgaagcctgacccagtgatgcccgggggagaggaaaaggcctcccccttcggtattaaacttagacggaccaattatagtctgagatttaattgcgaccagcaagcagaacagaagaagaagaagcggcactctagcacgggtgatagcgcggatgctggcccacccgcggctggctcagcaaggggagaaaaagaaatggaaggcgttgccctcaagcacgggcccagtctgccccaggagaggaagcaggcaccaagcacaagaagagactccgcagagccttctagttcaagaagcgttcctgtcgcccaccctggccctccaccagcctcctcccagacacctgctccggagcatgataaagcagcaaataagatgcccctcgctcagaaaccggccctggccccaaaacccacatcacagactcctccagcttcccccctctctaaactgagtcggccctatttagtggaacttctgagccgtcgcgctggaaggccagaccccgaacccagcgagccatcaaaggaggaccaggagtcatctgaccggagacccccctcaccgcctgggccagaggagagaaaggggcagaagagagacgaagaagaggaagcgactgaacgaaaaccagccagcccaccattacccgccacacagcaggaaaagccttctcagaccccagaggctggcagaaaagaaaagcccatgttgcaatcacggcacagcttggacgggtcaaagttgactgaaaaagtcgagacagcgcagcctctgtggatcactctcgccttacagaagcagaagggttttagggaacagcaggccactagagaggagcggaaacaggctagagaagctaaacaggccgaaaagctgtctaaagaaaatgtgtctgtgtccgtgcagccaggttcatcatctgtgtcccgggcgggctcgctacataagagtacggcccttcctgaagaaaagcgccccgagactgccgtgagccgcctcgagcgtcgagagcaattgaagaaggccaacacactccccacctccgtgacagtagagatctcagactcggctccacccgcccccctggttaaagaggttaccaagcgcttttccacccctgacgccgcgccagtgtctacggagccggcttggttagctctcgccaaaaggaaggctaaggcatggagcgactgtcctcagatcataaaatag

SEQ ID NO: 205321 - DNA, 2607 bp, Artificial Sequence
  derived and/or modified sequence
atgggcatcaccgagagcagcgacacccccagcagcctgagccccctgaatttgcctggagctggctccgagatggaggaaaaggtggctccagtgaagcccagtcgccctaaaagacacttcagctccgccggcacgattgaatccgtgaacctggacgctatcccgctggctatcgcaaggctggataacagcgcagccaaacacaaactggccgttaaaccaaagaagcagcgggtaagcaaaaagcatcggcggctagcccaggatccccagcatgagcagggcggcttggagtcaagaccctgtctggaccaaaatggccatcctggcgaggacaaacccacttggcacgaagaagagcctaaccccctcgactcagaagaagaaagacgccgacaggaagattattggagagagctggaggccaaatgtaagcggcaaaaagccgaagcagcagagaagagaagactcgaagagcagagattgcaagccttagaaaggagactgtgggaagaaaatcgacgccaggaattattggaagaggaaggcgaagggcaagagccccccctggaagcagaacgtgctccacgggaagagcagcaacgctcactggaagctccaggttgggaggatgctgagcgcagggaaagggaagagcgagagcggctggaagctgaggaggagaggcgaaggctccaggcacaggcacaggccgaggagaggaggcgccttgaagaagacgctagactggaagagcggcggagacaggaggaggaagaaggccggtgtgccgaggaactaaaacgccaggaagaggaagaagcagagggatgggaagaactggagcagcaggaagccgaggttcaggggccgcctgaggctcttgaggaaactggtgaggggcgacgcggagcggaggaggaggacctaggtgaggaggaagaggaaggacaggcccatctagaggactggcgcggtcagctgtccgaacttttgaatgacttcgaggagcggctggaagatcaggagagactcaagcccgagggacagcgcgaacattcagaagagccagggatatgcgaggaacaaaatccagaggcagagagacgaagagagcaacagggacggtcgggtgattttcagggggcagatagacctgggccggaagagaaaagggaggaaggcgacaccgagcctctgctgaagcaagaaggcccggtcgaagcagcacagcccccagtggaacgcaaagaggcggccgcactcgaacagggaagaaaggtggaggaactccggtggcaggaggttgatgaaagacagacaatgccacgcccatatacatttcaagtatcctccggcgggaagcagatcctatttcctaaagtgaacctctctccagtgacacctgctaaggatactggactgacagccgcacctcaggaacctaaggcccccaaggcgagcccagttcagcacgctctaccttcttctctgagcgtcccacacactgcgattcttgtcacgggcgctcagctgtgtggccctgctgtcaatcttagtcagataaaggatacggcatgtaaatcccttcttggtctggaagagaagaagcacgccgaggctcccgccggcgagaatcctcccaggggccccggcgacgccagagctggatctgggaaggccaagccacggcaggaaagccccagctcggcttcagcactcgctgaatgggcttctatccggtcgaggatcttaaagaatgcagagagcgacccccgcagctctgagagagatcagttaaggccaggcgatgaaagtactcctagaggacgttgtgatagtcgaggcaatcagcgcaagacaccccctgtcaacgctaagtttagcatcatgcccgcttggcagaagtttagcgatggaggcaccgaaaccagcaaacaatctaccgaagccgaaagcattaggaaaagacccatgctcggaccttcagaagagactgcaccccagccacctccagccggagtccgcgaactggggaagggaccggagaagagcgagatgcaccgggagccagctgacactactgaaggttgcaaattcgctaaagaccttcctagctttctggttccctccctaccatacccaccccaaaaggtggtggcccatacagaattcacaacttccagcgactcagagaccgccaacggcatcgccaagcctgatcccgttatgccaggaggcgaggaaaaggccagtccctttggtatcaaactccggcgtacaaactacagccttagatttaattgcgatcagcaggcggagcagaaaaaaaaaaaacggcatagtagcacaggggactccgctgatgcaggacccccagcggccggttccgccagaggggagaaggagatggaaggagtggctttaaagcacggaccttctctgccacaagaacggaaacaagcaccatctactcgccgggacagcgccgagccctcaagctcgcgctcagtgccagtggcccaccccgggccgccgcccgcctcatctcaaactccaggacctcccgtgcgtccccaccagcacccacacttcccaaattag

SEQ ID NO: 205322 - DNA, 3702 bp, Artificial Sequence
  derived and/or modified sequence
atgggaacccgagctttctctcacgactccatattcattccagacgggggagcagagtccgagcaaacagtccaagcgatgagccaggacaacattctggggaaagtgaaaacattgcagcagcagctggggaaaaacattaaatttgggcaacgtagccctaatgctattccaatgaacaaggccaatagtggcgaagccagtcttgaggaggatctttttctgaccagtcccatggaaatcgtgacccaacaggacattgtgctttccgacgctgagaataaaagctcagacacaccttccagcctaagtccgctgaatctgccaggagccggatccgagatggaggagaaggtagcacccgttaagcctagcaggcccaaacgtcatttttcgagcgctggcacgatcgaatccgtcaatcttgatgcaatccctttggctatcgcccgactggataattctgcagcaaagcataaactcgcagtgaagcccaaaaagcagcgcgtttctaagaagcaccggcgactcgcacaggacccacagcacgaacagggaggactggaatccaggccttgtttagaccaaaatggccatcctggcgaagataagccaacctggcacgaggaagagccaaacccgctggactccgaggaggagcggagaagacaagaggattactggcgggaattggaggcgaaatgcaagagacaaaaggcggaagctgccgaaaagagaagactggaagagcaacgacttcaggccttagagcggaggctatgggaggaaaacagaaggcaggaactgctggaggaggagggggagggccaggaaccccctttggaagcagagagggctcccagggaggaacagcagcgttctctggaagcacctggatgggaggacgccgaacgcagggaacgggaagagagggaaagactcgaagctgaggaggagcgcaggcggctgcaggcacaggcccaggccgaggagaggaggcgtctcgaggaggatgccagactggaagagaggcgtagacaagaagaagaagaaggacgctgtgccgaggaactgaaacggcaggaggaggaggaagcagaaggctgggaggagcttgagcagcaggaggctgaagtgcaaggacctcccgaagcactggaggaaaccggcgaggggcgaaggggagcagaggaagaagacctcggcgaggaagaagaagaagggcaagctcatctggaggattggagaggtcagctgagcgaacttctgaatgattttgaggagcgcttggaagaccaggagcggctcaagccagaagggcaacgggaacactccgaagaacccggtatttgtgaggaacagaaccccgaggcagagcgacggagggaacagcagggtcgcagtggtgacttccagggggctgaccgcccaggaccagaggaaaaacgggaggagggagacacagagccactgctcaagcaggagggacccgttgaggccgctcaacctcctgtcgagaggaaggaggccgctgctctcgaacaggggaggaaagtcgaggaactcagatggcaggaggtcgatgagcggcaaactatgccgcgaccctatacattccaagtttccagtggtggcaagcagatcctgtttccaaaggtcaacctttcacctgtcactcccgctaaggacaccggactaactgccgctccccaggagccaaaggcacccaaggcaagccccgtccagcatgctctgccgtcatctttgagcgtgccgcataccgcgatcctagttaccggggctcaactatgtggtcctgctgtgaatctgtcccagattaaggatacggcctgcaaaagcctcctggggttggaggagaaaaagcacgctgaggctccagccggtgagaaccctcctagaggccctggtgacgcaagagcagggtcaggaaaggctaagccgcgacaagagagtccttccagtgcaagcgctctggccgagtgggcttccattcgttcaagaatcctgaaaaatgccgaaagtgaccccagatccagcgagcgcgaccaactacgccctggagacgagtcaacgcccagaggacgctgtgattcccggggaaatcaacgtaaaactcctcccgtgaacgctaagttttcaataatgccagcatggcaaaaattcagcgatggcggaaccgagactagcaaacaatcgacggaagctgaatctattcggaagcgcccaatgctgggcccttccgaggaaacagctccgcaaccccctccggctggcgtgagggagttgggaaaggggccagagaagagcgagatgcatagggagcccgcagacacaactgaggggtgtaagtttgccaaggatctacccagttttttggttccgtccttgccctaccctccccagaaagttgtggcacacactgagttcactacctcaagcgactctgagactgctaatggcattgctaaaccagatccggtcatgcctgggggtgaggaaaaagcgtctcctttcgggattaagctccgcaggaccaactacagcttgagattcaattgcgaccagcaagctgagcaaaaaaagaaaaaacgccacagttcaaccggcgactctgcagatgccggaccacccgctgccggatccgccagaggcgaaaaagagatggagggagtcgctctgaagcacggaccatctcttccgcaggagcgaaaacaggcgccaagcacaagacgagatagtgccgagccatctagctctcgctctgtacctgtggcacaccccggtccgccacctgcctcctcacagacgccagcccctgagcatgacaaggctgccaacaaaatgcccctggctcaaaaaccggcattagctccaaaaccaacatcacagacacctccagcgagccccctgagcaaactgagccggccttacttggttgagctcctatcacgacgggctggcagacccgatccggagcccagcgagccatcaaaggaagaccaggagtcatctgatcggcgacctccttccccacccggacctgaagagcggaaagggcagaaacgagacgaggaagaggaggccaccgagcgaaagcctgcctctccacccctcccagcaacacagcaggagaagccctcgcagacacccgaagccggaaggaaggagaagcccatgcttcagtcaagacactcgctagacggcagcaagctcaccgagaaagtggagacggcacagcctctctggatcactttggcgctacaaaaacagaaggggtttcgggaacagcaagctactcgagaagaacggaagcaggcgcgagaggccaagcaagctgagaagctgtccaaagagaacgtgtctgtctcagtccaacccggttccagctctgtgagccgagcaggctctttgcataagtccacagcgctgcctgaagagaagcgcccagagaccgcagtatcccgactggagcggagagagcagctcaaaaaagctaacacccttccaactagcgtgaccgttgaaatcagcgatagtgctccacccgctccactcgtaaaggaagtcactaaaaggttcagtaccccggacgcggctcccgttagcacagaaccagcttggctggccctagccaagcggaaagctaaggcttggtccgattgcccccagattatcaaatag

SEQ ID NO: 205323 - DNA, 3681 bp, Artificial Sequence
  derived and/or modified sequence
atgggtgaacagaaagtgtctcgacaatttaaacagtgtcataggacaacgtcgtgggccaaaagcaaactgtttagcagactgagcagcatgttcctgcagcagctggggaaaaatatcaagttcggccagcgcagtcccaacgccattcccatgaataaggcaaattctggcgaagccagcctggaagaagacctgtttctgaccagcccaatggagatcgtgacccagcaggacatagttttgtcagacgcggaaaataaatcgagcgatacaccgagctccctaagcccattgaatctgccaggcgctggcagcgagatggaggagaaagttgcccctgttaagccctcacgcccaaaaaggcacttcagcagcgccggtacaatagagagtgtgaatttagacgcgattccactcgccatagcaaggctggataattccgcagcgaaacacaaactggcagtaaaacctaagaagcagcgggtgagcaaaaagcaccgcagactagcacaggacccccaacacgagcagggtggtctcgaaagcaggccctgtctagaccagaacggccaccccggagaggataaacccacctggcatgaagaagagcccaatccccttgattccgaggaagagagaagaagacaggaggattactggagggagcttgaggcaaaatgcaagcgacagaaggccgaggccgctgaaaagcggaggctcgaggagcagcgcctccaggctttggagaggaggctgtgggaagagaaccggcgacaggaactcctggaggaggagggcgaggggcaggagccgccactggaagcggaaagggcacccagagaagagcaacagaggagtttggaggcccctggatgggaagacgccgaacgacgagaaagggaggaacgcgaaaggctcgaagccgaggaagagaggagacgcctgcaggcccaggcccaggctgaagagagacggcgactcgaagaggatgcaagactcgaggagaggcggcgtcaagaagaagaagaaggcaggtgcgcggaagaactgaagagacaggaggaagaggaggccgaggggtgggaggaactcgaacagcaggaggccgaggtgcagggaccaccagaggcattggaggagacaggtgaagggagacgcggagcagaggaggaagatctgggagaagaggaggaggagggccaggcgcacttagaagattggaggggacagctgtctgagcttctcaacgattttgaagagaggcttgaagaccaagaacggctgaagcctgaagggcaacgagagcattctgaggagcctggtatatgcgaagagcagaaccctgaagccgagagacggagggagcagcaagggaggtccggggattttcagggggcagaccgacccggaccagaggaaaagcgcgaggaaggcgataccgaacctctcttaaagcaggaggggcctgtggaggccgctcagccacctgtggagcggaaagaggcagcagccttagaacagggtcggaaagtggaggagctgcgctggcaggaggttgatgaacgccagacaatgcctagaccttatactttccaggtgtcgtctggaggtaaacaaattctgttcccaaaggtgaatctgtcccccgtgacccccgcaaaagataccggactgaccgcagcaccgcaggaacccaaagcgccaaaagcctcacctgttcagcatgcccttccctctagtctgtccgttccacatactgcaatcctggtgaccggggctcaactgtgcggaccggctgtaaacctgtcccaaataaaagacactgcatgcaaaagcctgttgggactagaagaaaagaaacacgcagaggcccctgccggtgagaaccctcctcggggaccaggcgatgctcgggctggatccggcaaagcaaaacctagacaagagagtccaagcagcgcatcagccctcgctgagtgggcctccataaggagtcggatcctgaaaaatgcggagtccgaccctaggtcttctgagcgcgaccaactaagacccggagatgaaagcactccacggggaaggtgcgatagccgcggtaaccagcgaaaaacgccgcctgttaacgccaaattctctatcatgcccgcatggcagaaattctctgatggcggtactgaaacaagcaagcaatctaccgaggccgaatctattcggaagcgacctatgctcggcccaagcgaggagacagctccacaaccgcctcccgcaggagttcgagaactgggcaaaggccctgagaagagcgagatgcatagagaaccagcagacactacagaggggtgcaaattcgctaaagatctgcccagctttctggtccctagcctgccgtaccctcctcaaaaggtggtggcacatactgagttcaccacctcctctgactctgaaacggccaatggtatcgcaaagcccgaccccgtgatgcctggtggagaagagaaggcttccccctttgggatcaaacttcggagaactaattactcccttcgctttaactgcgaccaacaggccgagcagaagaagaaaaaacgtcactcatccacaggagactctgcggatgccggacccccagccgctgggtccgcgagaggcgagaaggaaatggagggtgtcgccctcaaacatggcccatctctaccccaggagcgaaaacaggcaccatcaactaggagggattctgcagaacccagcagctcacgcagcgtgccagttgcacacccgggtcccccacctgcttcaagccagacacccgcaccggagcacgacaaagccgcaaacaagatgcctctcgcacaaaaacccgctctggcacccaaacccacctcacagacaccccctgcaagtcccttgtccaagcttagtagaccctacctagttgaactactttcaaggagggcgggacgtcccgatccagaacccagcgaaccatcaaaagaggaccaggaaagttctgataggaggccgcctagcccccctgggccagaggagcggaagggacagaaaagagacgaggaggaggaggctacagaaaggaagcccgcttcaccccctctccctgccacacaacaagaaaagccctcccagacacccgaagccggtagaaaggagaaaccaatgctgcaaagtaggcacagcctggatggcagcaaactgactgagaaggtcgagactgcccagccactctggatcaccctggcccttcagaaacaaaagggattccgggagcagcaggctacaagggaggaacgtaagcaggctcgtgaggccaaacaggcagaaaaactgtcaaaggagaatgtgtctgtctcagttcagcctgggtctagctctgtgagccgagccggatccctgcataagagtaccgctctccctgaggagaagcgcccagagacagctgtatctagattggagcggagagaacagctgaagaaggctaataccctccctacttccgtcactgttgagatcagcgattcagcgccacccgctcctctagtgaaggaggtcacaaagcggttttccacaccagatgctgcacccgttagcacagaacccgcttggctggctcttgcaaagcggaaagccaaagcgtggtccgactgtcctcagataataaaatag

SEQ ID NO: 205324 - DNA, 2607 bp, Artificial Sequence
  derived and/or modified sequence
atgggaattactgaatcaagcgacaccccttcaagcctctcaccactgaacctgcctggtgccggttcggaaatggaggaaaaagttgccccagtgaaacctagcaggccgaagaggcactttagcagtgctggcacaattgagagtgttaacctagatgcaattcccttggctattgcacgtctcgataatagtgcggcaaagcataaattggcagtgaagcccaagaaacagcgcgtctctaagaaacataggcggctggcccaagacccacagcacgagcagggaggccttgaaagcaggccgtgtctggaccagaatggtcatccaggtgaagataaacccacctggcatgaggaagagcctaaccctttggacagcgaggaggaacgacgacgccaggaggattattggcgagagctggaagcaaaatgtaaacggcagaaggcagaagccgcagagaagcgcaggcttgaggagcaacgcttgcaagcgctggagcggagactgtgggaagaaaaccggagacaagagcttctggaagaggagggcgagggccaggaaccaccgttggaagccgaaagagcccctagggaagaacagcagcgctccctggaggccccaggctgggaggacgctgaacgtagggagagagaggagagggaaagacttgaagccgaggaggagagaagacgtctccaggcccaggctcaggctgaagagcggcgacggctcgaggaagatgccaggctagaagaacgaagaaggcaggaagaggaggagggaaggtgtgcagaagagctcaagcggcaggaagaggaggaagctgaaggctgggaagaattggagcagcaggaagccgaggttcaggggccaccagaagcactggaggaaaccggcgagggccgacggggagccgaagaggaggatctgggcgaggaggaggaagaggggcaagcccacctggaagattggcggggacaactgtctgaacttctaaatgatttcgaagagagattggaggaccaggaacgtctgaaacctgaggggcagagggaacacagtgaagagcccggtatttgcgaagaacagaatcctgaggccgagaggcgaagggagcagcagggacggtcaggtgatttccagggcgctgaccgcccaggtcccgaagagaaacgcgaagaaggtgacaccgagccactgctgaaacaggagggtccagttgaggccgcacagccccctgtggaacgaaaggaagctgctgctctcgagcagggaagaaaagttgaggaattacggtggcaagaggtggacgaacggcagacaatgcctaggccatatacctttcaggttagctccgggggaaagcagatcttgtttccaaaggtaaacttatctccggttacgcccgcaaaggataccggactgacagccgctcctcaggaacccaaggcgccaaaggcatcccctgttcagcatgctctgccatccagcttatcagtgcctcatactgcgattttggtcactggtgctcagttatgtggcccagccgttaaccttagtcagatcaaggacacagcttgtaaaagtcttctcggcctggaggaaaagaaacacgcagaggcccctgcaggcgaaaaccctcccaggggccctggtgacgctagggccggatctggaaaagccaagcccagacaggagtccccttcttccgcatccgcacttgccgaatgggcctccattcggagtaggattctgaagaacgcagaaagtgaccccaggtctagcgagagagaccagctgagaccaggagatgaatccacgcccagagggcgttgcgactcaagagggaaccagaggaagaccccgccagtcaatgctaaattcagcatcatgccagcctggcagaaatttagcgatgggggaacagaaacaagtaaacagtccacagaggccgaatcaatacgtaaacgtcccatgttgggaccttctgaggagacggcccctcaaccccctccagccggtgtgagggaactcggcaagggaccggagaaaagcgaaatgcaccgagaaccagccgacacaaccgagggctgcaagtttgctaaggatctccccagcttcctggtccctagcctgccgtacccccctcaaaaggtggtggcccacaccgagttcaccacctcatccgattctgaaaccgcaaacggaatagccaagccagatcctgtgatgccaggaggcgaggagaaggcctcgccgttcggcatcaaactgcggagaaccaattattcactcaggttcaactgtgaccagcaggctgagcagaaaaaaaaaaaacggcattcttcgacaggagacagcgcagacgcgggacccccagcggcaggatcggccagaggcgagaaagagatggagggtgtggctctgaagcacggtcctagcctgcctcaggaaagaaagcaggcaccgtctacccggcgtgattcggccgaacccagcagctccagatccgtgccggttgcacaccctggaccaccaccggcatcatcccagacacccggacctcccgtgcgccctcatcagcatccgcatttccccaattag

SEQ ID NO: 205325 - DNA, 4628 bp, Artificial Sequence
  derived and/or modified sequence
ccgtcgttggggaagaagagttactctcaccagagtgtcagcaatgggaccttctcttcggatgaggagaccctggaagacaatctaaggtccttcaactattctatgggaacccgggcattttcccatgacagtatttttatccctgatgggggagcagaaagtgagcagacagttcaagcaatgtcacaggacaacatcctgggcaaagtcaaaactcttcagcaacagttgggcaagaatatcaagtttgggcagcggtcacccaatgccattcccatgaataaggcaaacagtggagaggctagcttagaagaggatctgttcctgaccagtcccatggaaattgtgactcagcaggacatcgtcctctcagacgcagagaacaagtccagtgatacgccaagttctctaagtcctctgaatctccctggagctggaagtgagatggaagagaaggttgctcccgttaaaccgtctcggccaaaaaggcacttctcttctgctggcaccatcgaaagtgtcaacttagatgccatccccctggccatcgctcgcctggacaacagtgccgccaagcacaagctggctgttaagccaaaaaaacagagggtgtcaaagaagcacaggcgccttgcccaggatccacaacatgagcaaggcggccttgagagtcggccctgcctggaccagaacggacacccaggcgaggacaagccaacgtggcacgaagaggaacccaatccgctggattccgaggaagagagaagacgccaagaagactactggcgagaactggaggccaagtgcaagcggcaaaaggcggaagcagccgagaagagacgcctagaggagcagaggctgcaggcgctggagaggaggctttgggaagagaacagaaggcaggagctcttggaggaggagggcgaggggcaggagccgcctctagaggcggaaagggcgccgcgggaagagcagcagcggagcctggaagcgccaggttgggaggacgcggagcggagggagcgtgaggagcgcgagcgcctggaggcggaggaggagcgaaggcgtctgcaggcccaggcccaagcggaggagaggcggcggctggaggaggacgccaggctggaggagcggaggcggcaggaggaggaggaaggaagatgcgcggaggagctcaaaaggcaggaggaggaggaggctgagggatgggaagagctggaacagcaggaggcggaggtgcaggggccgcccgaggcgttggaggagactggggagggccggcggggcgcggaggaggaggatctgggggaagaggaggaggagggccaggcgcacctggaggactggagggggcagctcagtgagcttctgaacgactttgaggagaggctcgaagaccaggaacgcctgaaacccgaaggacaaagagaacactccgaggagccaggtatttgcgaggagcagaacccagaggccgagcggcgaagagagcagcagggaaggagcggggatttccagggggccgatcgtcctgggcccgaggaaaagagagaagaaggggacacggagcctctcctgaaacaagaggggccggtggaagccgcgcagcctccggtggagaggaaagaagccgccgcccttgaacaaggccgcaaggtggaggagctgcggtggcaggaggtggacgagagacagaccatgccccggccctacacgttccaggtgtcctccggagggaagcagattctctttcccaaagtcaacctgagccccgtgacgcccgcaaaggacacggggctcaccgctgctccccaggaaccaaaggcccccaaagccagcccagtccagcacgccctaccgtcgtccctgagcgttccccacaccgccattctggtcacgggcgcgcagctctgtggcccggcagtcaacctgagccagatcaaggacaccgcgtgcaagtccctcctgggcttggaggagaagaagcacgcggaagccccagctggggagaaccctccccgaggccccggcgacgcgagggcgggcagcgggaaggctaagccccgccaggagtctcccagcagcgcgtccgcactcgcagaatgggcttccattcggtccagaatcctgaagaacgcagagagtgacccgcgcagcagcgagagggaccagttgaggcccggtgatgagtccactcccaggggccggtgtgattcccgcgggaaccaacggaagactccgccagtcaatgcaaagttctctattatgcctgcctggcagaaattttccgatggtggcacggagacctccaaacagagcacggaagctgaaagcatacgaaaaagacccatgctgggacccagcgaagagacagccccccagcctcctcctgctggtgttcgcgagctcgggaagggtccggagaagtcggagatgcaccgggagcccgcagacaccaccgagggatgcaaatttgccaaagacctcccgtctttccttgtcccaagccttccttaccctccgcagaaagtggtggcccacacagagttcacgacctcgtcggacagcgagactgcaaacgggatagcaaagccagaccctgtgatgccaggtggagaggaaaaagcctcaccgtttggaataaaattgagaaggaccaactattccttgcgcttcaactgcgaccaacaggcagaacagaagaagaagaagaggcacagcagcaccggagacagcgcggatgcagggccgcctgcagcggggagcgctcgtggagagaaagagatggagggtgtggccctcaagcatggtccatccctcccccaagagcggaagcaagccccttccacccggagggactccgctgaaccttccagcagccgctctgttcctgtggcccaccctgggcctccaccggccagcagccagaccccggctccggagcacgacaaggcagcaaacaaaatgccactggcacaaaagccagcactggctcccaagcccaccagtcagaccccaccagcatccccactttccaaactgagcaggccctacttggtagagctgctgtctcgccgagcggggaggccggacccagagccaagtgagccgtccaaggaggaccaggagagcagtgaccgccggccaccctcgcccccaggccccgaggaaaggaagggacagaagagggacgaggaggaagaggcgacagagaggaaacctgcttccccacctctgcctgccactcagcaagagaaaccttctcaaacacccgaggccgggaggaaagagaagccgatgcttcagagcagacactccttagatggctccaaacttacagagaaagtggaaactgctcagccgctgtggataacgttagcactgcaaaagcaaaaggggtttcgggagcagcaggcgacgcgggaggagagaaagcaagccagagaggccaaacaggcagaaaagctctccaaagaaaatgtcagtgtcagcgtgcagcctggaagcagcagtgtcagcagagcaggttccctgcacaagtccactgctctgccagaagagaagaggcccgagactgcagtgtccaggcttgagcgcagagaacagctgaaaaaggccaatactcttcctacgtctgtgacagtggagatctccgactcggctcccccagcgccgctggtaaaagaagtcaccaagaggttttccaccccggatgctgcccccgtgtcaacagaaccagcctggctggctttggccaaaaggaaagcaaaggcttggagcgactgtccacagattattaagtaaagagtgactctcacccatccctactgccagttattggctcctctcttgccctttttatttatttattttttatatggggtaaagaaatcaagctagggaaaagaagcatgttttataggctccaaaataatgtttagaaactgaactggtggtgttcattgtaaagagtggatttgcacaaccctaggtcctggtgcctcgagctcctcctagttctcaagagaaaattccgtccacaggaccacatgaagcaaaatctctaagctaagaactcgtgagagcctgccatgcccatttcatggccttgcacacacacccacccacacaccattcagaacatgtacttttgccaacctttggtaatggttttttgattctatgcactaattttctttgtccaaaacatttactctaccatatgtctgggaatgtttatcctttctacagtaatggtgaaaggatcatatctagctaaaagcaagaacacccattctcctgaatgcagtgagtaattgggaatcacaaggaacattctggcacccaactgtgcccatcttagttttcatgagttttccccactctgaagctgtaacccagaaggcacatccattcacatttttaccgcactgtggattcatagtgtggggccctgttattccaataccctccttaaggacatgtgaagcatttggcccagttggctcccagggaacattttaatttaatgtagtgaagaaagacaattctagatcagagctacaagttcactttctgtctctgagaatctccatctagggcagtagttcttatgatgtgtaggc

SEQ ID NO: 205326 - DNA, 4117 bp, Artificial Sequence
  derived and/or modified sequence
ccgtcgttggggaagaagagttactctcaccagagtgtcagcaatgggaccttctcttcggatgaggagaccctggaagacaatctaaggtccttcaactattctatgggaacccgggcattttcccatgacagtatttttatccctgatgggggagcagaaagtgagcagacagttcaagcaatgtcacaggacaacatcctgggcaaagtcaaaactcttcagtcgactaagcagtatgttcctgcaacagttgggcaagaatatcaagtttgggcagcggtcacccaatgccattcccatgaataaggcaaacagtggagaggctagcttagaagaggatctgttcctgaccagtcccatggaaattgtgactcagcaggacatcgtcctctcagacgcagagaacaagtccagtgatacgccaagttctctaagtcctctgaatctccctggagctggaagtgagatggaagagaaggttgctcccgttaaaccgtctcggccaaaaaggcacttctcttctgctggcaccatcgaaagtgtcaacttagatgccatccccctggccatcgctcgcctggacaacagtgccgccaagcacaagctggctgttaagccaaaaaaacagagggtgtcaaagaagcacaggcgccttgcccaggatccacaacatgagcaaggcggccttgagagtcggccctgcctggaccagaacggacacccaggcgaggacaagccaacgtggcacgaagaggaacccaatccgctggattccgaggaagagagaagacgccaagaagactactggcgagaactggaggccaagtgcaagcggcaaaaggcggaagcagccgagaagagacgcctagaggagcagaggctgcaggcgctggagaggaggctttgggaagagaacagaaggcaggagctcttggaggaggagggcgaggggcaggagccgcctctagaggcggaaagggcgccgcgggaagagcagcagcggagcctggaagcgccaggttgggaggacgcggagcggagggagcgtgaggagcgcgagcgcctggaggcggaggaggagcgaaggcgtctgcaggcccaggcccaagcggaggagaggcggcggctggaggaggacgccaggctggaggagcggaggcggcaggaggaggaggaaggaagatgcgcggaggagctcaaaaggcaggaggaggaggaggctgagggatgggaagagctggaacagcaggaggcggaggtgcaggggccgcccgaggcgttggaggagactggggagggccggcggggcgcggaggaggaggatctgggggaagaggaggaggagggccaggcgcacctggaggactggagggggcagctcagtgagcttctgaacgactttgaggagaggctcgaagaccaggaacgcctgaaacccgaaggacaaagagaacactccgaggagccaggtatttgcgaggagcagaacccagaggccgagcggcgaagagagcagcagggaaggagcggggatttccagggggccgatcgtcctgggcccgaggaaaagagagaagaaggggacacggagcctctcctgaaacaagaggggccggtggaagccgcgcagcctccggtggagaggaaagaagccgccgcccttgaacaaggccgcaaggtggaggagctgcggtggcaggaggtggacgagagacagaccatgccccggccctacacgttccaggtgtcctccggagggaagcagattctctttcccaaagtcaacctgagccccgtgacgcccgcaaaggacacggggctcaccgctgctccccaggaaccaaaggcccccaaagccagcccagtccagcacgccctaccgtcgtccctgagcgttccccacaccgccattctggtcacgggcgcgcagctctgtggcccggcagtcaacctgagccagatcaaggacaccgcgtgcaagtccctcctgggcttggaggagaagaagcacgcggaagccccagctggggagaaccctccccgaggccccggcgacgcgagggcgggcagcgggaaggctaagccccgccaggagtctcccagcagcgcgtccgcactcgcagaatgggcttccattcggtccagaatcctgaagaacgcagagagtgacccgcgcagcagcgagagggaccagttgaggcccggtgatgagtccactcccaggggccggtgtgattcccgcgggaaccaacggaagactccgccagtcaatgcaaagttctctattatgcctgcctggcagaaattttccgatggtggcacggagacctccaaacagagcacggaagctgaaagcatacgaaaaagacccatgctgggacccagcgaagagacagccccccagcctcctcctgctggtgttcgcgagctcgggaagggtccggagaagtcggagatgcaccgggagcccgcagacaccaccgagggatgcaaatttgccaaagacctcccgtctttccttgtcccaagccttccttaccctccgcagaaagtggtggcccacacagagttcacgacctcgtcggacagcgagactgcaaacgggatagcaaagccagaccctgtgatgccaggtggagaggaaaaagcctcaccgtttggaataaaattgagaaggaccaactattccttgcgcttcaactgcgaccaacaggcagaacagaagaagaagaagaggcacagcagcaccggagacagcgcggatgcagggccgcctgcagcggggagcgctcgtggagagaaagagatggagggtgtggccctcaagcatggtccatccctcccccaagagcggaagcaagccccttccacccggagggactccgctgaaccttccagcagccgctctgttcctgtggcccaccctgggcctccaccggccagcagccagaccccggctccggagcacgacaaggcagcaaacaaaatgccactggcacaaaagccagcactggctcccaagcccaccagtcagaccccaccagcatccccactttccaaactgagcaggccctacttggtagagctgctgtctcgccgagcggggaggccggacccagagccaagtgagccgtccaaggaggaccaggagagcagtgaccgccggccaccctcgcccccaggccccgaggaaaggaagggacagaagagggacgaggaggaagaggcgacagagaggaaacctgcttccccacctctgcctgccactcagcaagagaaaccttctcaaacacccgaggccgggaggaaagagaagccgatgcttcagagcagacactccttagatggctccaaacttacagagaaagtggaaactgctcagccgctgtggataacgttagcactgcaaaagcaaaaggggtttcgggagcagcaggcgacgcgggaggagagaaagcaagccagagaggccaaacaggcagaaaagctctccaaagaaaatgtcagtgtcagcgtgcagcctggaagcagcagtgtcagcagagcaggttccctgcacaagtccactgctctgccagaagagaagaggcccgagactgcagtgtccaggcttgagcgcagagaacagctgaaaaaggccaatactcttcctacgtctgtgacagtggagatctccgactcggctcccccagcgccgctggtaaaagaagtcaccaagaggttttccaccccggatgctgcccccgtgtcaacagaaccagcctggctggctttggccaaaaggaaagcaaaggcttggagcgactgtccacagattattaagtaaagagtgactctcacccatccctactgccagttattggctcctctcttgccctttttatttatttattttttatatggggtaaagaaatcaagctagggaaaagaagcatgttttataggctccaaaataatgtttagaaactgaactggtggtgttcattgtaaagagtggatttgcacaaccctaggtcctggtgcctcgagctcctcctagttctcaagagaaaattccgtccacaggaccacatgaagcaaaatctctaagctaagaactcgtgagagcctgcca

SEQ ID NO: 205327 - DNA, 3210 bp, Artificial Sequence
  derived and/or modified sequence
agtgctaggcagaagcaacagccatcgccttggtgcaggggtatcctgagatctgaagcaaatgtcctcacagttattgatgagctcataagtgctgggcactgtggcctgggggattgtttgttcagcaggctctgtctcagatatgggtattacagagtccagtgatacgccaagttctctaagtcctctgaatctccctggagctggaagtgagatggaagagaaggttgctcccgttaaaccgtctcggccaaaaaggcacttctcttctgctggcaccatcgaaagtgtcaacttagatgccatccccctggccatcgctcgcctggacaacagtgccgccaagcacaagctggctgttaagccaaaaaaacagagggtgtcaaagaagcacaggcgccttgcccaggatccacaacatgagcaaggcggccttgagagtcggccctgcctggaccagaacggacacccaggcgaggacaagccaacgtggcacgaagaggaacccaatccgctggattccgaggaagagagaagacgccaagaagactactggcgagaactggaggccaagtgcaagcggcaaaaggcggaagcagccgagaagagacgcctagaggagcagaggctgcaggcgctggagaggaggctttgggaagagaacagaaggcaggagctcttggaggaggagggcgaggggcaggagccgcctctagaggcggaaagggcgccgcgggaagagcagcagcggagcctggaagcgccaggttgggaggacgcggagcggagggagcgtgaggagcgcgagcgcctggaggcggaggaggagcgaaggcgtctgcaggcccaggcccaagcggaggagaggcggcggctggaggaggacgccaggctggaggagcggaggcggcaggaggaggaggaaggaagatgcgcggaggagctcaaaaggcaggaggaggaggaggctgagggatgggaagagctggaacagcaggaggcggaggtgcaggggccgcccgaggcgttggaggagactggggagggccggcggggcgcggaggaggaggatctgggggaagaggaggaggagggccaggcgcacctggaggactggagggggcagctcagtgagcttctgaacgactttgaggagaggctcgaagaccaggaacgcctgaaacccgaaggacaaagagaacactccgaggagccaggtatttgcgaggagcagaacccagaggccgagcggcgaagagagcagcagggaaggagcggggatttccagggggccgatcgtcctgggcccgaggaaaagagagaagaaggggacacggagcctctcctgaaacaagaggggccggtggaagccgcgcagcctccggtggagaggaaagaagccgccgcccttgaacaaggccgcaaggtggaggagctgcggtggcaggaggtggacgagagacagaccatgccccggccctacacgttccaggtgtcctccggagggaagcagattctctttcccaaagtcaacctgagccccgtgacgcccgcaaaggacacggggctcaccgctgctccccaggaaccaaaggcccccaaagccagcccagtccagcacgccctaccgtcgtccctgagcgttccccacaccgccattctggtcacgggcgcgcagctctgtggcccggcagtcaacctgagccagatcaaggacaccgcgtgcaagtccctcctgggcttggaggagaagaagcacgcggaagccccagctggggagaaccctccccgaggccccggcgacgcgagggcgggcagcgggaaggctaagccccgccaggagtctcccagcagcgcgtccgcactcgcagaatgggcttccattcggtccagaatcctgaagaacgcagagagtgacccgcgcagcagcgagagggaccagttgaggcccggtgatgagtccactcccaggggccggtgtgattcccgcgggaaccaacggaagactccgccagtcaatgcaaagttctctattatgcctgcctggcagaaattttccgatggtggcacggagacctccaaacagagcacggaagctgaaagcatacgaaaaagacccatgctgggacccagcgaagagacagccccccagcctcctcctgctggtgttcgcgagctcgggaagggtccggagaagtcggagatgcaccgggagcccgcagacaccaccgagggatgcaaatttgccaaagacctcccgtctttccttgtcccaagccttccttaccctccgcagaaagtggtggcccacacagagttcacgacctcgtcggacagcgagactgcaaacgggatagcaaagccagaccctgtgatgccaggtggagaggaaaaagcctcaccgtttggaataaaattgagaaggaccaactattccttgcgcttcaactgcgaccaacaggcagaacagaagaagaagaagaggcacagcagcaccggagacagcgcggatgcagggccgcctgcagcggggagcgctcgtggagagaaagagatggagggtgtggccctcaagcatggtccatccctcccccaagagcggaagcaagccccttccacccggagggactccgctgaaccttccagcagccgctctgttcctgtggcccaccctgggcctccaccggccagcagccagaccccgggcccaccagtcagaccccaccagcatccccactttccaaactgagcaggccctacttggtagagctgctgtctcgccgagcggggaggccggacccagagccaagtgagccgtccaaggaggaccaggagagcagtgaccgccggccaccctcgcccccaggccccgaggaaaggaagggacagaagagggacgaggaggaagaggcgacagagaggaaacctgcttccccacctctgcctgccactcagcaagagaaaccttctcaaacacccgaggccgggaggaaagagaagccgatgcttcagagcagacactccttagatggctccaaacttacagagaaagtggaaactgctcagccgctgtggataacgttagcactgcaaaagcaaaaggggtttcgggagcagcaggcgacgcgggaggagagaaagcaagccagagaggccaaacaggcagaaaagctctccaaagaaaatgtcagtgtcagcgtgcagcct

SEQ ID NO: 205328 - protein, 396 aa, Artificial Sequence
  derived and/or modified sequence
MAMSLIQACCSLALSTWLLSFCFVHLLCLDFTVAEKEEWYTAFVNITYAEPAPDPGAGAAGGGGAELHTEKTECGRYGEHSPKQDARGEVVMASSAHDRLACDPNTKFAAPTRGKNWIALIPKGNCTYRDKIRNAFLQNASAVVIFNVGSNTNETITMPHAGVEDIVAIMIPEPKGKEIVSLLERNITVTMYITIGTRNLQKYRRLGDAAKKAISKLQIRTIKKGDKETESDFDNCAVCIEGYKPNDVVRILPCRHLFHKSCVDPWLLDHRTCPMCKMNILKALGIPPNADCMDDLPTDFEGSLGGPPTNQITGASDTTVNESSVTLDPAVRTVGALQVVQDTDPIPQEGDVIFTTNSEQEPAVSSDSDISLIMAMEVGLSDVELSTDQDCEEVKS

SEQ ID NO: 205329 - protein, 405 aa, Artificial Sequence
  derived and/or modified sequence
MAMSLIQACCSLALSTWLLSFCFVHLLCLDFTVAEKEEWYTAFVNITYAEPAPDPGAGAAGGGGAELHTEKTECGRYGEHSPKQDARGEVVMASSAHDRLACDPNTKFAAPTRGKNWIALIPKGNCTYRDKIRNAFLQNASAVVIFNVGSNTNETITMPHAGVEDIVAIMIPEPKGKEIVSLLERNITVTMYITIGTRNLQKYVSRTSVVFVSISFIVLMIISLAWLVFYYIQRFRYANARDRNQRRLGDAAKKAISKLQIRTIKKGDKETESDFDNCAVCIEGYKPNDVVRILPCRHLFHKSCVDPWLLDHRTCPMCKMNILKALGIPPNADCMDDLPTDFEGSLGGPPTNQITGASDTTVNESSVTLDPAVRTVGALQVVQDTDPIPQEGDVIFTTNSEFCHT

SEQ ID NO: 205330 - protein, 438 aa, Artificial Sequence
  derived and/or modified sequence
MAMSLIQACCSLALSTWLLSFCFVHLLCLDFTVAEKEEWYTAFVNITYAEPAPDPGAGAAGGGGAELHTEKTECGRYGEHSPKQDARGEVVMASSAHDRLACDPNTKFAAPTRGKNWIALIPKGNCTYRDKIRNAFLQNASAVVIFNVGSNTNETITMPHAGVEDIVAIMIPEPKGKEIVSLLERNITVTMYITIGTRNLQKYVSRTSVVFVSISFIVLMIISLAWLVFYYIQRFRYANARDRNQRRLGDAAKKAISKLQIRTIKKGDKETESDFDNCAVCIEGYKPNDVVRILPCRHLFHKSCVDPWLLDHRTCPMCKMNILKALGIPPNADCMDDLPTDFEGSLGGPPTNQITGASDTTVNESSVTLDPAVRTVGALQVVQDTDPIPQEGDVIFTTNSEQEPAVSSDSDISLIMAMEVGLSDVELSTDQDCEEVKS

SEQ ID NO: 205331 - DNA, 1191 bp, Artificial Sequence
  derived and/or modified sequence
atggccatgagcctgatccaggcctgctgcagcctggccctgagcacctggctgctgagcttctgcttcgtgcacctgctgtgcctggacttcaccgtggccgagaaggaggagtggtacaccgccttcgtgaacatcacctacgccgagcccgcccccgaccccggcgccggcgccgccggcggcggcggcgccgagctgcacaccgagaagaccgagtgcggcagatacggcgagcacagccccaagcaggacgccagaggcgaggtggtgatggccagcagcgcccacgacagactggcctgcgaccccaacaccaagttcgccgcccccaccagaggcaagaactggatcgccctgatccccaagggcaactgcacctacagagacaagatcagaaacgccttcctgcagaacgccagcgccgtggtgatcttcaacgtgggcagcaacaccaacgagaccatcaccatgccccacgccggcgtggaggacatcgtggccatcatgatccccgagcccaagggcaaggagatcgtgagcctgctggagagaaacatcaccgtgaccatgtacatcaccatcggcaccagaaacctgcagaagtacagaagactgggcgacgccgccaagaaggccatcagcaagctgcagatcagaaccatcaagaagggcgacaaggagaccgagagcgacttcgacaactgcgccgtgtgcatcgagggctacaagcccaacgacgtggtgagaatcctgccctgcagacacctgttccacaagagctgcgtggacccctggctgctggaccacagaacctgccccatgtgcaagatgaacatcctgaaggccctgggcatcccccccaacgccgactgcatggacgacctgcccaccgacttcgagggcagcctgggcggcccccccaccaaccagatcaccggcgccagcgacaccaccgtgaacgagagcagcgtgaccctggaccccgccgtgagaaccgtgggcgccctgcaggtggtgcaggacaccgaccccatcccccaggagggcgacgtgatcttcaccaccaacagcgagcaggagcccgccgtgagcagcgacagcgacatcagcctgatcatggccatggaggtgggcctgagcgacgtggagctgagcaccgaccaggactgcgaggaggtgaagagctag

SEQ ID NO: 205332 - DNA, 1218 bp, Artificial Sequence
  derived and/or modified sequence
atggccatgagcctgatccaggcctgctgcagcctggccctgagcacctggctgctgagcttctgcttcgtgcacctgctgtgcctggacttcaccgtggccgagaaggaggagtggtacaccgccttcgtgaacatcacctacgccgagcccgcccccgaccccggcgccggcgccgccggcggcggcggcgccgagctgcacaccgagaagaccgagtgcggcagatacggcgagcacagccccaagcaggacgccagaggcgaggtggtgatggccagcagcgcccacgacagactggcctgcgaccccaacaccaagttcgccgcccccaccagaggcaagaactggatcgccctgatccccaagggcaactgcacctacagagacaagatcagaaacgccttcctgcagaacgccagcgccgtggtgatcttcaacgtgggcagcaacaccaacgagaccatcaccatgccccacgccggcgtggaggacatcgtggccatcatgatccccgagcccaagggcaaggagatcgtgagcctgctggagagaaacatcaccgtgaccatgtacatcaccatcggcaccagaaacctgcagaagtacgtgagcagaaccagcgtggtgttcgtgagcatcagcttcatcgtgctgatgatcatcagcctggcctggctggtgttctactacatccagagattcagatacgccaacgccagagacagaaaccagagaagactgggcgacgccgccaagaaggccatcagcaagctgcagatcagaaccatcaagaagggcgacaaggagaccgagagcgacttcgacaactgcgccgtgtgcatcgagggctacaagcccaacgacgtggtgagaatcctgccctgcagacacctgttccacaagagctgcgtggacccctggctgctggaccacagaacctgccccatgtgcaagatgaacatcctgaaggccctgggcatcccccccaacgccgactgcatggacgacctgcccaccgacttcgagggcagcctgggcggcccccccaccaaccagatcaccggcgccagcgacaccaccgtgaacgagagcagcgtgaccctggaccccgccgtgagaaccgtgggcgccctgcaggtggtgcaggacaccgaccccatcccccaggagggcgacgtgatcttcaccaccaacagcgagttctgccacacctag

SEQ ID NO: 205333 - DNA, 1317 bp, Artificial Sequence
  derived and/or modified sequence
atggccatgagcctgatccaggcctgctgcagcctggccctgagcacctggctgctgagcttctgcttcgtgcacctgctgtgcctggacttcaccgtggccgagaaggaggagtggtacaccgccttcgtgaacatcacctacgccgagcccgcccccgaccccggcgccggcgccgccggcggcggcggcgccgagctgcacaccgagaagaccgagtgcggcagatacggcgagcacagccccaagcaggacgccagaggcgaggtggtgatggccagcagcgcccacgacagactggcctgcgaccccaacaccaagttcgccgcccccaccagaggcaagaactggatcgccctgatccccaagggcaactgcacctacagagacaagatcagaaacgccttcctgcagaacgccagcgccgtggtgatcttcaacgtgggcagcaacaccaacgagaccatcaccatgccccacgccggcgtggaggacatcgtggccatcatgatccccgagcccaagggcaaggagatcgtgagcctgctggagagaaacatcaccgtgaccatgtacatcaccatcggcaccagaaacctgcagaagtacgtgagcagaaccagcgtggtgttcgtgagcatcagcttcatcgtgctgatgatcatcagcctggcctggctggtgttctactacatccagagattcagatacgccaacgccagagacagaaaccagagaagactgggcgacgccgccaagaaggccatcagcaagctgcagatcagaaccatcaagaagggcgacaaggagaccgagagcgacttcgacaactgcgccgtgtgcatcgagggctacaagcccaacgacgtggtgagaatcctgccctgcagacacctgttccacaagagctgcgtggacccctggctgctggaccacagaacctgccccatgtgcaagatgaacatcctgaaggccctgggcatcccccccaacgccgactgcatggacgacctgcccaccgacttcgagggcagcctgggcggcccccccaccaaccagatcaccggcgccagcgacaccaccgtgaacgagagcagcgtgaccctggaccccgccgtgagaaccgtgggcgccctgcaggtggtgcaggacaccgaccccatcccccaggagggcgacgtgatcttcaccaccaacagcgagcaggagcccgccgtgagcagcgacagcgacatcagcctgatcatggccatggaggtgggcctgagcgacgtggagctgagcaccgaccaggactgcgaggaggtgaagagctag

SEQ ID NO: 205334 - DNA, 1191 bp, Artificial Sequence
  derived and/or modified sequence
atggccatgtctctcatccaggcgtgttgctccctggctctgagtacctggttgttaagcttctgctttgtccatcttttgtgcctcgattttacagtggccgaaaaagaagagtggtatacagcatttgtcaatatcacttacgcggagcctgcccctgacccaggcgccggggctgcggggggcggcggcgcagagctccataccgaaaagacagaatgtggacggtacggtgaacactcacctaaacaggacgctagaggcgaagtggtcatggcttctagcgcccacgatagactagcttgcgatccaaatacaaaattcgcagcccccactcgcggaaagaactggatagcccttatccctaagggcaattgcacctacagggataagatcagaaatgctttcttgcagaatgcttcagccgtggtgatttttaatgtgggctctaacaccaacgaaacaatcacgatgccccatgccggggtggaagacattgtcgccatcatgatcccagaaccaaaaggaaaagagatcgtgtccctcctcgagcgcaacattaccgtgacgatgtacatcaccattggtactcgcaatctgcagaagtaccggaggctgggcgacgcagcaaaaaaggccatcagcaagctccaaattaggacaatcaagaagggtgacaaggagactgaatcggatttcgacaactgtgctgtctgcattgaggggtacaagcccaatgacgtggttcgcattctgccctgcagacacctcttccacaagagttgtgtcgacccttggttgctggaccacaggacttgccccatgtgtaaaatgaatatactcaaagcccttggaatcccaccaaacgccgactgcatggacgatctgccgaccgacttcgaagggtccctcggagggccccccactaaccagattacgggagcctccgacacgacggttaacgaaagcagcgttaccctcgaccccgccgtccggactgtcggcgcactgcaggtcgtgcaagataccgatcctattccacaagaaggcgacgtgatatttactaccaattccgagcaggaaccagcagtctcttcggactctgacattagtctgatcatggccatggaagttggtctcagtgatgtggagctcagcaccgaccaggactgtgaggaggtgaaaagttag

SEQ ID NO: 205335 - DNA, 1218 bp, Artificial Sequence
  derived and/or modified sequence
atggcgatgtcattaatccaagcttgttgttctttagcattatccacctggctattgtctttttgttttgttcatctgttgtgcttggacttcaccgttgccgaaaaggaggaatggtatacagcctttgtgaatattacttacgcagaacctgcgccagatcccggcgccggcgcggctggtggcggcggcgcagagctccatactgagaaaacagagtgcggccggtacggagagcactcaccaaaacaggacgcccggggcgaggtggtgatggcctcgagtgcccatgaccgtcttgcatgtgatccaaacactaaattcgccgctccgaccaggggaaagaactggatcgcacttattccaaaagggaattgcacgtaccgtgacaagatccgaaacgcctttttgcagaacgcatcggctgtcgtaattttcaatgtaggatccaataccaacgagactattactatgccccacgcaggcgtggaggatattgtggccatcatgatcccagagcccaaggggaaggagattgtgtccctgctggaaaggaatattaccgtaacgatgtacatcactatcggtactcggaacctccagaagtacgtgtctcgaactagcgtagtgttcgtgtctataagtttcattgtgctgatgatcatttctctggcctggcttgtgttttattatatccagcgctttcggtacgcaaatgcccgcgacaggaatcagcgtaggctgggagacgcggctaagaaggctatatcaaagctccagattcgcactatcaagaagggtgacaaggaaactgagagtgacttcgataactgcgcagtgtgtattgaaggttacaaacctaacgatgtggtgcgcatcttaccatgtcgccacctgttccacaagtcctgcgttgacccatggctcctggatcatagaacgtgtcctatgtgcaaaatgaatatcctgaaagcactgggcattcctccaaatgccgactgcatggacgatctgccgaccgacttcgagggatctttgggcgggcccccgacaaatcaaatcaccggagccagcgacaccaccgtgaacgagtcttcagttacccttgatccagccgtgcgaactgtcggtgcattgcaagtggtgcaggacacagatcctattcctcaggagggcgatgtgatcttcactaccaacagcgagttttgccacacctag

SEQ ID NO: 205336 - DNA, 1317 bp, Artificial Sequence
  derived and/or modified sequence
atggctatgagcttgattcaagcttgctgctcccttgctctctccacttggttgctgtccttttgtttcgtacacctgttgtgcctggatttcactgtggccgaaaaggaagaatggtatacggcatttgtgaatattacatacgccgagccagcccctgaccctggcgctggcgctgcaggaggcggcggcgctgagcttcacacagaaaagactgaatgcggccggtatggggagcactcacctaaacaggatgcacgcggggaagttgtgatggcttctagcgcgcatgaccgcctggcatgtgaccctaatacaaaattcgcagcccctaccaggggtaagaattggatcgctctcattcccaagggtaattgtacctacagggataagatccgtaacgccttcctccagaatgcatccgccgtcgttattttcaatgtcggctcaaacaccaatgagacaataaccatgcctcatgctggagtagaagatattgtggccataatgatcccggaaccaaaggggaaggaaatcgtgagcctcctggaacgcaatatcaccgtcacaatgtacattactattggaacacgcaacctccaaaagtacgtttccagaacatccgtagtttttgtttctatttcttttattgtattgatgatcatctcgctcgcatggctcgtgttctattatatccagaggttccgttatgccaacgccagggaccgaaaccaacggcggttaggcgacgcagctaagaaagccattagcaagctacagatccggaccatcaaaaagggcgacaaagagaccgagagcgacttcgataattgtgcggtgtgtatcgagggatataagcccaacgacgtggtgaggatcctcccctgtagacatttgttccacaaatcttgtgtagacccctggttactcgatcaccgcacatgccctatgtgtaagatgaacatcctgaaagccttgggaataccaccaaacgctgattgtatggacgacctgcccaccgacttcgagggctctctcggggggccgcctactaaccagatcactggggctagcgatacgacagttaacgaaagtagcgttacactggaccccgcagttcgcacagttggtgcgctccaggtagtccaagacacagaccccatacctcaggaaggagacgtaatttttaccacaaactcagagcaggagcccgccgtctccagcgattcagacattagtcttatcatggcaatggaagttggtttatcggacgtggaactctctaccgatcaagattgcgaagaggtcaaaagctag

SEQ ID NO: 205337 - DNA, 1191 bp, Artificial Sequence
  derived and/or modified sequence
atggccatgagcctcatccaggcctgctgcagcctggccctgagcacctggctgctgtccttctgctttgtgcacctgctgtgcctggacttcaccgtggccgagaaggaggagtggtacacagcctttgtgaacatcacctatgcagagcccgccccagaccctggagctggagctgctgggggcggcggcgctgagctgcacacagagaagacagaatgtggccgctatggagagcacagccccaagcaggatgcccggggggaggtggtgatggccagcagcgcccatgaccggctggcctgtgaccccaacaccaagtttgctgcccccacccggggcaagaactggatcgccctgatccccaagggcaactgcacctacagagacaagatcagaaatgccttcctgcagaatgccagcgctgtggtgatcttcaacgtgggcagcaacaccaatgagaccatcaccatgcctcatgctggggtggaggacatcgtggccatcatgatccctgagcccaagggcaaggagatcgtgtccctgctggagaggaacatcaccgtgaccatgtacatcaccatcggcaccaggaacctgcagaagtaccgccgcctgggagatgctgccaagaaggccatcagcaagctgcagatccgcaccatcaagaagggggacaaggagacagaaagtgactttgacaactgtgctgtgtgcatcgagggctacaagcccaatgatgtggtgcgcatcctgccctgccgccacctgttccacaagagctgtgtggacccctggctgctggaccacaggacctgccccatgtgcaagatgaacatcctgaaggccctgggcatccccccaaatgctgactgcatggatgacctgcccacagactttgagggcagcctgggcggcccccccaccaaccagatcactggagccagtgacaccaccgtgaatgaatcttctgtgaccctggaccctgctgtgaggacagtgggcgccctgcaggtggtgcaggacacagaccccatcccccaggagggagatgtgatcttcaccaccaacagcgagcaggagcctgctgtgtccagtgacagcgacatcagcctcatcatggccatggaggtgggcctgagtgatgtggagctgagcacagaccaggactgtgaggaggtgaagagctag

SEQ ID NO: 205338 - DNA, 1218 bp, Artificial Sequence
  derived and/or modified sequence
atggccatgagcctcatccaggcctgctgcagcctggccctgagcacctggctgctgtccttctgctttgtgcacctgctgtgcctggacttcaccgtggccgagaaggaggagtggtacacagcctttgtgaacatcacctatgcagagcccgccccagaccctggagctggagctgctgggggcggcggcgctgagctgcacacagagaagacagaatgtggccgctatggagagcacagccccaagcaggatgcccggggggaggtggtgatggccagcagcgcccatgaccggctggcctgtgaccccaacaccaagtttgctgcccccacccggggcaagaactggatcgccctgatccccaagggcaactgcacctacagagacaagatcagaaatgccttcctgcagaatgccagcgctgtggtgatcttcaacgtgggcagcaacaccaatgagaccatcaccatgcctcatgctggggtggaggacatcgtggccatcatgatccctgagcccaagggcaaggagatcgtgtccctgctggagaggaacatcaccgtgaccatgtacatcaccatcggcaccaggaacctgcagaagtatgtgtccaggacctctgtggtgtttgtgtccatctccttcatcgtgctgatgatcatcagcctggcctggctggtgttctactacatccagcgcttccgctatgccaatgcccgggacaggaaccagaggcggctgggagatgctgccaagaaggccatcagcaagctgcagatccgcaccatcaagaagggggacaaggagacagaaagtgactttgacaactgtgctgtgtgcatcgagggctacaagcccaatgatgtggtgcgcatcctgccctgccgccacctgttccacaagagctgtgtggacccctggctgctggaccacaggacctgccccatgtgcaagatgaacatcctgaaggccctgggcatccccccaaatgctgactgcatggatgacctgcccacagactttgagggcagcctgggcggcccccccaccaaccagatcactggagccagtgacaccaccgtgaatgaatcttctgtgaccctggaccctgctgtgaggacagtgggcgccctgcaggtggtgcaggacacagaccccatcccccaggagggagatgtgatcttcaccaccaacagcgagttctgccacacctag

SEQ ID NO: 205339 - DNA, 1317 bp, Artificial Sequence
  derived and/or modified sequence
atggccatgagcctcatccaggcctgctgcagcctggccctgagcacctggctgctgtccttctgctttgtgcacctgctgtgcctggacttcaccgtggccgagaaggaggagtggtacacagcctttgtgaacatcacctatgcagagcccgccccagaccctggagctggagctgctgggggcggcggcgctgagctgcacacagagaagacagaatgtggccgctatggagagcacagccccaagcaggatgcccggggggaggtggtgatggccagcagcgcccatgaccggctggcctgtgaccccaacaccaagtttgctgcccccacccggggcaagaactggatcgccctgatccccaagggcaactgcacctacagagacaagatcagaaatgccttcctgcagaatgccagcgctgtggtgatcttcaacgtgggcagcaacaccaatgagaccatcaccatgcctcatgctggggtggaggacatcgtggccatcatgatccctgagcccaagggcaaggagatcgtgtccctgctggagaggaacatcaccgtgaccatgtacatcaccatcggcaccaggaacctgcagaagtatgtgtccaggacctctgtggtgtttgtgtccatctccttcatcgtgctgatgatcatcagcctggcctggctggtgttctactacatccagcgcttccgctatgccaatgcccgggacaggaaccagaggcggctgggagatgctgccaagaaggccatcagcaagctgcagatccgcaccatcaagaagggggacaaggagacagaaagtgactttgacaactgtgctgtgtgcatcgagggctacaagcccaatgatgtggtgcgcatcctgccctgccgccacctgttccacaagagctgtgtggacccctggctgctggaccacaggacctgccccatgtgcaagatgaacatcctgaaggccctgggcatccccccaaatgctgactgcatggatgacctgcccacagactttgagggcagcctgggcggcccccccaccaaccagatcactggagccagtgacaccaccgtgaatgaatcttctgtgaccctggaccctgctgtgaggacagtgggcgccctgcaggtggtgcaggacacagaccccatcccccaggagggagatgtgatcttcaccaccaacagcgagcaggagcctgctgtgtccagtgacagcgacatcagcctcatcatggccatggaggtgggcctgagtgatgtggagctgagcacagaccaggactgtgaggaggtgaagagctag

SEQ ID NO: 205340 - DNA, 1191 bp, Artificial Sequence
  derived and/or modified sequence
atggccatgagcctgatccaggcctgctgcagcctggccctgagcacttggctgttgagcttttgctttgtccatctactctgcctcgatttcacagtcgccgagaaagaggagtggtatacagcttttgtgaacatcacatacgccgagcccgctccggaccctggcgccggcgccgccgggggaggcggcgctgaactccatacagaaaaaaccgagtgcggtcgctatggagaacactccccgaaacaggatgccagaggcgaggtggtcatggcctcatctgcacatgaccgacttgcctgcgaccctaatactaaattcgccgccccaactcgtggaaagaactggatagctctgattccaaaagggaattgcacctaccgcgataagattaggaacgcttttctgcagaatgcaagcgccgtcgtgatattcaacgttggttctaataccaacgagaccattaccatgcctcacgcaggcgtcgaggacattgtcgcgatcatgattcctgaaccgaagggaaaagaaatcgtgagcctgcttgaacggaacatcactgtgactatgtacatcaccataggaaccagaaacctgcaaaaatacaggagattgggagacgcagcaaaaaaagcgatcagtaagctgcaaatacgcactatcaagaaaggagacaaagagaccgagtccgattttgacaattgtgccgtatgcattgaaggctacaagccgaatgacgtggtacgcattctgccctgcagacaccttttccacaaaagctgcgttgacccttggctcctggaccatcggacgtgccctatgtgcaagatgaacattttgaaagctcttggcatccccccaaacgcagactgcatggacgacctgcccacagacttcgagggctccctggggggaccacccactaaccagatcacaggtgcctccgacacaactgttaatgagagtagtgtcacactagatcccgcagtcaggactgtgggcgccttacaggtggttcaagacacagacccaattccacaagagggggacgtgatctttaccacaaactccgaacaagagcccgccgtctcctcggattccgacatttccctcatcatggctatggaggtgggactgtctgacgtggagctctccacggaccaggactgcgaggaagtgaaatcatag

SEQ ID NO: 205341 - DNA, 1218 bp, Artificial Sequence
  derived and/or modified sequence
atggccatgagcctgatccaggcctgctgcagcctggccctgagcacctggctgctgtccttctgtttcgtacatctactttgcttggattttaccgtcgccgagaaagaggaatggtacaccgccttcgtcaacattacctacgccgagcctgcccccgatccaggggccggtgctgccggcggagggggcgccgagcttcataccgaaaagaccgaatgtgggcgatacggagaacattcacctaaacaggacgcacgcggagaagtcgtgatggcttcatctgcacacgatagactggcctgtgaccctaacacaaagttcgccgcacccactcgtggtaagaattggatcgccttgatccccaagggcaactgcacttacagagacaagattcgtaatgcctttctgcagaacgcctccgctgtcgtgatcttcaacgtgggttcgaataccaacgaaacaattaccatgccgcatgccggcgtggaagacatcgtggctatcatgatccctgagccaaaggggaaagagatagtatcgttacttgagagaaacatcactgtgacaatgtacattacaattggaactcgtaatttacagaaatatgtgagccgcacatccgtggtgtttgtgagcatcagtttcatagtgctcatgatcatttcacttgcctggctcgttttttattacatccagcgctttcgttatgccaatgccagagaccgcaatcagcggcggcttggggatgcggctaagaaagctatcagtaagctccaaatcagaaccattaagaagggcgacaaggagactgaaagcgatttcgacaattgcgctgtgtgtattgaggggtacaagccgaacgacgttgtccggatcttaccttgccgccaccttttccacaagagctgtgtggatccatggcttcttgatcatagaacctgccctatgtgcaagatgaatattctgaaggcactcggaatcccacctaacgcagattgcatggacgacctcccaaccgattttgagggctcgttaggagggccccccaccaaccagatcacaggcgcttcagatacaacggtgaacgagtcatccgtgaccctggatcccgccgtgagaaccgtgggagccttgcaggtcgtacaggataccgacccaattccacaagagggcgatgtgatcttcacaacaaatagcgagttctgtcacacctag

SEQ ID NO: 205342 - DNA, 1317 bp, Artificial Sequence
  derived and/or modified sequence
atggccatgagcctgatccaggcctgctgcagcctggccctgagcacctggctgctctctttctgtttcgtgcacctcctctgcctggactttaccgtggccgagaaggaggaatggtatacggcgtttgtcaacattacgtatgccgaacctgctcctgaccctggagccggggccgccggcggcggcggcgccgagctgcacacggagaagacggagtgcgggaggtacggcgaacacagccccaaacaggatgcccgcggagaagtcgttatggcatcttccgcacacgataggctcgcctgcgatcctaacaccaaattcgccgccccaacacgcggcaaaaactggattgcgctgattcccaagggaaactgtacttatcgagacaaaattagaaacgccttcctgcagaacgcctccgcggttgtaatcttcaacgttggctccaatacaaatgagaccatcacaatgcctcacgcaggagtagaagatattgtggcaatcatgatacccgagccaaaggggaaggaaatcgttagcctgctggaaagaaatattaccgttactatgtatatcaccatcggaaccaggaacctgcagaaatatgtctcccgcacgagcgtggtgtttgtgagcatcagtttcatagttctgatgatcatatctttagcatggttggtattctactatatccagagattccggtacgctaatgcccgcgaccggaatcagcggagattaggagatgcggcaaaaaaagccatctccaaactacagatccgaaccataaaaaagggcgataaggagactgagtctgactttgacaattgcgccgtctgcattgagggctacaaacctaatgacgtggtgcgcattctaccgtgcaggcatctattccacaaatcttgcgttgacccctggctgttggaccatcgaacatgcccgatgtgtaaaatgaatatcctgaaggcacttggcatcccccccaatgccgactgtatggacgatctgcccacagattttgaaggaagcctgggtggccctcccacaaaccagatcacaggtgccagcgatactactgtcaacgagtcctctgttacactggaccccgcagtgcgaaccgtgggagccctgcaggtggttcaggacaccgatccaatcccacaggaaggggacgttatcttcacaaccaattccgaacaggagccagcggtaagctcagacagcgacattagtttgattatggccatggaggttggcctctcggacgtcgagttgagcacagaccaagattgcgaagaggtaaagagctag

SEQ ID NO: 205343 - DNA, 1191 bp, Artificial Sequence
  derived and/or modified sequence
atggcaatgtctttgattcaggcatgctgtagcctggccctgagcacttggcttctaagcttctgttttgtccacttgctatgtttggattttacagtggccgaaaaggaagaatggtatacagcattcgtgaatatcacttacgccgaacccgctcctgacccaggtgccggagcagcaggtggcggaggggctgaactgcacactgagaagacggagtgcggtagatacggcgagcattctccaaaacaggacgctagaggcgaggtggtcatggcaagctcagcccatgacaggctggcttgtgatcctaatactaaattcgcagcacctacacgtggaaaaaactggatagctttgattcctaagggcaattgcacctatagggataaaatccggaatgcctttctccagaacgccagtgctgtggtgatttttaacgtgggaagcaacaccaatgagacgatcaccatgccacatgcgggtgtcgaagatatcgtggctataatgattccggaaccaaagggcaaggaaattgtgagcctgctggaaaggaacattactgtgacaatgtatattaccatcgggactcggaatctgcaaaagtaccgcagacttggagacgccgcaaaaaaggccatttctaagctacagatacgtacaataaaaaaaggggacaaggagactgagtcagattttgataactgtgcggtttgcattgagggctacaagccaaacgacgttgttcggatcctgccatgcaggcacctgttccataaaagctgtgtggacccctggctgctggaccatcggacatgccctatgtgtaagatgaatattctgaaggcgctggggatcccccctaacgcggactgtatggacgacctgccgactgacttcgagggctcactgggcggaccccctaccaaccagattacaggagcatctgacacgaccgtgaatgagtcgagtgtcacactcgaccccgctgtacgaaccgtgggcgcactgcaggtagtgcaggacactgacccgatcccccaggaaggagacgtcatttttactactaactctgagcaagagcccgcagtgtcctctgactccgacatcagcttgatcatggctatggaagtcggcctctctgatgtggaactgtccaccgatcaggattgtgaggaggtcaaaagctag

SEQ ID NO: 205344 - DNA, 1218 bp, Artificial Sequence
  derived and/or modified sequence
atggccatgagcttgattcaggcatgttgcagccttgcattgtcgacttggttacttagcttctgcttcgtgcatttgctgtgtctggactttacggtggccgaaaaggaggaatggtacaccgcatttgtgaatataacttatgccgagccagcgccagacccaggcgcaggcgctgcgggtggaggaggggctgaactccatacagagaagaccgaatgtgggagatacggagagcactctccgaagcaggacgctagaggcgaagtagtgatggcaagtagtgcgcacgaccgtttggcctgcgaccctaacacaaaattcgccgcacctactcgcggtaagaattggatagctctgatcccaaagggtaactgcacatatagggacaagatcagaaacgcatttctgcagaacgcttccgctgtagtcatcttcaatgtgggtagcaacaccaatgaaacaattacgatgccccacgccggagtggaagacattgtcgctattatgatccccgagccgaagggaaaagagatagtaagcctgctggagcgaaatattaccgtgacaatgtacattacaattggcactagaaacctgcagaagtatgtgtcgcgcactagtgtcgtctttgtatccatctccttcattgtacttatgattatcagtctggcatggctcgtgttctactatatacagagattccgctatgctaacgcccgagatcggaaccagagacgcctcggcgacgcggctaaaaaagccatctccaaactccaaatccgcactattaagaagggggacaaagaaacggaatcagactttgataactgcgcggtgtgtatcgaagggtataaacccaatgatgtggtccggatattaccctgcagacatttgttccacaagagttgtgttgacccttggctgctcgatcatcgaacatgtcctatgtgcaaaatgaatatcctaaaagccctcggtattccaccaaacgccgactgcatggatgatctcccaactgacttcgagggcagcctggggggacccccaaccaatcaaatcacgggcgctagcgacacgactgtgaatgagagctcagtgacccttgatccagccgtcaggactgtaggcgcactacaagtagtgcaagacacggatcctattccccaagagggcgatgtaatctttactacaaacagtgaattctgccacacctag

SEQ ID NO: 205345 - DNA, 1317 bp, Artificial Sequence
  derived and/or modified sequence
atggctatgagtctgatacaagcgtgctgttctttagccctgtccacctggctgctatccttctgcttcgtccacctgctctgcttagactttacagtggcggagaaggaagagtggtacactgccttcgtcaatatcacatacgccgaaccagcccctgatcctggtgcaggagcggcagggggaggtggggcagagctgcacactgagaaaaccgagtgtggcagatatggggagcattcccccaagcaggatgccaggggggaggtagtgatggcttcttctgcccacgaccggctggcctgcgatccaaatacaaagttcgctgcccctacacgcggtaagaattggatagccctgataccaaagggaaactgcacgtacagagacaaaatacggaatgcctttctgcagaacgctagcgcagtggttatttttaatgtgggctccaacacaaatgagaccataaccatgccacacgcaggggtcgaagacatcgttgccattatgatccccgagccgaagggcaaagaaatcgtctcccttctagagcggaacattaccgtgacgatgtatataacgatcgggactcgaaatcttcagaagtatgtatccagaacatcagtggtgttcgtgtcaatcagctttatcgtcctaatgattatctccctggcatggctggtattctattacatccagaggtttagatacgccaatgccagagacagaaaccagagaaggttaggtgatgcagccaagaaggcaatcagcaagctgcagatccggactatcaagaagggagacaaagagactgaatccgactttgacaactgcgcggtatgcatcgagggctacaagcccaatgacgtcgtgcgaatactgccctgtagacacctattccacaaatcctgcgtggatccttggctattagaccaccgaacctgccctatgtgcaagatgaacatccttaaggccctcggaattccaccaaatgccgactgtatggatgacctgcctacagatttcgaaggcagtctcggcggtcctccaacgaaccaaataactggtgcttcggacaccacggtcaacgagagttccgtgactcttgatccagctgttcgcacagtgggcgctctacaggtggtgcaagacacggatcccattccccaggagggtgatgttatctttacaactaatagtgaacaagagccggcagtgtcttccgattcggacatctctctaatcatggcgatggaagttggcctgtcagatgtggaacttagtaccgaccaggattgtgaggaggtgaaatcctag

SEQ ID NO: 205346 - DNA, 4535 bp, Artificial Sequence
  derived and/or modified sequence
cacacacacacggaccgcttactccgctctgcctgctcgctcccactgtccccaagcccgccccgcccgcggcaagtgcgtgcccaggcgcagccaccggcgagatcaggagcgcagcgcccgcagcctgagggaaccggcgcagggcagcagcggctgcagctggattcgcgcgccccagcgctcagtggcggcggccgggacaccctgggcagcaccccgcaccgcagcaccccagactacgagcaatcgtgcccgtccccgccggggctggagggcgcagggccgccaccctgcaagttcgtgggcccccggccacccttatgagagaaggcgaagccgggcgaaggagcaggacgctcggcagcaggactcctccgcaagccccgcgggccctctgttcccgcgccccccgggcgcccaagaagcaaaatgcaaccaccgcgctacagctgagaggggaaggggccagcgccatccgctcgcccggaatccggtccccgcggcggctgcgcgtcccggccgcggcccctccggcccgggagtgagcagcagcaggaggagaggcagcggcccggggttggccggggctggggaggagggacgggacggagggagggcgcgggggcggggagggggccccggcggataaagatggcaatgtctctcatccaagcgtgctgcagtctggctctctcaacatggctgctttccttttgtttcgtgcatctgctctgcctggactttaccgtggccgagaaggaggaatggtacaccgccttcgtgaacatcacctacgccgagcccgcgccggaccccggggccggggcggcgggcggcggcggcgcggagctgcacacggagaagacggagtgcgggcgctacggagagcactcgcccaagcaggacgcccgcggggaggtggtcatggccagctcggcccacgaccgcctggcctgcgaccccaacaccaagttcgccgccccgacccgcggcaagaactggatagccctcatccccaagggcaactgcacgtacagggataagatccggaacgcgttcctgcagaacgcctcagccgtggtcatcttcaacgtgggctccaacaccaacgagaccatcaccatgccccacgcgggtgtagaagacatcgtggccataatgattcctgagccaaaagggaaggagatagtaagcctgctggaaagaaacatcaccgtgacaatgtacatcaccatcggaacccggaacttgcagaaatatcgccgactgggggatgcagcaaagaaagccatcagcaaactccagatcaggaccatcaagaagggtgacaaggaaacagagtctgattttgacaactgtgcagtttgtattgaagggtacaagcccaatgacgttgtccggatcctgccctgccggcatcttttccacaagtcctgtgttgacccctggcttctagaccatcgtacctgtcccatgtgcaagatgaacattcttaaagccctagggatcccgcccaatgccgactgcatggacgacttgcccactgacttcgagggctctctgggaggtccacccaccaaccagatcacaggtgccagcgacacaacagtgaatgaaagttcagtcactttggaccctgctgtccggactgtgggagccttgcaggtggtccaggatacagaccccatcccccaggagggagacgtcatctttactactaacagtgagcaggagccagctgtaagcagtgattctgacatttccttgatcatggcaatggaggttggactgtctgatgtagaactttccactgaccaggactgtgaagaagtgaaatcttgaaacgacaaatccagaagcaaagagatagtaggacccaagggaaaggaagggaagagtgctccaagacttggaccaggcacacacacacctccagatcaccttggcaactccagggcgctccgttcaagaatgctgacgaaaagcaatatccaaagtcttgtcaatcaggatgcagtttctccatcggtatggcagtctgtggccttggcagctgggaagttgaaagctgatttccactcctatgtccatgtagacatacacttcagaagctcctaaaacagagactgaaaggccacctttaggatttcttagtttcatttcaattctttccatgtctcatcattcttgtttttggcatgttgtttgatttctttggcaatttttttaaagattatttgtagtttactttccatctattcctttgtttttcctttgatgcactccagcttttgtataggtttctgtttagaagcaccagttcctgctatgatcagtttgtattccatctctgagatatgtggtcttgacctcccagcatgaagtgtgcatggctttgagaagtgcctcagcaccctgaaatggactaaggccagctttcattaagaatctaagttcttctaagtgggcctttaaaaaccccagctgccagagaccccaacactaagccctaaatctgctgaggccactgctggttattttaagccacatcacacttgcttccacttgccgggcttgattaagggcccacgtgacatgagaagggagctctagggaagccgtttcattcttctgggtcttacagtctttggctgaaattctgaactcagaagtcccctccaaggcatccagtctttggtggttgtagggctggttttaaaaccagataccacattttcttcctattgaaaacaaaatgccagttgcattggtttcccctgggctagaacagtttttttcttacctctgtaagtgggttctgtaaaaaatggaggctttagagaaaagccaatcatttttaagtccaatggcaaacatagtgggggctgcagtagcacctagcttttaccttaatttcgacacacttctgttgaatctcaccagaccatgtgggaggatttaggtgaatccctagcagattgcttcccagggctccctgagtgtgtccagataccaagtgaggaatgaggtgtgatttgctgtatcatttgaaccaaaaagtatgcagcatgagaatttgctagatcgtttatcctgactgaaatagacaaagtaagagggaaaggaaaagaggtatcaagtaaatactgaaacccaatggtgtttttaaactgtttctgtttttattcatcttttgtaactatgacagaaatgtgctattttttcagtgggcaattttgtaatatattcagactatccagatacagagatgactaaggtcattgatagcgtctctgaacaatcagacggatcaccttatctctacacagctggcaaacaccaggctgcggcttggattaaccaggaaagaaagcttttctcactgagttgtttttatgtattgatggggacttttccacctcattagactaatactcattcaaaaagagtttggttctgctgtaaatccttgccgcctgctgaaacatggtgtgcaggtcaacggagaatactagctgctcctttttcaccacctttaccaatttcctatttgatggtttgtaagtagacagtaaggcaaggcagatgattattaccctcagaaaggttgcatctccctaggagtccaatgcttcctgtaatgaaatccactctctatgtgtgggaaaagaggcagggaggaatgaagagagctctgaatcgagaatcctagatgaaccacacgctttactaagcctcggcttcttcatctataatgtgaagggtttaataacatgagtccccaagctcctctggctgtgggaccacagatgagtctttcagaggcaggatccatttttgcagatagctatgacttgtggcaatcaggcttcgtagcttggggaggtagagttacttgacatgtatcatgtaataacagcctttgagacttggcacaactatggtgctgagaatgaaaatctaaatgattgaagttttaagtccaagtaggagttggtttgttttgccttgtttaaaaattgctgttagtcacagagtttgcaatctctggataccttcaaatcctagctctcactgtgggattcttgatctcagaggtgtttatttttcacagtcagcataggcttgcgccactgactcctccttcagtcggctttgcccaaaacaaattttagtattactggtattaagtttagtccagtggaattagaaggataattcaatagcaacagaaatataaattatattccattcccagagagagaatgcgctttggattgtttagtcctctgattaacgagtattttctcttcctgccaagaactaggtgaatcaggaattgattgcatatgcaagccctggccacagctgcacttacaggatgcctcatagacgatgaggggtctgaaaggccaacccgaggctggcagatctgaccccaaggaggtcctgctgcaaaccccctgagcctttgccattcactacttaccaaagtttgtttctggaggattttcctgtagctttgatagttt

SEQ ID NO: 205347 - DNA, 1530 bp, Artificial Sequence
  derived and/or modified sequence
cgggcgcccaagaagcaaaatgcaaccaccgcgctacagctgagaggggaaggggccagcgccatccgctcgcccggaatccggtccccgcggcggctgcgcgtcccggccgcggcccctccggcccgggagtgagcagcagcaggaggagaggcagcggcccggggttggccggggctggggaggagggacgggacggagggagggcgcgggggcggggagggggccccggcggataaagatggcaatgtctctcatccaagcgtgctgcagtctggctctctcaacatggctgctttccttttgtttcgtgcatctgctctgcctggactttaccgtggccgagaaggaggaatggtacaccgccttcgtgaacatcacctacgccgagcccgcgccggaccccggggccggggcggcgggcggcggcggcgcggagctgcacacggagaagacggagtgcgggcgctacggagagcactcgcccaagcaggacgcccgcggggaggtggtcatggccagctcggcccacgaccgcctggcctgcgaccccaacaccaagttcgccgccccgacccgcggcaagaactggatagccctcatccccaagggcaactgcacgtacagggataagatccggaacgcgttcctgcagaacgcctcagccgtggtcatcttcaacgtgggctccaacaccaacgagaccatcaccatgccccacgcgggtgtagaagacatcgtggccataatgattcctgagccaaaagggaaggagatagtaagcctgctggaaagaaacatcaccgtgacaatgtacatcaccatcggaacccggaacttgcagaaatatgtgagccgcacttcggttgtgtttgtctccatctccttcattgtcctgatgatcatttccctcgcatggctcgtcttttattacatccagaggtttcgatatgcaaatgccagggataggaaccagcgccgactgggggatgcagcaaagaaagccatcagcaaactccagatcaggaccatcaagaagggtgacaaggaaacagagtctgattttgacaactgtgcagtttgtattgaagggtacaagcccaatgacgttgtccggatcctgccctgccggcatcttttccacaagtcctgtgttgacccctggcttctagaccatcgtacctgtcccatgtgcaagatgaacattcttaaagccctagggatcccgcccaatgccgactgcatggacgacttgcccactgacttcgagggctctctgggaggtccacccaccaaccagatcacaggtgccagcgacacaacagtgaatgaaagttcagtcactttggaccctgctgtccggactgtgggagccttgcaggtggtccaggatacagaccccatcccccaggagggagacgtcatctttactactaacagtgagttctgccatacttaaagtgacatagccagaaggactgttgccttgtaggaattggaaaaaaatacctttcctcaaaaagaaaaaaa

SEQ ID NO: 205348 - DNA, 1828 bp, Artificial Sequence
  derived and/or modified sequence
cgcgggggcggggagggggccccggcggataaagatggcaatgtctctcatccaagcgtgctgcagtctggctctctcaacatggctgctttccttttgtttcgtgcatctgctctgcctggactttaccgtggccgagaaggaggaatggtacaccgccttcgtgaacatcacctacgccgagcccgcgccggaccccggggccggggcggcgggcggcggcggcgcggagctgcacacggagaagacggagtgcgggcgctacggagagcactcgcccaagcaggacgcccgcggggaggtggtcatggccagctcggcccacgaccgcctggcctgcgaccccaacaccaagttcgccgccccgacccgcggcaagaactggatagccctcatccccaagggcaactgcacgtacagggataagatccggaacgcgttcctgcagaacgcctcagccgtggtcatcttcaacgtgggctccaacaccaacgagaccatcaccatgccccacgcgggtgtagaagacatcgtggccataatgattcctgagccaaaagggaaggagatagtaagcctgctggaaagaaacatcaccgtgacaatgtacatcaccatcggaacccggaacttgcagaaatatgtgagccgcacttcggttgtgtttgtctccatctccttcattgtcctgatgatcatttccctcgcatggctcgtcttttattacatccagaggtttcgatatgcaaatgccagggataggaaccagcgccgactgggggatgcagcaaagaaagccatcagcaaactccagatcaggaccatcaagaagggtgacaaggaaacagagtctgattttgacaactgtgcagtttgtattgaagggtacaagcccaatgacgttgtccggatcctgccctgccggcatcttttccacaagtcctgtgttgacccctggcttctagaccatcgtacctgtcccatgtgcaagatgaacattcttaaagccctagggatcccgcccaatgccgactgcatggacgacttgcccactgacttcgagggctctctgggaggtccacccaccaaccagatcacaggtgccagcgacacaacagtgaatgaaagttcagtcactttggaccctgctgtccggactgtgggagccttgcaggtggtccaggatacagaccccatcccccaggagggagacgtcatctttactactaacagtgagcaggagccagctgtaagcagtgattctgacatttccttgatcatggcaatggaggttggactgtctgatgtagaactttccactgaccaggactgtgaagaagtgaaatcttgaaacgacaaatccagaagcaaagagatagtaggacccaagggaaaggaagggaagagtgctccaagacttggaccaggcacacacacacctccagatcaccttggcaactccagggcgctccgttcaagaatgctgacgaaaagcaatatccaaagtcttgtcaatcaggatgcagtttctccatcggtatggcagtctgtggccttggcagctgggaagttgaaagctgatttccactcctatgtccatgtagacatacacttcagaagctcctaaaacagagactgaaaggccacctttaggatttcttagtttcatttcaattctttccatgtctcatcattcttgtttttggcatgttgtttgatttctttggcaatttttttaaagattatttgtagtttactttccatctattcctttgtttttcctttgatgcactccagcttttgtataggtttctgtttagaagcacca

SEQ ID NO: 205349 - protein, 607 aa, Artificial Sequence
  derived and/or modified sequence
MIARCLLAVRSLRRVGGSRILLRMTLGREVMSPLQAMSSYTVAGRNVLRWDLSPEQIKTRTEELIVQTKQVYDAVGMLGIEEVTYENCLQALADVEVKYIVERTMLDFPQHVSSDKEVRAASTEADKRLSRFDIEMSMRGDIFERIVHLQETCDLGKIKPEARRYLEKSIKMGKRNGLHLPEQVQNEIKSMKKRMSELCIDFNKNLNEDDTFLVFSKAELGALPDDFIDSLEKTDDDKYKITLKYPHYFPVMKKCCIPETRRRMEMAFNTRCKEENTIILQQLLPLRTKVAKLLGYSTHADFVLEMNTAKSTSRVTAFLDDLSQKLKPLGEAEREFILNLKKKECKDRGFEYDGKINAWDLYYYMTQTEELKYSIDQEFLKEYFPIEVVTEGLLNTYQELLGLSFEQMTDAHVWNKSVTLYTVKDKATGEVLGQFYLDLYPREGKYNHAACFGLQPGCLLPDGSRMMAVAALVVNFSQPVAGRPSLLRHDEVRTYFHEFGHVMHQICAQTDFARFSGTNVETDFVEVPSQMLENWVWDVDSLRRLSKHYKDGSPIADDLLEKLVASRLVNTGLLTLRQIVLSKVDQSLHTNTSLDAASNMPNTAQKY

SEQ ID NO: 205350 - protein, 704 aa, Artificial Sequence
  derived and/or modified sequence
MIARCLLAVRSLRRVGGSRILLRMTLGREVMSPLQAMSSYTVAGRNVLRWDLSPEQIKTRTEELIVQTKQVYDAVGMLGIEEVTYENCLQALADVEVKYIVERTMLDFPQHVSSDKEVRAASTEADKRLSRFDIEMSMRGDIFERIVHLQETCDLGKIKPEARRYLEKSIKMGKRNGLHLPEQVQNEIKSMKKRMSELCIDFNKNLNEDDTFLVFSKAELGALPDDFIDSLEKTDDDKYKITLKYPHYFPVMKKCCIPETRRRMEMAFNTRCKEENTIILQQLLPLRTKVAKLLGYSTHADFVLEMNTAKSTSRVTAFLDDLSQKLKPLGEAEREFILNLKKKECKDRGFEYDGKINAWDLYYYMTQTEELKYSIDQEFLKEYFPIEVVTEGLLNTYQELLGLSFEQMTDAHVWNKSVTLYTVKDKATGEVLGQFYLDLYPREGKYNHAACFGLQPGCLLPDGSRMMAVAALVVNFSQPVAGRPSLLRHDEVRTYFHEFGHVMHQICAQTDFARFSGTNVETDFVEVPSQMLENWVWDVDSLRRLSKHYKDGSPIADDLLEKLVASRLVNTGLLTLRQIVLSKVDQSLHTNTSLDAASEYAKYCSEILGVAATPGTNMPATFGHLAGGYDGQYYGYLWSEVFSMDMFYSCFKKEGIMNPEVGMKYRNLILKPGGSLDGMDMLHNFLKREPNQKAFLMSRGLHAP

SEQ ID NO: 205351 - protein, 600 aa, Artificial Sequence
  derived and/or modified sequence
MLDFPQHVSSDKEVRAASTEADKRLSRFDIEMSMRGDIFERIVHLQETCDLGKIKPEARRYLEKSIKMGKRNGLHLPEQVQNEIKSMKKRMSELCIDFNKNLNEDDTFLVFSKAELGALPDDFIDSLEKTDDDKYKITLKYPHYFPVMKKCCIPETRRRMEMAFNTRCKEENTIILQQLLPLRTKVAKLLGYSTHADFVLEMNTAKSTSRVTAFLDDLSQKLKPLGEAEREFILNLKKKECKDRGFEYDGKINAWDLYYYMTQTEELKYSIDQEFLKEYFPIEVVTEGLLNTYQELLGLSFEQMTDAHVWNKSVTLYTVKDKATGEVLGQFYLDLYPREGKYNHAACFGLQPGCLLPDGSRMMAVAALVVNFSQPVAGRPSLLRHDEVRTYFHEFGHVMHQICAQTDFARFSGTNVETDFVEVPSQMLENWVWDVDSLRRLSKHYKDGSPIADDLLEKLVASRLVNTGLLTLRQIVLSKVDQSLHTNTSLDAASEYAKYCSEILGVAATPGTNMPATFGHLAGGYDGQYYGYLWSEVFSMDMFYSCFKKEGIMNPEVGMKYRNLILKPGGSLDGMDMLHNFLKREPNQKAFLMSRGLHAP

SEQ ID NO: 205352 - DNA, 1824 bp, Artificial Sequence
  derived and/or modified sequence
atgatcgccaggtgtttactggctgtgcgcagtctcaggagggtgggtggctctaggatcctattgagaatgacgctggggcgggaggttatgagtcctctccaggccatgtcaagctatacagtcgccggaaggaatgtactgagatgggacctttccccggaacagataaaaaccagaaccgaggaactgatcgtgcaaacgaaacaggtctatgacgcagtagggatgctggggatagaggaagtgacatatgagaattgcttacaggccctggctgacgtcgaggtgaaatacattgtagaacgcacaatgcttgactttccacaacacgtgtccagtgacaaggaggtccgtgccgcgagtaccgaagccgacaaacgcctgtctagatttgatatagaaatgtcgatgcgcggggacatcttcgaacgcatcgttcatctacaggaaacgtgtgatctcggaaaaatcaagcctgaagctagacgttacttggaaaaatccatcaaaatgggaaaacggaatggactccatttgcctgagcaagtgcagaatgagataaagtccatgaagaaacgcatgtcagaactgtgtattgacttcaataagaacttgaatgaggacgatacattcctggtgttcagtaaagctgagttaggtgccctcccagacgattttatcgacagtttagagaagaccgacgacgataagtacaagataaccttaaaatatccccactacttcccggtcatgaaaaagtgctgtattccagagactcgaagaaggatggaaatggcgttcaacactcgctgcaaggaagaaaacaccatcattctacagcagcttcttcccctccgtaccaaggtcgctaagctgctagggtactcaactcacgctgattttgtattagagatgaatacagccaagtccacatcccgcgttacggcctttttagacgatctgtctcagaaactgaagcccttgggagaagcagaacgtgagtttattttgaatctcaagaagaaagaatgcaaggataggggtttcgagtacgacggaaagatcaatgcgtgggacctttactattacatgacccagaccgaggaactgaagtactctatagaccaggaattcttaaaggagtactttccaatcgaggtcgtgacggaagggcttctcaacacttatcaagaattactggggctgagcttcgaacagatgactgacgcccacgtgtggaataaaagtgtcacactgtatacagtcaaggataaggccactggggaggtgctcggacagttctacctagacctctatccgagagaggggaaatacaatcatgctgcctgcttcgggctgcaacctggctgtctgctgcctgatggatctagaatgatggctgtggcggcacttgttgtcaacttctctcagccggtcgctggtagaccaagcttactgcgccacgacgaggtacgaacatactttcacgagttcggacacgtgatgcaccaaatttgcgcacaaactgactttgcacggttctcagggacaaatgttgaaaccgattttgtggaagtgccatctcagatgctcgagaattgggtatgggatgtagatagtctcaggcgactgtctaagcactacaaggacgggtctccaatcgctgacgatctgctggagaagctggtggcgagtcgccttgtcaacaccggactcctcacactgaggcagatcgtgctctctaaggtggatcagtcattgcacactaataccagtcttgacgccgcctccaacatgcctaatacggcgcagaagtactag

SEQ ID NO: 205353 - DNA, 2115 bp, Artificial Sequence
  derived and/or modified sequence
atgattgcgagatgtctcctcgcagtacgctctttgcgtagggtgggaggatccagaatcctgttgcgtatgactttggggcgtgaagttatgtctccactgcaggccatgtcctcatatactgtcgcagggaggaatgtcctgcgatgggatctcagccctgaacagataaagacaagaaccgaagaactaattgtccagaccaagcaagtatacgacgccgtgggtatgctgggtattgaggaggttacgtacgagaactgtctccaggctcttgctgacgttgaagtcaaatacattgttgaacgcaccatgcttgacttcccccagcacgtctcttccgataaagaggtacgggcagcgagtacagaagccgacaaacgtcttagccgctttgacatagagatgtccatgaggggtgatatctttgaacgcatcgtccacttgcaggagacctgtgacctaggtaaaatcaagccagaagctcggcgctacttagagaagtccattaaaatgggcaaaagaaacggattgcacctcccggagcaggtgcagaatgaaattaagagtatgaaaaaacgcatgtccgaactctgcatcgacttcaataagaatctgaatgaggacgacacgtttctggtgttttccaaagctgagcttggcgccttacctgatgacttcatcgacagcctggagaaaaccgatgacgacaaatacaaaatcaccctgaagtacccgcactactttccagtgatgaagaagtgttgtataccagagacccgccgccgaatggaaatggcttttaatacccggtgcaaggaggaaaacacaataattcttcagcagctgctccctctgcggacaaaggtggctaagctgctaggatattccacgcatgcggatttcgtcttggaaatgaataccgctaagtccacctcgagggtgacagcattcctcgatgaccttagccaaaagctcaaaccactaggggaggccgaacgtgagttcatactcaacttaaagaaaaaagaatgtaaggaccggggcttcgaatatgatgggaagatcaacgcatgggacctgtattactacatgacacagaccgaagagctcaaatatagtattgaccaggagttcctgaaagagtactttccaatcgaagtggtgactgagggattactgaatacctatcaagagctgctcggtctgtcattcgagcagatgaccgatgcccatgtgtggaataagagcgttacgctttacaccgtaaaagacaaggctacgggcgaggtgttggggcagttttacctcgacttgtacccacgggagggcaagtacaatcacgctgcatgttttggtctccaacccgggtgcctgctgccagacggaagcagaatgatggctgtggcagccctggtagtgaacttctctcaaccggtggctggacgcccatcccttctgagacatgacgaagttagaacctactttcacgaatttggtcatgtaatgcaccaaatctgtgcccaaaccgactttgccaggtttagtggtacaaacgtggaaaccgactttgtcgaggtgccctctcagatgttagaaaactgggtgtgggacgtcgactccctacggcggctgtccaaacattacaaggacgggagtcctatcgccgacgatctgctcgagaagctagtggccagcagacttgtcaatactggcctcctgactctgcggcagatcgtcctgtcgaaagtggaccagagtctccacactaacacttctcttgatgccgcgtcagagtacgcgaaatactgtagcgaaatcctgggagtggctgccacacctgggacaaatatgccagcaacattcggccacctagcaggcggatatgacgggcagtactatgggtatctgtggtctgaggttttctcgatggatatgttttattcgtgttttaagaaagaagggatcatgaacccagaagtcggcatgaaataccgcaatctcatactgaagccaggggggagcttggatggcatggacatgctgcacaactttctaaagcgggagccaaatcagaaagcattcctcatgagcagaggcctgcacgcaccctag

SEQ ID NO: 205354 - DNA, 1803 bp, Artificial Sequence
  derived and/or modified sequence
atgctagacttcccccagcacgtatcaagtgataaagaagtgagagccgcttctactgaggccgataagcgactttcccgattcgatatagaaatgagtatgcgcggcgatatattcgagcgaatagtgcacctacaggaaacctgtgatcttgggaaaattaaacccgaagccaggcggtatctggaaaaatccatcaaaatggggaaacggaacggcctgcacctgcctgagcaagtgcagaacgagatcaaatccatgaaaaaaagaatgtcggagctgtgtatcgatttcaacaaaaatctgaacgaagacgacacttttctcgtgttcagcaaagccgagctcggcgccctgccggacgatttcattgacagcctagagaaaacggacgacgataagtataagatcacactcaaatatccccactacttccctgttatgaaaaagtgttgtatcccagagacccgcaggcgtatggaaatggcattcaatacgcgctgcaaagaagagaacacgattatcctacagcagcttcttccactgaggactaaagtggcaaaactgctgggatattcaacacacgctgacttcgtgcttgagatgaatacagctaagtccacctcaagggtgaccgctttcctggatgatctttcgcagaaactcaagcctctcggggaagccgagagagaattcattctgaatctcaaaaaaaaggagtgcaaagacagagggtttgagtatgacgggaaaattaatgcatgggacctgtactattacatgacacaaacagaggaacttaaatattcaattgatcaggagttcctaaaggagtatttcccaatcgaggtcgtgactgagggcctcctgaacacctatcaggaacttcttgggctgagttttgaacagatgaccgatgcccacgtgtggaacaaatccgttaccctgtacacggttaaggataaagccacaggcgaagtgctgggccagttctacctggatctctatccacgagagggcaagtacaatcatgccgcgtgctttggcctgcaacccggttgtctcctgcctgatggaagccgtatgatggccgtagcagcactggttgtgaacttttcccagcctgtagccggtagaccctctctccttaggcatgacgaagtcagaacgtattttcatgaattcggccacgttatgcaccaaatctgtgctcagacagattttgcccgcttttcaggcacgaacgttgagacggattttgtggaggtcccttcacagatgctggagaactgggtctgggatgtggatagtctgcgtagactgtcgaaacactacaaggatggctcaccaattgctgatgatctgttggagaagctggtagctagtcgcctcgtgaatacaggactactgactctgcggcagatagtcctctcaaaagtcgatcaatcattgcataccaatacctccttagacgcagccagtgaatacgctaaatactgtagtgagattctcggcgtggctgcgactcctggcactaatatgcccgctacgtttggccatctggccggcggttacgatggacaatattacggctacctgtggagcgaggtctttagtatggacatgttctactcatgtttcaaaaaggagggcatcatgaatcctgaggttggaatgaaatatcgtaacttaatattgaaaccaggaggatctcttgatggtatggatatgctccacaacttcctgaaacgagaacctaatcagaaagcttttctcatgtctagagggctccacgcgccctag

SEQ ID NO: 205355 - DNA, 1824 bp, Artificial Sequence
  derived and/or modified sequence
atgattgcccgctgcctgctggccgtgcgcagcctgcggcgggtgggcggcagccgcatcctgctgaggatgaccctgggccgggaggtgatgagccccctgcaggccatgagcagctacacagtggccggcagaaatgtgctgcgctgggacctgagccctgagcagatcaagaccaggacagaggagctgattgtgcagaccaagcaggtgtatgatgctgtgggcatgctgggcatcgaggaggtgacctatgagaactgcctgcaggccctggctgatgtggaggtgaagtacatcgtggagaggaccatgctggacttcccccagcacgtgtccagtgacaaggaggtgcgggccgccagcacagaagctgacaagaggctgagcagatttgacatcgagatgtccatgagaggagacatctttgagcgcatcgtgcacctgcaggagacctgtgacctgggcaagatcaagccagaggcccggcgctacctggagaagagcatcaagatgggcaagagaaatggcctgcacctgcctgagcaggtgcagaatgagatcaagtccatgaagaagaggatgtctgagctgtgcatcgacttcaacaagaacctgaatgaagatgacaccttcctggtgttcagcaaggccgagctgggcgccctgcctgatgacttcatcgacagcctggagaagacagatgatgacaagtacaagatcaccctgaagtacccccactacttccctgtgatgaagaagtgctgcatccctgagaccaggaggaggatggagatggccttcaacacccgctgcaaggaggagaacaccatcatcctgcagcagctgctgcccctgcggaccaaggtggccaagctgctgggctacagcacccacgccgactttgtgctggagatgaacacagccaagagcaccagccgggtgacagccttcctggatgacctgagccagaagctgaagcccctgggggaggccgagcgggagttcatcctgaacctgaagaagaaggagtgcaaggaccggggctttgaatatgatggcaagatcaatgcctgggacctgtactactacatgacccagacagaggagctgaagtacagcattgaccaggagttcctgaaggagtacttccccatcgaggtggtgacagagggcctgctgaacacctaccaggagctgctgggcctgagctttgagcagatgacagatgcccacgtgtggaacaagtctgtgaccctgtacacagtgaaggacaaggccaccggggaggtgctgggccagttctacctggacctgtacccccgggagggcaagtacaaccacgccgcctgcttcggcctgcagcccggctgcctgctgcctgatggcagcaggatgatggctgtggccgccctggtggtgaacttcagccagcctgtggccggccggcccagcctgctgcggcatgatgaggtgaggacctacttccatgaatttggacatgtgatgcaccagatctgtgcccagacagactttgcccgcttcagcggcaccaacgtggagacagactttgtggaggtgcccagccagatgctggagaactgggtgtgggatgtggacagcctgcggcggctgagcaagcactacaaggatggcagccccatcgcagatgacctgctggagaagctggtggccagccggctggtgaacacaggcctgctgaccctgcggcagatcgtgctgagcaaggtggaccagagcctgcacaccaacaccagcctggatgctgccagcaacatgcccaacacagcccagaagtactag

SEQ ID NO: 205356 - DNA, 2115 bp, Artificial Sequence
  derived and/or modified sequence
atgattgcccgctgcctgctggccgtgcgcagcctgcggcgggtgggcggcagccgcatcctgctgaggatgaccctgggccgggaggtgatgagccccctgcaggccatgagcagctacacagtggccggcagaaatgtgctgcgctgggacctgagccctgagcagatcaagaccaggacagaggagctgattgtgcagaccaagcaggtgtatgatgctgtgggcatgctgggcatcgaggaggtgacctatgagaactgcctgcaggccctggctgatgtggaggtgaagtacatcgtggagaggaccatgctggacttcccccagcacgtgtccagtgacaaggaggtgcgggccgccagcacagaagctgacaagaggctgagcagatttgacatcgagatgtccatgagaggagacatctttgagcgcatcgtgcacctgcaggagacctgtgacctgggcaagatcaagccagaggcccggcgctacctggagaagagcatcaagatgggcaagagaaatggcctgcacctgcctgagcaggtgcagaatgagatcaagtccatgaagaagaggatgtctgagctgtgcatcgacttcaacaagaacctgaatgaagatgacaccttcctggtgttcagcaaggccgagctgggcgccctgcctgatgacttcatcgacagcctggagaagacagatgatgacaagtacaagatcaccctgaagtacccccactacttccctgtgatgaagaagtgctgcatccctgagaccaggaggaggatggagatggccttcaacacccgctgcaaggaggagaacaccatcatcctgcagcagctgctgcccctgcggaccaaggtggccaagctgctgggctacagcacccacgccgactttgtgctggagatgaacacagccaagagcaccagccgggtgacagccttcctggatgacctgagccagaagctgaagcccctgggggaggccgagcgggagttcatcctgaacctgaagaagaaggagtgcaaggaccggggctttgaatatgatggcaagatcaatgcctgggacctgtactactacatgacccagacagaggagctgaagtacagcattgaccaggagttcctgaaggagtacttccccatcgaggtggtgacagagggcctgctgaacacctaccaggagctgctgggcctgagctttgagcagatgacagatgcccacgtgtggaacaagtctgtgaccctgtacacagtgaaggacaaggccaccggggaggtgctgggccagttctacctggacctgtacccccgggagggcaagtacaaccacgccgcctgcttcggcctgcagcccggctgcctgctgcctgatggcagcaggatgatggctgtggccgccctggtggtgaacttcagccagcctgtggccggccggcccagcctgctgcggcatgatgaggtgaggacctacttccatgaatttggacatgtgatgcaccagatctgtgcccagacagactttgcccgcttcagcggcaccaacgtggagacagactttgtggaggtgcccagccagatgctggagaactgggtgtgggatgtggacagcctgcggcggctgagcaagcactacaaggatggcagccccatcgcagatgacctgctggagaagctggtggccagccggctggtgaacacaggcctgctgaccctgcggcagatcgtgctgagcaaggtggaccagagcctgcacaccaacaccagcctggatgctgcctctgaatatgccaagtactgcagcgagatcctgggcgtggccgccaccccaggcaccaacatgcctgccaccttcggccacctggccggcggctatgatggccagtactacggctacctgtggagcgaggtgttctccatggacatgttctacagctgcttcaagaaggagggcatcatgaaccctgaggtgggcatgaagtacagaaacctgatcctgaagccaggcggcagcctggatggcatggacatgctgcacaacttcctgaagcgggagcccaaccagaaggccttcctgatgagccggggcctgcacgccccctag

SEQ ID NO: 205357 - DNA, 1803 bp, Artificial Sequence
  derived and/or modified sequence
atgctggacttcccccagcacgtgtccagtgacaaggaggtgcgggccgccagcacagaagctgacaagaggctgagcagatttgacatcgagatgtccatgagaggagacatctttgagcgcatcgtgcacctgcaggagacctgtgacctgggcaagatcaagccagaggcccggcgctacctggagaagagcatcaagatgggcaagagaaatggcctgcacctgcctgagcaggtgcagaatgagatcaagtccatgaagaagaggatgtctgagctgtgcatcgacttcaacaagaacctgaatgaagatgacaccttcctggtgttcagcaaggccgagctgggcgccctgcctgatgacttcatcgacagcctggagaagacagatgatgacaagtacaagatcaccctgaagtacccccactacttccctgtgatgaagaagtgctgcatccctgagaccaggaggaggatggagatggccttcaacacccgctgcaaggaggagaacaccatcatcctgcagcagctgctgcccctgcggaccaaggtggccaagctgctgggctacagcacccacgccgactttgtgctggagatgaacacagccaagagcaccagccgggtgacagccttcctggatgacctgagccagaagctgaagcccctgggggaggccgagcgggagttcatcctgaacctgaagaagaaggagtgcaaggaccggggctttgaatatgatggcaagatcaatgcctgggacctgtactactacatgacccagacagaggagctgaagtacagcattgaccaggagttcctgaaggagtacttccccatcgaggtggtgacagagggcctgctgaacacctaccaggagctgctgggcctgagctttgagcagatgacagatgcccacgtgtggaacaagtctgtgaccctgtacacagtgaaggacaaggccaccggggaggtgctgggccagttctacctggacctgtacccccgggagggcaagtacaaccacgccgcctgcttcggcctgcagcccggctgcctgctgcctgatggcagcaggatgatggctgtggccgccctggtggtgaacttcagccagcctgtggccggccggcccagcctgctgcggcatgatgaggtgaggacctacttccatgaatttggacatgtgatgcaccagatctgtgcccagacagactttgcccgcttcagcggcaccaacgtggagacagactttgtggaggtgcccagccagatgctggagaactgggtgtgggatgtggacagcctgcggcggctgagcaagcactacaaggatggcagccccatcgcagatgacctgctggagaagctggtggccagccggctggtgaacacaggcctgctgaccctgcggcagatcgtgctgagcaaggtggaccagagcctgcacaccaacaccagcctggatgctgcctctgaatatgccaagtactgcagcgagatcctgggcgtggccgccaccccaggcaccaacatgcctgccaccttcggccacctggccggcggctatgatggccagtactacggctacctgtggagcgaggtgttctccatggacatgttctacagctgcttcaagaaggagggcatcatgaaccctgaggtgggcatgaagtacagaaacctgatcctgaagccaggcggcagcctggatggcatggacatgctgcacaacttcctgaagcgggagcccaaccagaaggccttcctgatgagccggggcctgcacgccccctag

SEQ ID NO: 205358 - DNA, 1824 bp, Artificial Sequence
  derived and/or modified sequence
atgatcgcccggtgcctgctggccgtgcggagcctgcggcgggtgggtgggagtcggattctgctgcgaatgactctcgggcgagaggtaatgagcccactgcaggcgatgtcctcttacactgtcgccggccgcaacgtgctgcggtgggatctctcaccggagcagattaagacacggaccgaggagcttattgtccagaccaagcaagtgtatgatgctgtcggcatgttgggaattgaggaagtaacctatgagaactgcctgcaagctctcgctgacgtcgaggtgaaatatattgtggagcggacaatgttagactttccacagcacgtctcctcggacaaagaggtaagagccgcctccaccgaggccgacaagaggcttagtagattcgacatcgaaatgagcatgaggggagacatatttgaacggatagtacatttgcaggaaacgtgcgacctgggtaagataaagcccgaggccagacggtacctcgaaaagagcattaagatgggtaagcggaacggactccatctacccgagcaggtgcagaacgaaatcaaaagtatgaagaaacgaatgagtgagctttgcatagactttaacaagaatctgaatgaggacgacaccttcctcgtttttagtaaggctgaattgggagcattgcccgatgactttatcgattctctggaaaaaaccgatgacgacaagtacaagatcaccctcaagtaccctcattactttcctgtgatgaagaaatgttgtattccagaaacccggagacgtatggagatggccttcaatacacggtgtaaagaggagaatacaatcatcttgcagcagttgctcccactgagaacaaaggttgcaaagttgcttggatattcaacccatgctgattttgtcctggagatgaataccgctaagagcacctccagagtaactgccttcctcgacgacctttcacaaaagctgaaaccactcggagaggcagagcgggagttcattttgaacctgaagaaaaaagagtgtaaggatagaggatttgaatatgacggaaagatcaacgcctgggatctctattactacatgacccagactgaggagttgaaatattctattgatcaagaattcctgaaggaatacttccctatagaggtcgtgaccgaggggctactcaacacctatcaggagctactaggtctgtcgtttgaacagatgactgatgctcacgtctggaacaaatccgttacactctatactgtaaaggacaaagccaccggagaggtgctggggcagttctatctggacctttatccccgagaggggaagtacaatcatgccgcatgtttcggtctccagcctgggtgcctccttccagacggatcacgcatgatggccgtggcagccctggtcgtgaactttagccagcctgtggcagggcggccgtcgttactccggcatgacgaagtgcgcacctattttcatgagtttgggcatgtgatgcaccagatttgtgcccagaccgacttcgcccggtttagcgggaccaacgtcgaaacggactttgtggaggtcccctctcagatgttagaaaattgggtgtgggacgtagactctctccgaagactgtctaagcactataaagatggatcccctatcgctgacgatctcctcgagaagctcgtggcatcaagattagtgaataccggcttgctgacactcagacaaattgtcctctccaaggtggatcagtcccttcacactaacacaagtctggacgctgcttctaatatgccaaacactgcacagaaatactag

SEQ ID NO: 205359 - DNA, 2115 bp, Artificial Sequence
  derived and/or modified sequence
atgatcgcccggtgcctgctggccgtgcggagcctgcggcgggtgggcggttcccgcattctcctgcgcatgacactgggcagagaagtgatgtccccactgcaagcgatgagcagctatacggtggccggccggaacgtgctccgctgggacttatcaccggaacagattaagacaaggacagaggagctgatcgtgcagacaaagcaggtgtacgacgcggtaggaatgttaggtattgaagaggttacatacgagaattgcttacaggcacttgcagatgtggaggtgaaatacatcgtagagaggacaatgctagatttcccacaacatgtgagttccgacaaagaagtgcgcgcagctagcaccgaggctgacaagcggctgtccagatttgacatcgaaatgagtatgcgaggcgacatatttgaacggatcgtacatcttcaggaaacatgtgaccttggcaaaataaaacccgaggctcggaggtacttagaaaaatccatcaaaatgggaaagagaaatggattacatctccctgaacaggtacagaacgaaatcaagagcatgaagaagcggatgagcgagctgtgcattgactttaacaaaaatttaaatgaggacgatacatttctggttttcagcaaagctgaactgggtgctctgcctgatgacttcattgacagcttggagaaaaccgacgacgataagtacaaaatcactctcaaatatccccactattttccagtgatgaagaagtgctgcataccagaaactaggcggaggatggaaatggcttttaacactcgctgcaaagaggagaacaccatcatcctacaacagctgttgccacttaggaccaaagtggctaagttgctgggatacagtacccacgcagactttgtgctggaaatgaatactgcaaagtccacttccagagtgaccgccttcctggatgacttgagtcagaaactaaagccattgggcgaagccgagcgggaattcatcctcaatttaaaaaaaaaggaatgcaaggacagggggtttgagtatgacggtaaaattaatgcctgggacctgtactattacatgactcagaccgaggagctcaagtactcaatcgatcaggagttcctcaaggaatacttcccaatcgaagttgtaacggaagggctgctaaacacataccaagagctgctgggcctgtcgtttgaacagatgacggatgcccacgtatggaacaagtctgtcactttgtatactgtaaaggacaaggcaactggcgaagtcctaggacaattttatctggacttgtatcccagggaaggtaagtacaatcatgctgcatgcttcggtctccagccaggatgcctgttgccagacggcagtcgtatgatggcggtcgccgcattagtggtgaacttttcccagccggtggcagggaggccctccttgctgagacatgatgaggtgaggacctacttccatgaatttggccatgttatgcaccagatttgcgcccagaccgacttcgcaaggttctctggtacaaatgttgaaaccgacttcgtggaagtcccatcacagatgctggagaactgggtatgggacgtggacagcctgcgcagactctcgaaacactacaaggatggatcacccatagcagatgacctgcttgagaagctggtggctagtaggctcgtgaatacaggcctcctaactctgcgtcagatagtcctgtccaaagtagatcaatctctccatacaaatacctcactcgacgcagcgagcgaatacgctaagtattgcagtgaaatccttggcgtggcggctacacctgggaccaatatgcctgcgaccttcggtcacctggccggtggctatgatggacagtactacggctacctgtggagcgaggtctttagtatggacatgttctatagctgtttcaaaaaggaagggattatgaaccccgaggttggcatgaagtaccggaacctcatcctaaagccaggtggcagtttggatggcatggacatgctgcataatttcctgaagcgagagcccaaccagaaggccttcctgatgtcaagaggcctgcatgctccatag

SEQ ID NO: 205360 - DNA, 1803 bp, Artificial Sequence
  derived and/or modified sequence
atgctggacttcccccagcacgtgagcagcgacaaggaggtgcgggccgcctccacagaagcggacaagagactctcgaggttcgacatcgaaatgagcatgcgcggagacatttttgaacgtatcgttcacttgcaggagacttgcgatctaggcaaaatcaaaccagaggctcggaggtacctcgagaagtcaattaagatggggaagcgtaacggcctgcatctgcccgagcaagttcagaacgaaatcaagtccatgaaaaaacgcatgtcagaactatgtatcgatttcaataagaacctcaacgaggacgacacatttctggtctttagtaaagccgagctgggagccttaccagacgacttcatcgacagtctggagaagacagatgatgacaagtataaaattacacttaaataccctcattacttccccgtgatgaaaaagtgctgtattcccgaaacacgacggcgcatggaaatggctttcaacacaaggtgcaaggaagaaaatactataattttacagcagcttctgccccttcgcactaaggtggctaaactccttggctattcaacacacgccgacttcgttcttgaaatgaatactgccaagagcacttctcgagtgactgctttccttgacgacttgtcacagaagctgaaacccctgggagaggctgagagagagtttattctgaatctgaaaaaaaaagagtgtaaagatagaggatttgagtacgatggcaaaatcaacgcctgggatctttattattatatgacccagacagaggagctcaagtactctatcgatcaagaatttctaaaagaatatttccccattgaggttgtcaccgaagggctgttaaacacatatcaggagttgctaggactgtcatttgagcagatgacggatgctcatgtgtggaataagagtgtgacgctctataccgtgaaggacaaggccacaggggaggtcctcggccagttttatctggacctgtacccaagggagggaaagtataatcacgctgcgtgtttcggtctgcagcctggatgtttgttgcccgatggttcacgcatgatggcagtggcggcactcgtagtcaattttagccaaccggtggccgggcgtccgagtctccttcgccatgatgaagtaagaacctatttccatgagttcggacatgtgatgcatcaaatctgtgcccagacggacttcgcaaggttctcaggcacaaatgtggaaactgatttcgtagaagtgcctagccaaatgctggagaattgggtttgggatgtcgattcactcagaaggctaagcaaacactataaagatggatctccaattgctgatgatctcctggaaaaactcgttgcttcaagactagtgaacactggtttgcttaccctgagacagatcgtattatccaaagttgatcagtccctccatactaacaccagcttggacgcagccagtgagtacgcgaagtattgctccgaaatcctcggggtggcagccacacccggcaccaacatgccagcaacattcggtcatctcgccggcgggtatgatggccagtactatggatacctgtggagcgaggttttcagtatggacatgttttattcctgttttaaaaaggaaggtatcatgaaccctgaagtgggtatgaagtacaggaacctaatcctgaaaccgggcggaagtctggatggcatggatatgctccacaactttctgaagcgggaaccaaaccagaaggcgttcctcatgtccaggggcctccatgccccatag

SEQ ID NO: 205361 - DNA, 2661 bp, Artificial Sequence
  derived and/or modified sequence
agccactgtggcctctgcggctaggccggctcgagactcccgggcgcccaggcgctgccgcccgcctcgccgccccacgccgaaggaccacgcgcccgccgccgccagcctctcagcgctcccatgatcgcccggtgccttttggctgtgcgaagcctccgcagagttggtggttccaggattttactcagaatgacgttaggaagagaagtgatgtctcctcttcaggcaatgtcttcctatactgtggctggcagaaatgttttaagatgggatctttcaccagagcaaattaaaacaagaactgaggagctcattgtgcagaccaaacaggtgtacgatgctgttggaatgctcggtattgaggaagtaacttacgagaactgtctgcaggcactggcagatgtagaagtaaagtatatagtggaaaggaccatgctagactttccccagcatgtatcctctgacaaagaagtacgagcagcaagtacagaagcagacaaaagactttctcgttttgatattgagatgagcatgagaggagatatatttgagagaattgttcatttacaggaaacctgtgatctggggaagataaaacctgaggccagacgatacttggaaaagtcaattaaaatggggaaaagaaatgggctccatcttcctgaacaagtacagaatgaaatcaaatcaatgaagaaaagaatgagtgagctatgtattgattttaacaaaaacctcaatgaggatgataccttccttgtattttccaaggctgaacttggtgctcttcctgatgatttcattgacagtttagaaaagacagatgatgacaagtataaaattaccttaaaatatccacactatttccctgtcatgaagaaatgttgtatccctgaaaccagaagaaggatggaaatggcttttaatacaaggtgcaaagaggaaaacaccataattttgcagcagctactcccactgcgaaccaaggtggccaaactactcggttatagcacacatgctgacttcgtccttgaaatgaacactgcaaagagcacaagccgcgtaacagcctttctagatgatttaagccagaagttaaaacccttgggtgaagcagaacgagagtttattttgaatttgaagaaaaaggaatgcaaagacaggggttttgaatatgatgggaaaatcaatgcctgggatctatattactacatgactcagacagaggaactcaagtattccatagaccaagagttcctcaaggaatacttcccaattgaggtggtcactgaaggcttgctgaacacctaccaggagttgttgggactttcatttgaacaaatgacagatgctcatgtttggaacaagagtgttacactttatactgtgaaggataaagctacaggagaagtattgggacagttctatttggacctctatccaagggaaggaaaatacaatcatgcggcctgcttcggtctccagcctggctgccttctgcctgatggaagccggatgatggcagtggctgccctcgtggtgaacttctcacagccagtggcaggtcgtccctctctcctgagacacgacgaggtgaggacttactttcatgagtttggtcacgtgatgcatcagatttgtgcacagactgattttgcacgatttagcggaacaaatgtggaaactgactttgtagaggtgccatcgcaaatgcttgaaaattgggtgtgggacgtcgattccctccgaagattgtcaaaacattataaagatggaagccctattgcagacgatctgcttgaaaaacttgttgcttctaggctggtcaacacaggtcttctgaccctgcgccagattgttttgagcaaagttgatcagtctcttcataccaacacatcgctggatgctgcaagtaatatgccaaatactgctcagaaatattaggagttgcagctactccaggcacaaatatgccagctacctttggacatttggcagggggatacgatggccaatattatggatatctttggagtgaagtattttccatggatatgttttacagctgttttaaaaaagaagggataatgaatccagaggttggaatgaaatacagaaacctaatcctgaaacctgggggatctctggacggcatggacatgctccacaatttcttgaaacgtgagccaaaccaaaaagcgttcctaatgagtagaggcctgcatgctccgtgaactggggatctttggtagccgtccatgtctggaggacaagtcgacatcaccatgtgttactggcctggaaactgaagggagttttgcaagtgaaaatttagatttctattgacatccttttgttttctaattttaaaaattataaagatgtaaatggaattataaatactgtgacctaagaaaagacccactagaaagtaattgtactataaaatttcataaaactggatttgatttctttttatgaaagtttcatatgaatgtaacttgattttttactattataatctagataatatgatataagagggctaagaatttttaaattgaatcatatatatgatataatttgatccttcttgtatcttgaagttttgtacttgggatttctggactgataaatgaatcatcacattcttctggt

SEQ ID NO: 205362 - DNA, 8661 bp, Artificial Sequence
  derived and/or modified sequence
ggggctggtaggcgccggcgtggagctgccgcacgtgggagggcgctggccaggcagccactgtggcctctgcggctaggccggctcgagactcccgggcgcccaggcgctgccgcccgcctcgccgccccacgccgaaggaccacgcgcccgccgccgccagcctctcagcgctcccatgatcgcccggtgccttttggctgtgcgaagcctccgcagagttggtggttccaggattttactcagaatgacgttaggaagagaagtgatgtctcctcttcaggcaatgtcttcctatactgtggctggcagaaatgttttaagatgggatctttcaccagagcaaattaaaacaagaactgaggagctcattgtgcagaccaaacaggtgtacgatgctgttggaatgctcggtattgaggaagtaacttacgagaactgtctgcaggcactggcagatgtagaagtaaagtatatagtggaaaggaccatgctagactttccccagcatgtatcctctgacaaagaagtacgagcagcaagtacagaagcagacaaaagactttctcgttttgatattgagatgagcatgagaggagatatatttgagagaattgttcatttacaggaaacctgtgatctggggaagataaaacctgaggccagacgatacttggaaaagtcaattaaaatggggaaaagaaatgggctccatcttcctgaacaagtacagaatgaaatcaaatcaatgaagaaaagaatgagtgagctatgtattgattttaacaaaaacctcaatgaggatgataccttccttgtattttccaaggctgaacttggtgctcttcctgatgatttcattgacagtttagaaaagacagatgatgacaagtataaaattaccttaaaatatccacactatttccctgtcatgaagaaatgttgtatccctgaaaccagaagaaggatggaaatggcttttaatacaaggtgcaaagaggaaaacaccataattttgcagcagctactcccactgcgaaccaaggtggccaaactactcggttatagcacacatgctgacttcgtccttgaaatgaacactgcaaagagcacaagccgcgtaacagcctttctagatgatttaagccagaagttaaaacccttgggtgaagcagaacgagagtttattttgaatttgaagaaaaaggaatgcaaagacaggggttttgaatatgatgggaaaatcaatgcctgggatctatattactacatgactcagacagaggaactcaagtattccatagaccaagagttcctcaaggaatacttcccaattgaggtggtcactgaaggcttgctgaacacctaccaggagttgttgggactttcatttgaacaaatgacagatgctcatgtttggaacaagagtgttacactttatactgtgaaggataaagctacaggagaagtattgggacagttctatttggacctctatccaagggaaggaaaatacaatcatgcggcctgcttcggtctccagcctggctgccttctgcctgatggaagccggatgatggcagtggctgccctcgtggtgaacttctcacagccagtggcaggtcgtccctctctcctgagacacgacgaggtgaggacttactttcatgagtttggtcacgtgatgcatcagatttgtgcacagactgattttgcacgatttagcggaacaaatgtggaaactgactttgtagaggtgccatcgcaaatgcttgaaaattgggtgtgggacgtcgattccctccgaagattgtcaaaacattataaagatggaagccctattgcagacgatctgcttgaaaaacttgttgcttctaggctggtcaacacaggtcttctgaccctgcgccagattgttttgagcaaagttgatcagtctcttcataccaacacatcgctggatgctgcaagtgaatatgccaaatactgctcagaaatattaggagttgcagctactccaggcacaaatatgccagctacctttggacatttggcagggggatacgatggccaatattatggatatctttggagtgaagtattttccatggatatgttttacagctgttttaaaaaagaagggataatgaatccagaggttggaatgaaatacagaaacctaatcctgaaacctgggggatctctggacggcatggacatgctccacaatttcttgaaacgtgagccaaaccaaaaagcgttcctaatgagtagaggcctgcatgctccgtgaactggggatctttggtagccgtccatgtctggaggacaagtcgacatcaccatgtgttactggcctggaaactgaagggagttttgcaagtgaaaatttagatttctattgacatccttttgttttctaattttaaaaattataaagatgtaaatggaattataaatactgtgacctaagaaaagacccactagaaagtaattgtactataaaatttcataaaactggatttgatttctttttatgaaagtttcatatgaatgtaacttgattttttactattataatctagataatatgatataagagggctaagaatttttaaattgaatcatatatatgatataatttgatccttcttgtatcttgaagttttgtacttgggatttctggactgataaatgaatcatcacattcttctggtaaatattttcttggagctctgtgtcaactttgatcctttgtctcccaggaaggtgtgacctctcctttgcctgcatacctcaaggccaggggaatatgcctcagtgatgcatttatctttgtatatcaggccgcatgattcccaactttctgccacacttaaattacgttcctccatttcagttttgtcttttctgtctaaagttcagtcaaagagtatcaaaaaattatgtttcagctagactggtgtaatgtataagtttttgtatcttgtattagaggatttcgtagcttttattagaggctcatttccacctcagcatacaagatcgttagtcttttggcatgtgtgccaattagaatactaaagcaagtccaagcacatttttctcttctcacgtttctaataagtgttagggactttgcctcttttacttaccacgtccccaaaagtgtcaggtagacatgtcacaaatggctctgtagagagccatgggaagagagaggaggtggatgtggaacataaagggttcagaaactccagaagaggagtgggttttggatagaagcatttgaggacagctgctccaaagccttatgtgtatgatgaaacttaaccacggggaagagactcttcagtagcctgttctgtctggtgatttttattttaagtgaacctttggatctatctttaactctctttattgtgagtctaaattccaattctgcagcagatcagtaaactcacagtatttttcctgtggaaatctattcaataaggaaaccaagacaggataataaaatttaaaaaaaaaacaactttgaattcccctgcctaggtcttccagttgttttccagcgcatacctcaggtatgactttgctagccggggacaaaattagcaccttccgattctctagtccaaatgaactttgtgctaaataaaaaattattatactacataataaagttacagatagcaggaaatgcaagagctaggagattcctagattatatctgccaagcaaataccttaaacatccacctgaaatcctactaccccctcttctgagataatttgcccagcccttctcttcccacacactcactcaatgtcacccccttctaatccccaaaactgtttttgtggtctttgtagcctatagtagttttctcacatctttccccctagacttttctgtttttcagtttcagacaaaaaaactcttcagctttttccagtgtgtctccttaacagtaactttaccacttgaaatcttatttcatagaaaaactaaattggtgtggaaaggctgcacacaataaagttatattattatccatgaaaatgaactcatatttctttcatactttaacgttaaaaccgaaatgcatgagagcaaaagcaccatggtgttctttctatttagggcctacctctaatatttaaaatctaccaaagagcagtcacaaaattaaaactcagcccgggcgcagtggctcatgcctgtaatcccagcactttgggaggccaaggcaggaggatcacctgaggtcagagttcaagaccagcatggtcaacatggtgaaaccctgtctctacaaaaatacaaaaagctgggcatgatgttgggttcctgtagtcccagctacttaggaggctgaggcaggagaatagcttgaacccgggaggtggaggttgcagtgagctgagatcatgccattgcactccagcctggacgacagagtgagattcagtctcaaaaaaaattaatactcaaagaattatctagcataatttaaaagaaaggactttttaaaaattctctagcataattcaaaagaaaggacttaacttttttttttttagtgtggtcatccgtctagttgttctttttttccagatcagagcagagaatatcactgacatgcttgaaatggtggataactatgtaaattgtaattggacaaatgtacactttagatttatggactgagccacatataataaggtctctcctggtaattgatccaggggatttaggcctctttcgggttttttgttttttttttaggcattgttatgttgtgaaggataaaatcttcaacatcttatgcaaatggatagtaggcatgatcctaaaggtttagttttacgatgctgcagagaagagaaatgtcttgacgttttgccacctgatgtagactttgtccccctctagtataaatgttgcatgttacctagataaacaactaaaaattgccttgagttatcacctgagctacttatgccaaggtcttgcctttctaaagctaataaggtgagaggtggatatctgtagctcttcggatgaaaaattgcattgtgggagataccaaaattgaggaaatagctcttcaaagaaaaattactgatatgatcattgtacttgtaaatgccttaagtagcaggcagtgactcaattttctactttaccattttacctttagcttttatgtatgaattataggtctgtggagattctgcctccccactaggccagtgtgtgtttaccatttattcattttctatcatacacaggtggattaaaatttacattaaaatttacattaaaataccatcatacttcaggcttctataacaaaatatcagactgggtggcttcaaaagcagacatttcttacagttctggaagctgggaagtcccacaatccacatgctggtaaatttggttcgtggtgaggcccctcttcctcttttactgaccacatccccaaaagtgtcaggtagacatgttacaaatagctctgtagagagccatgggaagagacaggaggcagatgtggaacataaagggtttagaaacttctgcaggcagcagtggcagggagcaagccctagagtgtctctttttacgagagcaggaatcccatcatgagagttccttcctcatgactttatctaaacccagtcacccccaacaaaggccccaccccctaaccccatcacattggctgttacggcttcaatgtaggggatggggcacaaacattcagtccataacgaatactgattcctcaaatagggtttaaacatagttaactgagcccccaaagaatgttaaaagagaaaatccattttatttgaatagatgcagtgaccacagcttcttccctcaaatcaacacattacagttagatgtctcccatctgaaattggatagcccactgaaattgaacatgccttctcttataaatgtgtggtgagaataaaagcaacaaagaaatgaatgtggtggctcacacctgtaatcctaacactttggaaggttgaggcaggaggatcctttgtgctcaagagtttgagaccagcctgagcaacacagtgagaccctgtctctacaaaaactaaaaaaattagctagggatggtggcacatgcctgtagtcccagctacttgggaggctgaggtgggaggattgcttgagcccaagaaggtcaaggctgccatgagccataatcacgccactgcactccagcctgggtgacagagaccctgtcttaaaataaaataaaaaaaaaaggaaaaggaaagacatacataccctcagttcttcgaaaaacagtcaacgtccaaaaagtttattttttgagtcacctttaatagagaaatttcccactggaaacagatccacctaagtgattatctagtatcagctgtatcaaggcaaaaggtaaaggttataagatgtaaatattagaccaaaatagccttttttaacaaacacaataatgctgtacgtctgtaacaaaacaaaatttgaaaaattgaggtaatgtacacagcgatgcacacacccccacaccacaccgtgattcctgagttttgatttggttgaattcaccttgtagttccctttcctgagaaaatacaggttcaacacatctagtccacgatgtacgtacaaggggaaggggtgaacaggaaatagactcccttattctgctcacatgagctggaacctgtactagctgcatatttcatagaccccagaggctcacctcaattgtactcctatgataaaatgtctctagcatttgtcatgagagaaactggctagaaatagtttgttcattgcgtccagcaagacacgcattgctgttgatatctttgtggctaagatggagaatgtgactggataatagttatccaggtggattactagctattgaaacagtctgagatagttgcatgatgattaacgttaaactgggagtaatttcaagtcatttggctaaaaatgaaaaaaaagtcccataaaaaggtatcaaatgtacagataatagggctggaattattaagtatgatgatgttattaacatctaaaattattttggccgggcaaggtgggtcacgcctgtaatctcagcactttgggatgccaagatgggtggatcacctgagttcaggagttcaagaccagcttggccaacatggcgaaacccgtctctactaaagaatacaaaaattagccaggtgttgtggcacatgcctgtactcccagctactcaggaggctgaggcagaagaatcatttgaaccccggaggtggaggttgcagtgagccgacattgtgccgcttcattccagcctgggcaacagagtgaaactcttgtctcaaaagtaaaaaaataataatgtttaaaaatatttcaatgtggagacaagctcaaaatgaaattagacacattccattacccaggtaaaagaaggggaagcctgacttgatagtagtattcaggaaaaaagagttggcagttttatttggccaaattccaatatcagctcatggtacagcacaccgggggagggggacgggaggcgagaactaaggctttttaagaatgtgttgatggaagtatgtgcctagatcaaaagaataatccccccggactccagtgtaagatcaattactgttggaatattgtgttcctttctagatatcacattttaagcagactttggccaagtagtacagtgtttgcaggagcagtaacaagatggtgataactttgaaaatacttctcaaaagaaaaataaaaaagaattagggaagttcagtctggagataattcagaaatacagatgataattgttttcaaattcttgaaggaaatgggagagagaataggctaattctgtattgcttcagaaaccaaatggaaacaattaaattccattagagaaacggttggaaaatatgaggaggatttagttcagtacgaggaagctgtttctaatactttttgttggttaaaaatacattccgctgctgtggaaagcctgtagctgccaggagtgttacagagggcattcctcccttgagttgacatttgtgccaaaccggcttttagggcttctccagcttttaagatgcgataatgataagatgatcatcgggaaaacatccctcagatgaaacgttcacaggctggctctgaaaactggcattcagatgattgcggctcccccatactgtaggaatattgtttatggcttaaggttgcctcgctcctcatctgtaatcagtgaaagtttatccagaggttaattaccggttttctggtgggtatctgggaactgaggatgggagattaactgttgtatatgaccatagtaaagcaaaagactgttagagaatgagtaaacgttcgttttcctccctacagaatttacagttactctctgtccattccactcactactgtcttcatcacacacacagaggcaaacgtctgattcagatagccaggtgtgccatgcatgcactccaccatattgtgatctcttcgaggcttgtttctgtcccctgtcctccacagtcctggattgttaatgaatagttcatacatgtttgttaaataaatataccttctttaaaatta

SEQ ID NO: 205363 - DNA, 8354 bp, Artificial Sequence
  derived and/or modified sequence
ggccaggcagccactgtggcctctgcggctaggccggctcgagactcccgggcgcccaggcgctgccgcccgcctcgccgccccacgccgaaggaccacgcgcccgccgccgccagcctctcagcgctcccatgatcgcccggtgccttttggctgtgcgaagcctccgcagtggaaaggaccatgctagactttccccagcatgtatcctctgacaaagaagtacgagcagcaagtacagaagcagacaaaagactttctcgttttgatattgagatgagcatgagaggagatatatttgagagaattgttcatttacaggaaacctgtgatctggggaagataaaacctgaggccagacgatacttggaaaagtcaattaaaatggggaaaagaaatgggctccatcttcctgaacaagtacagaatgaaatcaaatcaatgaagaaaagaatgagtgagctatgtattgattttaacaaaaacctcaatgaggatgataccttccttgtattttccaaggctgaacttggtgctcttcctgatgatttcattgacagtttagaaaagacagatgatgacaagtataaaattaccttaaaatatccacactatttccctgtcatgaagaaatgttgtatccctgaaaccagaagaaggatggaaatggcttttaatacaaggtgcaaagaggaaaacaccataattttgcagcagctactcccactgcgaaccaaggtggccaaactactcggttatagcacacatgctgacttcgtccttgaaatgaacactgcaaagagcacaagccgcgtaacagcctttctagatgatttaagccagaagttaaaacccttgggtgaagcagaacgagagtttattttgaatttgaagaaaaaggaatgcaaagacaggggttttgaatatgatgggaaaatcaatgcctgggatctatattactacatgactcagacagaggaactcaagtattccatagaccaagagttcctcaaggaatacttcccaattgaggtggtcactgaaggcttgctgaacacctaccaggagttgttgggactttcatttgaacaaatgacagatgctcatgtttggaacaagagtgttacactttatactgtgaaggataaagctacaggagaagtattgggacagttctatttggacctctatccaagggaaggaaaatacaatcatgcggcctgcttcggtctccagcctggctgccttctgcctgatggaagccggatgatggcagtggctgccctcgtggtgaacttctcacagccagtggcaggtcgtccctctctcctgagacacgacgaggtgaggacttactttcatgagtttggtcacgtgatgcatcagatttgtgcacagactgattttgcacgatttagcggaacaaatgtggaaactgactttgtagaggtgccatcgcaaatgcttgaaaattgggtgtgggacgtcgattccctccgaagattgtcaaaacattataaagatggaagccctattgcagacgatctgcttgaaaaacttgttgcttctaggctggtcaacacaggtcttctgaccctgcgccagattgttttgagcaaagttgatcagtctcttcataccaacacatcgctggatgctgcaagtgaatatgccaaatactgctcagaaatattaggagttgcagctactccaggcacaaatatgccagctacctttggacatttggcagggggatacgatggccaatattatggatatctttggagtgaagtattttccatggatatgttttacagctgttttaaaaaagaagggataatgaatccagaggttggaatgaaatacagaaacctaatcctgaaacctgggggatctctggacggcatggacatgctccacaatttcttgaaacgtgagccaaaccaaaaagcgttcctaatgagtagaggcctgcatgctccgtgaactggggatctttggtagccgtccatgtctggaggacaagtcgacatcaccatgtgttactggcctggaaactgaagggagttttgcaagtgaaaatttagatttctattgacatccttttgttttctaattttaaaaattataaagatgtaaatggaattataaatactgtgacctaagaaaagacccactagaaagtaattgtactataaaatttcataaaactggatttgatttctttttatgaaagtttcatatgaatgtaacttgattttttactattataatctagataatatgatataagagggctaagaatttttaaattgaatcatatatatgatataatttgatccttcttgtatcttgaagttttgtacttgggatttctggactgataaatgaatcatcacattcttctggtaaatattttcttggagctctgtgtcaactttgatcctttgtctcccaggaaggtgtgacctctcctttgcctgcatacctcaaggccaggggaatatgcctcagtgatgcatttatctttgtatatcaggccgcatgattcccaactttctgccacacttaaattacgttcctccatttcagttttgtcttttctgtctaaagttcagtcaaagagtatcaaaaaattatgtttcagctagactggtgtaatgtataagtttttgtatcttgtattagaggatttcgtagcttttattagaggctcatttccacctcagcatacaagatcgttagtcttttggcatgtgtgccaattagaatactaaagcaagtccaagcacatttttctcttctcacgtttctaataagtgttagggactttgcctcttttacttaccacgtccccaaaagtgtcaggtagacatgtcacaaatggctctgtagagagccatgggaagagagaggaggtggatgtggaacataaagggttcagaaactccagaagaggagtgggttttggatagaagcatttgaggacagctgctccaaagccttatgtgtatgatgaaacttaaccacggggaagagactcttcagtagcctgttctgtctggtgatttttattttaagtgaacctttggatctatctttaactctctttattgtgagtctaaattccaattctgcagcagatcagtaaactcacagtatttttcctgtggaaatctattcaataaggaaaccaagacaggataataaaatttaaaaaaaaaacaactttgaattcccctgcctaggtcttccagttgttttccagcgcatacctcaggtatgactttgctagccggggacaaaattagcaccttccgattctctagtccaaatgaactttgtgctaaataaaaaattattatactacataataaagttacagatagcaggaaatgcaagagctaggagattcctagattatatctgccaagcaaataccttaaacatccacctgaaatcctactaccccctcttctgagataatttgcccagcccttctcttcccacacactcactcaatgtcacccccttctaatccccaaaactgtttttgtggtctttgtagcctatagtagttttctcacatctttccccctagacttttctgtttttcagtttcagacaaaaaaactcttcagctttttccagtgtgtctccttaacagtaactttaccacttgaaatcttatttcatagaaaaactaaattggtgtggaaaggctgcacacaataaagttatattattatccatgaaaatgaactcatatttctttcatactttaacgttaaaaccgaaatgcatgagagcaaaagcaccatggtgttctttctatttagggcctacctctaatatttaaaatctaccaaagagcagtcacaaaattaaaactcagcccgggcgcagtggctcatgcctgtaatcccagcactttgggaggccaaggcaggaggatcacctgaggtcagagttcaagaccagcatggtcaacatggtgaaaccctgtctctacaaaaatacaaaaagctgggcatgatgttgggttcctgtagtcccagctacttaggaggctgaggcaggagaatagcttgaacccgggaggtggaggttgcagtgagctgagatcatgccattgcactccagcctggacgacagagtgagattcagtctcaaaaaaaattaatactcaaagaattatctagcataatttaaaagaaaggactttttaaaaattctctagcataattcaaaagaaaggacttaacttttttttttttagtgtggtcatccgtctagttgttctttttttccagatcagagcagagaatatcactgacatgcttgaaatggtggataactatgtaaattgtaattggacaaatgtacactttagatttatggactgagccacatataataaggtctctcctggtaattgatccaggggatttaggcctctttcgggttttttgttttttttttaggcattgttatgttgtgaaggataaaatcttcaacatcttatgcaaatggatagtaggcatgatcctaaaggtttagttttacgatgctgcagagaagagaaatgtcttgacgttttgccacctgatgtagactttgtccccctctagtataaatgttgcatgttacctagataaacaactaaaaattgccttgagttatcacctgagctacttatgccaaggtcttgcctttctaaagctaataaggtgagaggtggatatctgtagctcttcggatgaaaaattgcattgtgggagataccaaaattgaggaaatagctcttcaaagaaaaattactgatatgatcattgtacttgtaaatgccttaagtagcaggcagtgactcaattttctactttaccattttacctttagcttttatgtatgaattataggtctgtggagattctgcctccccactaggccagtgtgtgtttaccatttattcattttctatcatacacaggtggattaaaatttacattaaaatttacattaaaataccatcatacttcaggcttctataacaaaatatcagactgggtggcttcaaaagcagacatttcttacagttctggaagctgggaagtcccacaatccacatgctggtaaatttggttcgtggtgaggcccctcttcctcttttactgaccacatccccaaaagtgtcaggtagacatgttacaaatagctctgtagagagccatgggaagagacaggaggcagatgtggaacataaagggtttagaaacttctgcaggcagcagtggcagggagcaagccctagagtgtctctttttacgagagcaggaatcccatcatgagagttccttcctcatgactttatctaaacccagtcacccccaacaaaggccccaccccctaaccccatcacattggctgttacggcttcaatgtaggggatggggcacaaacattcagtccataacgaatactgattcctcaaatagggtttaaacatagttaactgagcccccaaagaatgttaaaagagaaaatccattttatttgaatagatgcagtgaccacagcttcttccctcaaatcaacacattacagttagatgtctcccatctgaaattggatagcccactgaaattgaacatgccttctcttataaatgtgtggtgagaataaaagcaacaaagaaatgaatgtggtggctcacacctgtaatcctaacactttggaaggttgaggcaggaggatcctttgtgctcaagagtttgagaccagcctgagcaacacagtgagaccctgtctctacaaaaactaaaaaaattagctagggatggtggcacatgcctgtagtcccagctacttgggaggctgaggtgggaggattgcttgagcccaagaaggtcaaggctgccatgagccataatcacgccactgcactccagcctgggtgacagagaccctgtcttaaaataaaataaaaaaaaaaggaaaaggaaagacatacataccctcagttcttcgaaaaacagtcaacgtccaaaaagtttattttttgagtcacctttaatagagaaatttcccactggaaacagatccacctaagtgattatctagtatcagctgtatcaaggcaaaaggtaaaggttataagatgtaaatattagaccaaaatagccttttttaacaaacacaataatgctgtacgtctgtaacaaaacaaaatttgaaaaattgaggtaatgtacacagcgatgcacacacccccacaccacaccgtgattcctgagttttgatttggttgaattcaccttgtagttccctttcctgagaaaatacaggttcaacacatctagtccacgatgtacgtacaaggggaaggggtgaacaggaaatagactcccttattctgctcacatgagctggaacctgtactagctgcatatttcatagaccccagaggctcacctcaattgtactcctatgataaaatgtctctagcatttgtcatgagagaaactggctagaaatagtttgttcattgcgtccagcaagacacgcattgctgttgatatctttgtggctaagatggagaatgtgactggataatagttatccaggtggattactagctattgaaacagtctgagatagttgcatgatgattaacgttaaactgggagtaatttcaagtcatttggctaaaaatgaaaaaaaagtcccataaaaaggtatcaaatgtacagataatagggctggaattattaagtatgatgatgttattaacatctaaaattattttggccgggcaaggtgggtcacgcctgtaatctcagcactttgggatgccaagatgggtggatcacctgagttcaggagttcaagaccagcttggccaacatggcgaaacccgtctctactaaagaatacaaaaattagccaggtgttgtggcacatgcctgtactcccagctactcaggaggctgaggcagaagaatcatttgaaccccggaggtggaggttgcagtgagccgacattgtgccgcttcattccagcctgggcaacagagtgaaactcttgtctcaaaagtaaaaaaataataatgtttaaaaatatttcaatgtggagacaagctcaaaatgaaattagacacattccattacccaggtaaaagaaggggaagcctgacttgatagtagtattcaggaaaaaagagttggcagttttatttggccaaattccaatatcagctcatggtacagcacaccgggggagggggacgggaggcgagaactaaggctttttaagaatgtgttgatggaagtatgtgcctagatcaaaagaataatccccccggactccagtgtaagatcaattactgttggaatattgtgttcctttctagatatcacattttaagcagactttggccaagtagtacagtgtttgcaggagcagtaacaagatggtgataactttgaaaatacttctcaaaagaaaaataaaaaagaattagggaagttcagtctggagataattcagaaatacagatgataattgttttcaaattcttgaaggaaatgggagagagaataggctaattctgtattgcttcagaaaccaaatggaaacaattaaattccattagagaaacggttggaaaatatgaggaggatttagttcagtacgaggaagctgtttctaatactttttgttggttaaaaatacattccgctgctgtggaaagcctgtagctgccaggagtgttacagagggcattcctcccttgagttgacatttgtgccaaaccggcttttagggcttctccagcttttaagatgcgataatgataagatgatcatcgggaaaacatccctcagatgaaacgttcacaggctggctctgaaaactggcattcagatgattgcggctcccccatactgtaggaatattgtttatggcttaaggttgcctcgctcctcatctgtaatcagtgaaagtttatccagaggttaattaccggttttctggtgggtatctgggaactgaggatgggagattaactgttgtatatgaccatagtaaagcaaaagactgttagagaatgagtaaacgttcgttttcctccctacagaatttacagttactctctgtccattccactcactactgtcttcatcacacacacagaggcaaacgtctgattcagatagccaggtgtgccatgcatgcactccaccatattgtgatctcttcgaggcttgtttctgtcccctgtcctccacagtcctggattgttaatgaatagttcatacatgtttgttaaataaatataccttctttaaaatta

SEQ ID NO: 205364 - DNA, 1824 bp, Artificial Sequence
  derived and/or modified sequence
atgatcgcaaggtgcttgttggcggttaggtctctgaggagggtcggcggtagcagaatattgcttagaatgacccttggacgggaggtgatgagcccactgcaggccatgtcaagctatacagttgccggacgaaatgtcctcagatgggacttgtctccagaacagatcaagacccgcacagaagaacttatcgtgcagacaaaacaagtgtatgacgccgtcggtatgctggggatcgaagaagtgacatatgagaactgtctgcaggcactggctgatgtggaagtcaagtatattgtcgagagaactatgttggattttccccaacacgtttctagtgacaaggaagtcagggctgcctctactgaggctgacaaaaggctgtctcggtttgacatcgagatgtctatgcgcggagacatcttcgagagaatcgttcatctacaggaaacatgtgatttgggcaagataaaaccagaagccaggcgatatctagagaagagtatcaaaatgggaaaacgaaatggacttcatctcccggagcaagtacagaacgaaatcaaatcaatgaagaagcgaatgtcggaactgtgcattgactttaacaaaaatctgaacgaggatgacaccttcttggtgttttctaaagccgagctaggggcactgccggacgacttcatcgacagcctggaaaagacggacgacgacaagtacaagataaccctcaaatatccccactacttccctgtgatgaagaagtgttgcattccggaaacaaggaggcggatggagatggccttcaacacaaggtgtaaggaggaaaacacgatcattcttcaacagctcttaccgctgcggacgaaggtcgccaaacttcttggatacagtacccatgcggactttgtcctggagatgaatactgccaagagcacgagcagagttaccgcgtttctcgatgacttaagtcagaagctcaagcccctcggggaagccgagcgggaattcattctgaacctgaagaagaaagagtgtaaggatcgcggattcgaatacgatggaaagattaacgcatgggatctgtactattacatgacccagactgaggagctcaagtacagtatagaccaagagttccttaaagaatacttccctatcgaggtcgtgacagagggtctgctgaatacctatcaggagctgctcggcctttccttcgagcaaatgactgatgcacatgtgtggaacaagtctgtcaccctgtataccgttaaggacaaggccactggggaggtgctggggcagttttacctcgacttatacccgcgagaagggaaatacaaccacgccgcttgctttggactgcaaccagggtgccttttgcccgacggttccagaatgatggccgtggctgccttggtggtaaactttagccaaccagttgctggaagaccttcactcctcaggcatgacgaagtcagaacctatttccatgagttcggccatgtcatgcatcagatttgtgcacaaaccgacttcgccaggttctctgggacaaacgtcgagacagatttcgttgaagtcccctctcagatgttggagaactgggtgtgggatgtggattctctgcgacggctgagtaaacactacaaggatggctcgcccattgcagatgatctgcttgaaaagctggtggcctccagactggttaataccgggctattgacgctgaggcaaatagtcctgagtaaggttgatcagtcactgcacacaaacacatctctggacgccgcaagcaatatgcccaacacagctcagaaatactag

SEQ ID NO: 205365 - DNA, 2115 bp, Artificial Sequence
  derived and/or modified sequence
atgatcgcacgctgcctgttagccgtgcgtagtttaaggcgggtgggtggatcacggatccttctcaggatgacacttggaagggaagttatgtcgccgctccaggctatgtcctcatatacagtcgccggaaggaacgtgctgagatgggatctaagcccagaacagatcaagacgcgcaccgaggaactcatcgttcagactaagcaggtatatgacgcagtgggtatgttgggaatcgaggaggttacatacgagaactgcttacaggccctggctgacgtcgaggtcaagtacattgtggaaaggaccatgctcgatttcccccagcatgtatcttcagacaaagaagtaagggccgcttcaactgaggcagataaacgactctctagatttgacattgaaatgtccatgagaggcgacatttttgagcgcatagttcatctgcaggagacttgcgatttgggcaaaattaaaccagaagctaggagatatttagaaaaaagcatcaaaatgggcaagagaaatggactccacctgccagagcaagttcaaaacgagatcaagtctatgaagaaaagaatgtcagaactctgcattgacttcaacaaaaatttaaatgaagacgataccttcctcgtcttctctaaggccgagcttggagccctgcctgacgatttcatcgatagtcttgagaagaccgatgacgataagtacaagataacactaaagtacccacactacttccccgtcatgaagaaatgctgcatccctgagactcggagaaggatggaaatggcatttaacacgaggtgcaaagaggaaaataccataattttacagcaacttcttccgctgaggacgaaggtggctaagttgctgggctattccacgcacgccgattttgtgctcgagatgaataccgccaaaagcacttctagagtgacagctttccttgatgacctctctcaaaagctcaaaccacttggcgaggctgaaagagaattcattctcaatttaaaaaagaaagagtgtaaagacaggggcttcgagtacgacgggaagatcaatgcttgggatctgtactactatatgacacagaccgaagaactcaagtactctatcgatcaagagtttctgaaggagtactttcccattgaagtagtaactgagggtctgctgaacacttaccaggagctcctgggcctgagttttgaacagatgactgatgcacacgtctggaataaatccgtgacactctacactgtcaaggataaagccaccggggaggtcttaggccaattttacctagacctgtaccctcgggagggcaagtacaaccatgctgcttgttttggactgcagccagggtgtctattgcctgacgggtcccgcatgatggccgtagctgccctcgtggtcaatttcagtcagccagtcgctgggagaccctccctccttcgtcatgacgaggttagaacatactttcacgaattcggccacgtaatgcatcaaatctgtgcccaaaccgactttgcgagatttagcggaaccaacgttgagacagacttcgtggaggtcccgagtcagatgctggagaattgggtgtgggacgtagatagtctccgacggctgagtaagcattacaaggatgggtcccctatcgctgatgacctgctggagaaacttgttgcgagcaggcttgtgaatactggcctgctgaccttgaggcaaatcgtgttgtccaaggtggaccaaagcctccacacaaatacttccctcgacgcggcttctgaatacgcaaaatactgtagtgagattctcggtgtagcagcaactcctggaactaacatgcctgctaccttcggacatctggcaggtggttatgatggccaatattacggatatttatggagcgaggtttttagcatggatatgttttatagctgttttaagaaagagggcatcatgaatcctgaggttggaatgaaatatcgcaacttgatacttaagccgggtggctctcttgatgggatggacatgctgcataacttcctgaaacgagaaccaaaccagaaggcattcctgatgtcccggggactccacgcaccctag

SEQ ID NO: 205366 - DNA, 1803 bp, Artificial Sequence
  derived and/or modified sequence
atgttggatttcccacaacatgtgagctccgacaaggaggtgcgagccgcatccacggaagcagataagcgcctctctaggtttgatattgagatgagcatgagaggagatatatttgagcgcatcgttcacctgcaggaaacctgcgacttaggcaagataaagcctgaggcaaggcgatacctcgaaaaaagcatcaaaatgggtaaaaggaatgggctgcacctgcccgaacaggtccaaaacgagattaagagcatgaagaagagaatgtccgagctgtgtatcgattttaataagaatctaaatgaggatgatacctttcttgtattcagtaaagcagagctgggggctctcccggatgatttcatcgatagtctggaaaagaccgacgacgacaaatacaagatcacacttaaatatccccactacttcccagtgatgaagaagtgttgcatacccgaaactcgacgcaggatggagatggccttcaacacccggtgcaaggaagaaaacacaatcattcttcaacagctcctgccgctaaggaccaaagtagctaagctgctcggatatagtacgcatgccgattttgtgctagaaatgaatacggcaaagtcaacaagccgggtgactgccttcctagacgacctcagtcagaaactcaagccactgggagaggccgagagagagtttattttgaatctgaaaaagaaggagtgcaaggatagaggttttgagtatgacggtaagatcaacgcttgggatctgtactattacatgacccagaccgaagagttgaagtacagtatcgaccaggagttcctaaaagagtattttccaattgaggtggtgacagaagggctcttaaatacttatcaagagcttttaggtctgagctttgaacaaatgaccgacgcccatgtgtggaataaatcggtaacactgtacacagtgaaagacaaggcaacaggggaggtgctgggacaattttatcttgacctttaccccagagaaggcaagtacaaccatgctgcctgcttcggcctgcagccagggtgtctgctgccggatggcagccggatgatggccgttgccgctctcgtggtgaacttctcccagcccgtagctggacgcccaagtctgctgcggcacgacgaggttcggacttactttcatgaatttggacacgtgatgcaccagatctgtgcccagaccgactttgctaggttctccggaaccaacgtggaaaccgactttgtagaagtgccaagtcaaatgctggagaattgggtgtgggacgtggactccctgagacggctgtctaagcactataaggacgggtcacctattgctgatgatttgttagaaaaattagtggctagcagactggtgaacactggccttctgacccttcgacagatcgtgctgagcaaggtggaccagagcctccatacgaataccagtctcgatgctgcaagtgaatatgctaagtattgctccgagatcctgggggtagccgcaacccctggcaccaacatgccggctacctttggacaccttgccggtgggtacgatggacagtactatggatatctgtggtcggaggtgttttcaatggatatgttttactcctgtttcaaaaaagagggaatcatgaatccagaagtggggatgaagtatcggaacttaatcctgaagcccggaggatcacttgatggtatggatatgcttcacaattttttgaagagagaaccaaatcaaaaggcatttctaatgtccaggggactgcatgctccttag

SEQ ID NO: 205367 - DNA, 1824 bp, Artificial Sequence
  derived and/or modified sequence
atgatcgccagatgcctgctggccgtgagaagcctgagaagagtgggcggcagcagaatcctgctgagaatgaccctgggcagagaggtgatgagccccctgcaggccatgagcagctacaccgtggccggcagaaacgtgctgagatgggacctgagccccgagcagatcaagaccagaaccgaggagctgatcgtgcagaccaagcaggtgtacgacgccgtgggcatgctgggcatcgaggaggtgacctacgagaactgcctgcaggccctggccgacgtggaggtgaagtacatcgtggagagaaccatgctggacttcccccagcacgtgagcagcgacaaggaggtgagagccgccagcaccgaggccgacaagagactgagcagattcgacatcgagatgagcatgagaggcgacatcttcgagagaatcgtgcacctgcaggagacctgcgacctgggcaagatcaagcccgaggccagaagatacctggagaagagcatcaagatgggcaagagaaacggcctgcacctgcccgagcaggtgcagaacgagatcaagagcatgaagaagagaatgagcgagctgtgcatcgacttcaacaagaacctgaacgaggacgacaccttcctggtgttcagcaaggccgagctgggcgccctgcccgacgacttcatcgacagcctggagaagaccgacgacgacaagtacaagatcaccctgaagtacccccactacttccccgtgatgaagaagtgctgcatccccgagaccagaagaagaatggagatggccttcaacaccagatgcaaggaggagaacaccatcatcctgcagcagctgctgcccctgagaaccaaggtggccaagctgctgggctacagcacccacgccgacttcgtgctggagatgaacaccgccaagagcaccagcagagtgaccgccttcctggacgacctgagccagaagctgaagcccctgggcgaggccgagagagagttcatcctgaacctgaagaagaaggagtgcaaggacagaggcttcgagtacgacggcaagatcaacgcctgggacctgtactactacatgacccagaccgaggagctgaagtacagcatcgaccaggagttcctgaaggagtacttccccatcgaggtggtgaccgagggcctgctgaacacctaccaggagctgctgggcctgagcttcgagcagatgaccgacgcccacgtgtggaacaagagcgtgaccctgtacaccgtgaaggacaaggccaccggcgaggtgctgggccagttctacctggacctgtaccccagagagggcaagtacaaccacgccgcctgcttcggcctgcagcccggctgcctgctgcccgacggcagcagaatgatggccgtggccgccctggtggtgaacttcagccagcccgtggccggcagacccagcctgctgagacacgacgaggtgagaacctacttccacgagttcggccacgtgatgcaccagatctgcgcccagaccgacttcgccagattcagcggcaccaacgtggagaccgacttcgtggaggtgcccagccagatgctggagaactgggtgtgggacgtggacagcctgagaagactgagcaagcactacaaggacggcagccccatcgccgacgacctgctggagaagctggtggccagcagactggtgaacaccggcctgctgaccctgagacagatcgtgctgagcaaggtggaccagagcctgcacaccaacaccagcctggacgccgccagcaacatgcccaacaccgcccagaagtactag

SEQ ID NO: 205368 - DNA, 2115 bp, Artificial Sequence
  derived and/or modified sequence
atgatcgccagatgcctgctggccgtgagaagcctgagaagagtgggcggcagcagaatcctgctgagaatgaccctgggcagagaggtgatgagccccctgcaggccatgagcagctacaccgtggccggcagaaacgtgctgagatgggacctgagccccgagcagatcaagaccagaaccgaggagctgatcgtgcagaccaagcaggtgtacgacgccgtgggcatgctgggcatcgaggaggtgacctacgagaactgcctgcaggccctggccgacgtggaggtgaagtacatcgtggagagaaccatgctggacttcccccagcacgtgagcagcgacaaggaggtgagagccgccagcaccgaggccgacaagagactgagcagattcgacatcgagatgagcatgagaggcgacatcttcgagagaatcgtgcacctgcaggagacctgcgacctgggcaagatcaagcccgaggccagaagatacctggagaagagcatcaagatgggcaagagaaacggcctgcacctgcccgagcaggtgcagaacgagatcaagagcatgaagaagagaatgagcgagctgtgcatcgacttcaacaagaacctgaacgaggacgacaccttcctggtgttcagcaaggccgagctgggcgccctgcccgacgacttcatcgacagcctggagaagaccgacgacgacaagtacaagatcaccctgaagtacccccactacttccccgtgatgaagaagtgctgcatccccgagaccagaagaagaatggagatggccttcaacaccagatgcaaggaggagaacaccatcatcctgcagcagctgctgcccctgagaaccaaggtggccaagctgctgggctacagcacccacgccgacttcgtgctggagatgaacaccgccaagagcaccagcagagtgaccgccttcctggacgacctgagccagaagctgaagcccctgggcgaggccgagagagagttcatcctgaacctgaagaagaaggagtgcaaggacagaggcttcgagtacgacggcaagatcaacgcctgggacctgtactactacatgacccagaccgaggagctgaagtacagcatcgaccaggagttcctgaaggagtacttccccatcgaggtggtgaccgagggcctgctgaacacctaccaggagctgctgggcctgagcttcgagcagatgaccgacgcccacgtgtggaacaagagcgtgaccctgtacaccgtgaaggacaaggccaccggcgaggtgctgggccagttctacctggacctgtaccccagagagggcaagtacaaccacgccgcctgcttcggcctgcagcccggctgcctgctgcccgacggcagcagaatgatggccgtggccgccctggtggtgaacttcagccagcccgtggccggcagacccagcctgctgagacacgacgaggtgagaacctacttccacgagttcggccacgtgatgcaccagatctgcgcccagaccgacttcgccagattcagcggcaccaacgtggagaccgacttcgtggaggtgcccagccagatgctggagaactgggtgtgggacgtggacagcctgagaagactgagcaagcactacaaggacggcagccccatcgccgacgacctgctggagaagctggtggccagcagactggtgaacaccggcctgctgaccctgagacagatcgtgctgagcaaggtggaccagagcctgcacaccaacaccagcctggacgccgccagcgagtacgccaagtactgcagcgagatcctgggcgtggccgccacccccggcaccaacatgcccgccaccttcggccacctggccggcggctacgacggccagtactacggctacctgtggagcgaggtgttcagcatggacatgttctacagctgcttcaagaaggagggcatcatgaaccccgaggtgggcatgaagtacagaaacctgatcctgaagcccggcggcagcctggacggcatggacatgctgcacaacttcctgaagagagagcccaaccagaaggccttcctgatgagcagaggcctgcacgccccctag

SEQ ID NO: 205369 - DNA, 1803 bp, Artificial Sequence
  derived and/or modified sequence
atgctggacttcccccagcacgtgagcagcgacaaggaggtgagagccgccagcaccgaggccgacaagagactgagcagattcgacatcgagatgagcatgagaggcgacatcttcgagagaatcgtgcacctgcaggagacctgcgacctgggcaagatcaagcccgaggccagaagatacctggagaagagcatcaagatgggcaagagaaacggcctgcacctgcccgagcaggtgcagaacgagatcaagagcatgaagaagagaatgagcgagctgtgcatcgacttcaacaagaacctgaacgaggacgacaccttcctggtgttcagcaaggccgagctgggcgccctgcccgacgacttcatcgacagcctggagaagaccgacgacgacaagtacaagatcaccctgaagtacccccactacttccccgtgatgaagaagtgctgcatccccgagaccagaagaagaatggagatggccttcaacaccagatgcaaggaggagaacaccatcatcctgcagcagctgctgcccctgagaaccaaggtggccaagctgctgggctacagcacccacgccgacttcgtgctggagatgaacaccgccaagagcaccagcagagtgaccgccttcctggacgacctgagccagaagctgaagcccctgggcgaggccgagagagagttcatcctgaacctgaagaagaaggagtgcaaggacagaggcttcgagtacgacggcaagatcaacgcctgggacctgtactactacatgacccagaccgaggagctgaagtacagcatcgaccaggagttcctgaaggagtacttccccatcgaggtggtgaccgagggcctgctgaacacctaccaggagctgctgggcctgagcttcgagcagatgaccgacgcccacgtgtggaacaagagcgtgaccctgtacaccgtgaaggacaaggccaccggcgaggtgctgggccagttctacctggacctgtaccccagagagggcaagtacaaccacgccgcctgcttcggcctgcagcccggctgcctgctgcccgacggcagcagaatgatggccgtggccgccctggtggtgaacttcagccagcccgtggccggcagacccagcctgctgagacacgacgaggtgagaacctacttccacgagttcggccacgtgatgcaccagatctgcgcccagaccgacttcgccagattcagcggcaccaacgtggagaccgacttcgtggaggtgcccagccagatgctggagaactgggtgtgggacgtggacagcctgagaagactgagcaagcactacaaggacggcagccccatcgccgacgacctgctggagaagctggtggccagcagactggtgaacaccggcctgctgaccctgagacagatcgtgctgagcaaggtggaccagagcctgcacaccaacaccagcctggacgccgccagcgagtacgccaagtactgcagcgagatcctgggcgtggccgccacccccggcaccaacatgcccgccaccttcggccacctggccggcggctacgacggccagtactacggctacctgtggagcgaggtgttcagcatggacatgttctacagctgcttcaagaaggagggcatcatgaaccccgaggtgggcatgaagtacagaaacctgatcctgaagcccggcggcagcctggacggcatggacatgctgcacaacttcctgaagagagagcccaaccagaaggccttcctgatgagcagaggcctgcacgccccctag

SEQ ID NO: 205370 - protein, 893 aa, Artificial Sequence
  derived and/or modified sequence
MTPPSRAEAGVRRSRVPSEGRWRGAEPPGISASTQPASAGRAARHCGAMSGARGEGPEAGAGGAGGRAAPENPGGVLSVELPGLLAQLARSFALLLPVYALGYLGLSFSWVLLALALLAWCRRSRGLKALRLCRALALLEDEERVVRLGVRACDLPAWVHFPDTERAEWLNKTVKHMWPFICQFIEKLFRETIEPAVRGANTHLSTFSFTKVDVGQQPLRINGVKVYTENVDKRQIILDLQISFVGNCEIDLEIKRYFCRAGVKSIQIHGTMRVILEPLIGDMPLVGALSIFFLRKPLLEINWTGLTNLLDVPGLNGLSDTIILDIISNYLVLPNRITVPLVSEVQIAQLRFPVPKGVLRIHFIEAQDLQGKDTYLKGLVKGKSDPYGIIRVGNQIFQSRVIKENLSPKWNEVYEALVYEHPGQELEIELFDEDPDKDDFLGSLMIDLIEVEKERLLDEWFTLDEVPKGKLHLRLEWLTLMPNASNLDKVLTDIKADKDQANDGLSSALLILYLDSARNLPSGKKISSNPNPVVQMSVGHKAQESKIRYKTNEPVWEENFTFFIHNPKRQDLEVEVRDEQHQCSLGNLKVPLSQLLTSEDMTVSQRFQLSNSGPNSTIKMKIALRVLHLEKRERPPDHQHSAQVKRPSVSKEGRKTSIKSHMSGSPGPGGSNTAPSTPVIGGSDKPGMEEKAQPPEAGPQGLHDLGRSSSSLLASPGHISVKEPTPSIASDISLPIATQELRQRLRQLENGTTLGQSPLGQIQLTIRHSSQRNKLIVVVHACRNLIAFSEDGSDPYVRMYLLPDKRRSGRRKTHVSKKTLNPVFDQSFDFSVSLPEVQRRTLDVAVKNSGGFLSKDKGLLGKVLVALASEELAKGWTQWYDLTEDGTRPQAMT

SEQ ID NO: 205371 - protein, 223 aa, Artificial Sequence
  derived and/or modified sequence
MPVFPPCVLQVRDEQHQCSLGNLKVPLSQLLTSEDMTVSQRFQLSNSGPNSTIKMKIALRVLHLEKRERPPDHQHSAQVKRPSVSKEGRKTSIKSHMSGSPGPGGSNTAPSTPVIGGSDKPGMEEKAQPPEAGPQGLHDLGRSSSSLLASPGHISVKEPTPSIASDISLPIATQELRQRLRQLENGTTLGQSPLGQIQLTIRHSSQKQAYRGRACLQKPHCLL

SEQ ID NO: 205372 - protein, 942 aa, Artificial Sequence
  derived and/or modified sequence
MTANRDAALSSHRHPGCAQRPRTPTFASSSQRRSAFGFDDGNFPGLGERSHAPGSRLGARRRAKTARGLRGHRQRGAGAGLSRPGSARAPSPPRPGAPENPGGVLSVELPGLLAQLARSFALLLPVYALGYLGLSFSWVLLALALLAWCRRSRGLKALRLCRALALLEDEERVVRLGVRACDLPAWVHFPDTERAEWLNKTVKHMWPFICQFIEKLFRETIEPAVRGANTHLSTFSFTKVDVGQQPLRINGVKVYTENVDKRQIILDLQISFVGNCEIDLEIKRYFCRAGVKSIQIHGTMRVILEPLIGDMPLVGALSIFFLRKPLLEINWTGLTNLLDVPGLNGLSDTIILDIISNYLVLPNRITVPLVSEVQIAQLRFPVPKGVLRIHFIEAQDLQGKDTYLKGLVKGKSDPYGIIRVGNQIFQSRVIKENLSPKWNEVYEALVYEHPGQELEIELFDEDPDKDDFLGSLMIDLIEVEKERLLDEWFTLDEVPKGKLHLRLEWLTLMPNASNLDKVLTDIKADKDQANDGLSSALLILYLDSARNLPSNPLEFNPDVLKKTAVQRALKSGKKISSNPNPVVQMSVGHKAQESKIRYKTNEPVWEENFTFFIHNPKRQDLEVEVRDEQHQCSLGNLKVPLSQLLTSEDMTVSQRFQLSNSGPNSTIKMKIALRVLHLEKRERPPDHQHSAQVKRPSVSKEGRKTSIKSHMSGSPGPGGSNTAPSTPVIGGSDKPGMEEKAQPPEAGPQGLHDLGRSSSSLLASPGHISVKEPTPSIASDISLPIATQELRQRLRQLENGTTLGQSPLGQIQLTIRHSSQRNKLIVVVHACRNLIAFSEDGSDPYVRMYLLPDKRRSGRRKTHVSKKTLNPVFDQSFDFSVSLPEVQRRTLDVAVKNSGGFLSKDKGLLGKVLVALASEELAKGWTQWYDLTEDGTRPQAMT

SEQ ID NO: 205373 - protein, 527 aa, Artificial Sequence
  derived and/or modified sequence
MWPFICQFIEKLFRETIEPAVRGANTHLSTFSFTKVDVGQQPLRINGVKVYTENVDKRQIILDLQISFVGNCEIDLEIKRYFCRAGVKSIQIHGTMRVILEPLIGDMPLVGALSIFFLRKPLLEINWTGLTNLLDVPGLNGLSDTIILDIISNYLVLPNRITVPLVSEVQIAQLRFPVPKGVLRIHFIEAQDLQGKDTYLKGLVKGKSDPYGIIRVGNQIFQSRVIKENLSPKWNEVYEALVYEHPGQELEIELFDEDPDKDDFLGSLMIDLIEVEKERLLDEWFTLDEVPKGKLHLRLEWLTLMPNASNLDKVLTDIKADKDQANDGLSSALLILYLDSARNLPSGKKISSNPNPVVQMSVGHKAQESKIRYKTNEPVWEENFTFFIHNPKRQDLEVEVRDEQHQCSLGNLKVPLSQLLTSEDMTVSQRFQLSNSGPNSTIKMKIALRVLHLEKRERPPDHQHSAQVKRPSVSKEGRKTSIKSHMSGSPGPGGSNTAPATSQSRSRPPASPRTSRCPSPPRSCGKG

SEQ ID NO: 205374 - protein, 328 aa, Artificial Sequence
  derived and/or modified sequence
MPVFPPCVLQVRDEQHQCSLGNLKVPLSQLLTSEDMTVSQRFQLSNSGPNSTIKMKIALRVLHLEKRERPPDHQHSAQVKRPSVSKEGRKTSIKSHMSGSPGPGGSNTAPSTPVIGGSDKPGMEEKAQPPEAGPQGLHDLGRSSSSLLASPGHISVKEPTPSIASDISLPIATQELRQRLRQLENGTTLGQSPLGQIQLTIRHSSQRNKLIVVVHACRNLIAFSEDGSDPYVRMYLLPDKRRSGRRKTHVSKKTLNPVFDQSFDFSVSLPEVQRRTLDVAVKNSGGFLSKDKGLLGKVLVALASEELAKGWTQWYDLTEDGTRPQAMT

SEQ ID NO: 205375 - DNA, 2682 bp, Artificial Sequence
  derived and/or modified sequence
atgaccccccccagcagagccgaggccggcgtgagaagaagcagagtgcccagcgagggcagatggagaggcgccgagccccccggcatcagcgccagcacccagcccgccagcgccggcagagccgccagacactgcggcgccatgagcggcgccagaggcgagggccccgaggccggcgccggcggcgccggcggcagagccgcccccgagaaccccggcggcgtgctgagcgtggagctgcccggcctgctggcccagctggccagaagcttcgccctgctgctgcccgtgtacgccctgggctacctgggcctgagcttcagctgggtgctgctggccctggccctgctggcctggtgcagaagaagcagaggcctgaaggccctgagactgtgcagagccctggccctgctggaggacgaggagagagtggtgagactgggcgtgagagcctgcgacctgcccgcctgggtgcacttccccgacaccgagagagccgagtggctgaacaagaccgtgaagcacatgtggcccttcatctgccagttcatcgagaagctgttcagagagaccatcgagcccgccgtgagaggcgccaacacccacctgagcaccttcagcttcaccaaggtggacgtgggccagcagcccctgagaatcaacggcgtgaaggtgtacaccgagaacgtggacaagagacagatcatcctggacctgcagatcagcttcgtgggcaactgcgagatcgacctggagatcaagagatacttctgcagagccggcgtgaagagcatccagatccacggcaccatgagagtgatcctggagcccctgatcggcgacatgcccctggtgggcgccctgagcatcttcttcctgagaaagcccctgctggagatcaactggaccggcctgaccaacctgctggacgtgcccggcctgaacggcctgagcgacaccatcatcctggacatcatcagcaactacctggtgctgcccaacagaatcaccgtgcccctggtgagcgaggtgcagatcgcccagctgagattccccgtgcccaagggcgtgctgagaatccacttcatcgaggcccaggacctgcagggcaaggacacctacctgaagggcctggtgaagggcaagagcgacccctacggcatcatcagagtgggcaaccagatcttccagagcagagtgatcaaggagaacctgagccccaagtggaacgaggtgtacgaggccctggtgtacgagcaccccggccaggagctggagatcgagctgttcgacgaggaccccgacaaggacgacttcctgggcagcctgatgatcgacctgatcgaggtggagaaggagagactgctggacgagtggttcaccctggacgaggtgcccaagggcaagctgcacctgagactggagtggctgaccctgatgcccaacgccagcaacctggacaaggtgctgaccgacatcaaggccgacaaggaccaggccaacgacggcctgagcagcgccctgctgatcctgtacctggacagcgccagaaacctgcccagcggcaagaagatcagcagcaaccccaaccccgtggtgcagatgagcgtgggccacaaggcccaggagagcaagatcagatacaagaccaacgagcccgtgtgggaggagaacttcaccttcttcatccacaaccccaagagacaggacctggaggtggaggtgagagacgagcagcaccagtgcagcctgggcaacctgaaggtgcccctgagccagctgctgaccagcgaggacatgaccgtgagccagagattccagctgagcaacagcggccccaacagcaccatcaagatgaagatcgccctgagagtgctgcacctggagaagagagagagaccccccgaccaccagcacagcgcccaggtgaagagacccagcgtgagcaaggagggcagaaagaccagcatcaagagccacatgagcggcagccccggccccggcggcagcaacaccgcccccagcacccccgtgatcggcggcagcgacaagcccggcatggaggagaaggcccagccccccgaggccggcccccagggcctgcacgacctgggcagaagcagcagcagcctgctggccagccccggccacatcagcgtgaaggagcccacccccagcatcgccagcgacatcagcctgcccatcgccacccaggagctgagacagagactgagacagctggagaacggcaccaccctgggccagagccccctgggccagatccagctgaccatcagacacagcagccagagaaacaagctgatcgtggtggtgcacgcctgcagaaacctgatcgccttcagcgaggacggcagcgacccctacgtgagaatgtacctgctgcccgacaagagaagaagcggcagaagaaagacccacgtgagcaagaagaccctgaaccccgtgttcgaccagagcttcgacttcagcgtgagcctgcccgaggtgcagagaagaaccctggacgtggccgtgaagaacagcggcggcttcctgagcaaggacaagggcctgctgggcaaggtgctggtggccctggccagcgaggagctggccaagggctggacccagtggtacgacctgaccgaggacggcaccagaccccaggccatgacctag

SEQ ID NO: 205376 - DNA, 672 bp, Artificial Sequence
  derived and/or modified sequence
atgcccgtgttccccccctgcgtgctgcaggtgagagacgagcagcaccagtgcagcctgggcaacctgaaggtgcccctgagccagctgctgaccagcgaggacatgaccgtgagccagagattccagctgagcaacagcggccccaacagcaccatcaagatgaagatcgccctgagagtgctgcacctggagaagagagagagaccccccgaccaccagcacagcgcccaggtgaagagacccagcgtgagcaaggagggcagaaagaccagcatcaagagccacatgagcggcagccccggccccggcggcagcaacaccgcccccagcacccccgtgatcggcggcagcgacaagcccggcatggaggagaaggcccagccccccgaggccggcccccagggcctgcacgacctgggcagaagcagcagcagcctgctggccagccccggccacatcagcgtgaaggagcccacccccagcatcgccagcgacatcagcctgcccatcgccacccaggagctgagacagagactgagacagctggagaacggcaccaccctgggccagagccccctgggccagatccagctgaccatcagacacagcagccagaagcaggcctacagaggcagagcctgcctgcagaagccccactgcctgctgtag

SEQ ID NO: 205377 - DNA, 2829 bp, Artificial Sequence
  derived and/or modified sequence
atgaccgccaacagagacgccgccctgagcagccacagacaccccggctgcgcccagagacccagaacccccaccttcgccagcagcagccagagaagaagcgccttcggcttcgacgacggcaacttccccggcctgggcgagagaagccacgcccccggcagcagactgggcgccagaagaagagccaagaccgccagaggcctgagaggccacagacagagaggcgccggcgccggcctgagcagacccggcagcgccagagcccccagcccccccagacccggcgcccccgagaaccccggcggcgtgctgagcgtggagctgcccggcctgctggcccagctggccagaagcttcgccctgctgctgcccgtgtacgccctgggctacctgggcctgagcttcagctgggtgctgctggccctggccctgctggcctggtgcagaagaagcagaggcctgaaggccctgagactgtgcagagccctggccctgctggaggacgaggagagagtggtgagactgggcgtgagagcctgcgacctgcccgcctgggtgcacttccccgacaccgagagagccgagtggctgaacaagaccgtgaagcacatgtggcccttcatctgccagttcatcgagaagctgttcagagagaccatcgagcccgccgtgagaggcgccaacacccacctgagcaccttcagcttcaccaaggtggacgtgggccagcagcccctgagaatcaacggcgtgaaggtgtacaccgagaacgtggacaagagacagatcatcctggacctgcagatcagcttcgtgggcaactgcgagatcgacctggagatcaagagatacttctgcagagccggcgtgaagagcatccagatccacggcaccatgagagtgatcctggagcccctgatcggcgacatgcccctggtgggcgccctgagcatcttcttcctgagaaagcccctgctggagatcaactggaccggcctgaccaacctgctggacgtgcccggcctgaacggcctgagcgacaccatcatcctggacatcatcagcaactacctggtgctgcccaacagaatcaccgtgcccctggtgagcgaggtgcagatcgcccagctgagattccccgtgcccaagggcgtgctgagaatccacttcatcgaggcccaggacctgcagggcaaggacacctacctgaagggcctggtgaagggcaagagcgacccctacggcatcatcagagtgggcaaccagatcttccagagcagagtgatcaaggagaacctgagccccaagtggaacgaggtgtacgaggccctggtgtacgagcaccccggccaggagctggagatcgagctgttcgacgaggaccccgacaaggacgacttcctgggcagcctgatgatcgacctgatcgaggtggagaaggagagactgctggacgagtggttcaccctggacgaggtgcccaagggcaagctgcacctgagactggagtggctgaccctgatgcccaacgccagcaacctggacaaggtgctgaccgacatcaaggccgacaaggaccaggccaacgacggcctgagcagcgccctgctgatcctgtacctggacagcgccagaaacctgcccagcaaccccctggagttcaaccccgacgtgctgaagaagaccgccgtgcagagagccctgaagagcggcaagaagatcagcagcaaccccaaccccgtggtgcagatgagcgtgggccacaaggcccaggagagcaagatcagatacaagaccaacgagcccgtgtgggaggagaacttcaccttcttcatccacaaccccaagagacaggacctggaggtggaggtgagagacgagcagcaccagtgcagcctgggcaacctgaaggtgcccctgagccagctgctgaccagcgaggacatgaccgtgagccagagattccagctgagcaacagcggccccaacagcaccatcaagatgaagatcgccctgagagtgctgcacctggagaagagagagagaccccccgaccaccagcacagcgcccaggtgaagagacccagcgtgagcaaggagggcagaaagaccagcatcaagagccacatgagcggcagccccggccccggcggcagcaacaccgcccccagcacccccgtgatcggcggcagcgacaagcccggcatggaggagaaggcccagccccccgaggccggcccccagggcctgcacgacctgggcagaagcagcagcagcctgctggccagccccggccacatcagcgtgaaggagcccacccccagcatcgccagcgacatcagcctgcccatcgccacccaggagctgagacagagactgagacagctggagaacggcaccaccctgggccagagccccctgggccagatccagctgaccatcagacacagcagccagagaaacaagctgatcgtggtggtgcacgcctgcagaaacctgatcgccttcagcgaggacggcagcgacccctacgtgagaatgtacctgctgcccgacaagagaagaagcggcagaagaaagacccacgtgagcaagaagaccctgaaccccgtgttcgaccagagcttcgacttcagcgtgagcctgcccgaggtgcagagaagaaccctggacgtggccgtgaagaacagcggcggcttcctgagcaaggacaagggcctgctgggcaaggtgctggtggccctggccagcgaggagctggccaagggctggacccagtggtacgacctgaccgaggacggcaccagaccccaggccatgacctag

SEQ ID NO: 205378 - DNA, 1584 bp, Artificial Sequence
  derived and/or modified sequence
atgtggcccttcatctgccagttcatcgagaagctgttcagagagaccatcgagcccgccgtgagaggcgccaacacccacctgagcaccttcagcttcaccaaggtggacgtgggccagcagcccctgagaatcaacggcgtgaaggtgtacaccgagaacgtggacaagagacagatcatcctggacctgcagatcagcttcgtgggcaactgcgagatcgacctggagatcaagagatacttctgcagagccggcgtgaagagcatccagatccacggcaccatgagagtgatcctggagcccctgatcggcgacatgcccctggtgggcgccctgagcatcttcttcctgagaaagcccctgctggagatcaactggaccggcctgaccaacctgctggacgtgcccggcctgaacggcctgagcgacaccatcatcctggacatcatcagcaactacctggtgctgcccaacagaatcaccgtgcccctggtgagcgaggtgcagatcgcccagctgagattccccgtgcccaagggcgtgctgagaatccacttcatcgaggcccaggacctgcagggcaaggacacctacctgaagggcctggtgaagggcaagagcgacccctacggcatcatcagagtgggcaaccagatcttccagagcagagtgatcaaggagaacctgagccccaagtggaacgaggtgtacgaggccctggtgtacgagcaccccggccaggagctggagatcgagctgttcgacgaggaccccgacaaggacgacttcctgggcagcctgatgatcgacctgatcgaggtggagaaggagagactgctggacgagtggttcaccctggacgaggtgcccaagggcaagctgcacctgagactggagtggctgaccctgatgcccaacgccagcaacctggacaaggtgctgaccgacatcaaggccgacaaggaccaggccaacgacggcctgagcagcgccctgctgatcctgtacctggacagcgccagaaacctgcccagcggcaagaagatcagcagcaaccccaaccccgtggtgcagatgagcgtgggccacaaggcccaggagagcaagatcagatacaagaccaacgagcccgtgtgggaggagaacttcaccttcttcatccacaaccccaagagacaggacctggaggtggaggtgagagacgagcagcaccagtgcagcctgggcaacctgaaggtgcccctgagccagctgctgaccagcgaggacatgaccgtgagccagagattccagctgagcaacagcggccccaacagcaccatcaagatgaagatcgccctgagagtgctgcacctggagaagagagagagaccccccgaccaccagcacagcgcccaggtgaagagacccagcgtgagcaaggagggcagaaagaccagcatcaagagccacatgagcggcagccccggccccggcggcagcaacaccgcccccgccaccagccagagcagaagcagaccccccgccagccccagaaccagcagatgccccagcccccccagaagctgcggcaagggctag

SEQ ID NO: 205379 - DNA, 987 bp, Artificial Sequence
  derived and/or modified sequence
atgcccgtgttccccccctgcgtgctgcaggtgagagacgagcagcaccagtgcagcctgggcaacctgaaggtgcccctgagccagctgctgaccagcgaggacatgaccgtgagccagagattccagctgagcaacagcggccccaacagcaccatcaagatgaagatcgccctgagagtgctgcacctggagaagagagagagaccccccgaccaccagcacagcgcccaggtgaagagacccagcgtgagcaaggagggcagaaagaccagcatcaagagccacatgagcggcagccccggccccggcggcagcaacaccgcccccagcacccccgtgatcggcggcagcgacaagcccggcatggaggagaaggcccagccccccgaggccggcccccagggcctgcacgacctgggcagaagcagcagcagcctgctggccagccccggccacatcagcgtgaaggagcccacccccagcatcgccagcgacatcagcctgcccatcgccacccaggagctgagacagagactgagacagctggagaacggcaccaccctgggccagagccccctgggccagatccagctgaccatcagacacagcagccagagaaacaagctgatcgtggtggtgcacgcctgcagaaacctgatcgccttcagcgaggacggcagcgacccctacgtgagaatgtacctgctgcccgacaagagaagaagcggcagaagaaagacccacgtgagcaagaagaccctgaaccccgtgttcgaccagagcttcgacttcagcgtgagcctgcccgaggtgcagagaagaaccctggacgtggccgtgaagaacagcggcggcttcctgagcaaggacaagggcctgctgggcaaggtgctggtggccctggccagcgaggagctggccaagggctggacccagtggtacgacctgaccgaggacggcaccagaccccaggccatgacctag

SEQ ID NO: 205380 - DNA, 2682 bp, Artificial Sequence
  derived and/or modified sequence
atgacaccgccctcacgcgcagaggcaggggtacgccgtagtagagttccctcagaagggagatggagaggagccgaacccccgggcatatccgcaagtacccagcctgctagtgcgggacgcgccgcaagacattgcggcgcgatgtccggtgccagaggtgagggcccagaggccggagccgggggagccggggggagagccgcccctgagaatccaggaggggtgctgagtgtcgaattgcctgggttgttagcgcagctcgcaagaagcttcgctttgctgctgcctgtctacgcgttgggctacctgggactgtctttctcctgggtgctgctcgctttggctctgctcgcctggtgccggcgatcccgtgggctcaaggccctccgtctctgtcgtgccttggcattactagaggatgaggagcgcgtcgttcgcctaggagtgagagcctgcgacttgccggcttgggtgcactttccggacacagaaagggcggagtggctcaataagactgtgaaacatatgtggccttttatctgtcagtttattgagaagctcttcagggagaccatcgagccggcagtgaggggcgcgaatacacacctgtcaaccttcagttttacgaaagtggatgtcggccagcagcccttacgcataaacggtgtcaaagtttatacagaaaacgtggataagaggcaaatcattctcgatctccaaattagttttgtgggcaactgcgaaattgacctcgagatcaagcgatatttttgccgcgccggagtaaaatcgatccaaattcatggaaccatgcgggtgatactggagcccttgattggggacatgcctctggtgggagctctgtctattttcttcctgcgtaagccactcctcgagatcaactggacaggcttaacaaacctgcttgatgtaccagggcttaatggactgagtgacactataatccttgatatcatcagcaactatttggtgttacctaaccggataaccgttcccctggtgtctgaggtgcaaattgcccaactcagattcccggttcccaaaggcgtgctgcgaattcacttcattgaggcccaggacctgcaggggaaggatacctatctgaaaggactggtgaagggcaagtctgacccgtacggtattattcgggttggtaatcagatctttcagagtagagtcatcaaagaaaacttgtcccccaaatggaacgaggtgtatgaggctttggtctatgagcacccagggcaagagctagaaatcgaactgttcgacgaagaccccgacaaggacgactttctaggcagcctgatgattgacctgatcgaagtggagaaggaacgcctgctagacgaatggttcaccctggacgaggtccccaaaggcaagttgcatctgagactggagtggctcaccctgatgccaaacgcttctaacctggataaagttctgactgacattaaagctgataaagaccaggccaatgatggcctgagctctgctctcctgatcctctatctggatagcgcacgaaatttacctagcgggaaaaagataagcagcaatcctaatcctgttgtgcagatgagcgtggggcataaggcccaagaatccaagatccggtataaaacaaatgagcccgtctgggaggagaacttcaccttttttatccacaatccaaaacgccaggacctcgaagtcgaagttcgggatgaacagcaccaatgtagtctgggaaatttgaaggtcccactttcacaattgctgaccagcgaggacatgactgtgagccagaggtttcaactgagcaactctggtcctaacagcacaatcaagatgaagatcgccctacgggtgcttcacctcgagaagagggagaggccccctgatcaccagcatagtgcccaggtcaagcggccatccgtctcaaaagaagggcgcaagaccagtattaagagtcacatgagcggatcacctggacctggcggtagtaacaccgcaccatcaacccctgtgatcgggggctctgataaacctggtatggaagagaaggctcaaccacccgaggccggtccccagggcctgcatgacctcggacgctcttcctcctcacttctggcatcccctggacacatcagcgtaaaagaacccacccccagcatcgctagcgatatttccctgccaattgcaactcaagaactccgacagcggcttaggcagctcgaaaacggtacaacattagggcagtctcccctcgggcagatccaattaacaattaggcattcctcccagcggaacaaactcatagtagtggtccacgcctgccgtaatctgatcgcatttagtgaagacggctcggatccttatgtgcggatgtatctcctgccggacaaacgcagatctgggcgaagaaagactcacgtgagcaagaagactttaaatcccgtcttcgaccaatcattcgattttagcgtctctctcccggaagttcaacgcaggaccctggatgtggctgtaaagaatagcggtggctttctatctaaggataaaggactgctgggaaaggttctcgtagctctggcctctgaggagctcgctaagggctggacgcaatggtacgacctgaccgaagacggcacaagaccacaggccatgacctag

SEQ ID NO: 205381 - DNA, 672 bp, Artificial Sequence
  derived and/or modified sequence
atgcctgttttcccgccctgtgtgctgcaagttcgagatgagcaacaccaatgctcccttggcaatttaaaggtgcctctcagtcagcttctgacatccgaggatatgacagtatcacagcgcttccagctaagcaacagtgggccaaactcgaccatcaaaatgaagatcgctctcagggtgctgcacctggagaagcgagagcggcctccagatcaccagcactcagctcaggtgaaacgtccgtctgtttctaaagagggacgcaagacttcaattaagagccatatgtcgggcagccccggccccgggggcagtaacaccgctccctctactcccgtgattggcggcagtgataagccagggatggaagagaaagctcagccacctgaggcggggccccagggtcttcatgacctcggccgatcttcttcgagcttgctggctagtcctggccacatctccgtcaaagagccaacgccatcaattgctagcgatatcagtctccccatcgctacacaagagctcagacagaggctgagacagctagaaaatggaacaacattggggcagtcaccattagggcagattcagctaaccattagacattcctcacagaaacaagcttatcgagggcgtgcatgtctgcaaaagccccactgcctgctatag

SEQ ID NO: 205382 - DNA, 2829 bp, Artificial Sequence
  derived and/or modified sequence
atgactgcaaacagggacgctgcactgtcatcccaccggcaccctggttgtgcgcagcgtcctcgtacacctactttcgctagcagctcacagcgacggtccgctttcggatttgatgacgggaatttcccaggtctgggcgaacgcagccacgccccggggtcaagattgggcgcgcggcggagagctaaaactgccagagggctccgcggtcatcgacaaagaggcgccggcgctgggctgtctcgccctggttcggctcgggccccctctccccccaggccgggtgctccagaaaacccaggaggcgtgctgtccgttgaactgcctggcctccttgcccaactggctcgcagctttgctctgctgttaccagtttatgccctcggctacctgggattgagcttcagctgggtgctgttggccctggccctgctggcttggtgtcggaggtcacgcggactgaaggccctgaggctgtgccgtgcactggccttgctggaagacgaagaacgtgtcgtccggttaggggtaagagcttgtgatctgcccgcctgggtgcacttccccgatacagagagagcagaatggttgaataagactgtgaagcacatgtggcccttcatctgccagttcatcgagaaactattccgggagaccattgagcctgccgtgcggggcgctaatactcaccttagcaccttctcattcacaaaggttgacgtgggacagcagccacttagaattaacggggtgaaagtgtacaccgagaatgtggacaagcggcagattatcttggaccttcagatttcctttgtgggaaattgcgaaattgaccttgagattaagaggtacttctgtagggcgggcgtgaagtcgattcaaattcacggtacaatgcgggtcattttagagcctctgataggagatatgccgctcgtaggggctttatcaatctttttcctgaggaagcctcttttagagatcaattggactggattaaccaacctcctggatgttcctggcctgaacggtctttctgacacaatcatactggatataatttccaactacctggtcctgccaaatcgcatcactgttcctctggtgtcagaagtccagattgcccagcttcggttcccggttccaaagggtgtactgagaatccacttcattgaagctcaggatcttcagggcaaagatacatatcttaaaggtcttgtaaagggtaagagtgatccgtatgggatcatccgcgtgggcaaccaaatctttcagtcacgtgttattaaggagaatctctcgcctaaatggaacgaagtgtatgaggccctggtgtacgaacatcccgggcaggagttggaaatcgagctatttgatgaagaccctgacaaggacgactttctgggcagcctgatgatcgatttaatcgaggttgagaaagagagattgctggacgagtggttcaccctagacgaagtccctaaagggaaactgcaccttaggttagagtggctcacactcatgccaaatgcctcaaaccttgataaagttcttaccgacataaaagccgataaagaccaggctaacgacgggctatccagtgctctgctgatcttgtatctcgacagcgccagaaatctcccttcaaacccactggagttcaacccagatgtactaaaaaagacagctgtgcagcgtgctttaaaatctgggaaaaaaatcagttccaacccaaacccagtggtgcagatgagtgtgggccacaaagcccaggagagcaagatccggtacaaaacgaacgagcccgtgtgggaagagaatttcaccttcttcatccacaacccgaaaaggcaagacctggaggtcgaagtcagggatgaacagcaccagtgctccctaggcaatctaaaagtgcccttatcccaactactcacaagcgaggacatgacggtgagccaacgcttccagctgtctaacagcggccctaacagcaccatcaagatgaagatcgcactgcgtgtgctacatttggagaagcgcgagcggcctcccgaccatcagcacagcgcccaagtgaaacgaccctctgtgtctaaagaaggccgcaagacatccatcaagtcccacatgagtggctctcctggcccaggggggtcaaacacagccccatctacacccgttatcggtggatctgacaaacccggaatggaggagaaggctcagcctccagaagccggtcctcaggggctccatgatctggggaggtcttcgagctctctgctggcctcccctgggcacatctctgttaaggaacccactccttctattgcttcggacatttccctcccgatagctacgcaggagcttaggcagagactccgacagctggagaatggaaccaccctggggcagtctcccctcggccagatccaattgaccattcgacatagttcccagaggaacaagttgattgtagtggtccatgcctgtagaaatctgatcgcattcagcgaagatggatccgacccctatgttaggatgtacctgttgcctgacaagcgccgaagcgggagaaggaagactcacgtcagcaagaagacactgaatccggtgtttgatcagtcatttgacttcagcgtctcattgcctgaggtgcaacggcgaactctcgatgtggcagtaaaaaattctggcggctttctttctaaagataaaggcctattggggaaagtactagtcgccctggcctcggaagaacttgcgaaagggtggactcaatggtatgacctcacagaagacggtaccaggccacaggccatgacctag

SEQ ID NO: 205383 - DNA, 1584 bp, Artificial Sequence
  derived and/or modified sequence
atgtggcccttcatctgtcaatttattgagaagctgtttcgggagacaattgaacccgctgttagaggcgctaatacccacctgtcaaccttttcattcactaaagttgacgtgggacagcaacctctgcgaatcaatggcgtgaaggtgtacacagagaatgtcgataagcgtcagatcatactcgacctccagattagctttgtcggaaattgtgaaatcgatctggagattaagcggtatttctgtcgcgccggcgtgaagtctatacagatccacggcaccatgagagtcatactcgagccgctcattggggatatgcccttggtaggagcactgtccatctttttcttaaggaaaccactattggagataaattggacaggcctcactaaccttctggacgttccaggcctaaacgggctctcggacactataatcctggatatcatctccaactacctagtcctacctaaccggattaccgtgcctctggtctcagaggttcaaattgctcagctccgttttcccgttcccaaaggggtcttgaggatccactttatagaggcccaggacctgcaaggtaaagacacctacttgaagggtctcgtgaaaggtaagagcgatccttacggcattattcgcgtgggaaaccaaattttccagtctcgtgtgatcaaagagaatttgtccccgaaatggaatgaagtgtatgaagccctcgtgtacgaacacccagggcaggaacttgagatcgaactgttcgatgaggatccagataaggatgacttcctgggatctctaatgatcgatctcatagaggtggagaaagagaggctcctcgatgagtggtttacactggatgaggtccccaaggggaaactgcacctgaggcttgagtggctgaccttaatgccaaatgcttcaaacctcgacaaggtcctgactgacattaaagctgacaaggaccaagccaatgacggtctcagctccgctctgctgattctctatttggacagtgctcgaaatctgcccagcggcaagaagataagcagtaaccccaatcccgtcgtgcagatgagtgtggggcacaaggcacaggaaagcaaaatcaggtataagaccaacgagcccgtctgggaagagaactttacattttttatccacaaccccaagcggcaggatttggaagtggaggtaagggatgagcagcaccagtgttcacttggtaatctgaaggtgccattgagtcagcttttgacatcagaagacatgaccgtcagccagcggtttcagctctccaattccggccctaactccaccatcaaaatgaaaatagccttaagagttctacatctggagaaacgcgagcgaccaccggaccaccaacactccgcccaggtgaagcgcccaagtgtgtcaaaagaaggacgaaaaacctccatcaaaagtcacatgtccggctccccagggcccgggggaagcaacacagcccctgcaacctcccagtcaaggtcaagacctcctgcatctccccggacctcccgttgccctagccccccccgatcttgtggtaagggctag

SEQ ID NO: 205384 - DNA, 987 bp, Artificial Sequence
  derived and/or modified sequence
atgcctgtgttcccaccttgcgtactgcaagtccgcgacgagcagcatcagtgttccctgggtaatttaaaagttcccctttctcagctgttgacttcagaggatatgacagtctctcaaagatttcaactttcaaatagcggcccaaatagtacgattaagatgaaaatagccctaagggtcctgcacctcgagaagagagaaaggccaccagaccaccagcatagtgctcaggtaaagcgaccatctgtgtcaaaagaagggagaaaaacttccataaaatcccacatgtccggcagccctggaccgggtggctccaacacggcccctagcaccccagtcatcggaggctccgacaagccaggcatggaagaaaaggctcaacctcctgaagcgggccctcaaggcctccatgacctaggtaggagcagttcatctctgctagcgtcgccgggccatattagtgtgaaggagccaaccccatccattgcttctgacatctccttaccaatcgccacccaggagttacgacaacgtctgcggcagctggagaatggcactacacttggtcagtcacctcttggacagatccagttgacaataaggcattcttcccagcggaataagttaatagtcgtggtacacgcctgccggaatctaatcgctttctcagaggatggatcagatccatacgtgcgcatgtacctcctgcctgacaaacgccgaagcggtcggcgcaagactcatgtgagtaaaaaaactctgaatcccgtcttcgatcaatccttcgacttcagcgtgagcctgccagaggtccagaggagaaccctggatgtggccgttaaaaacagcggcgggttcctgagtaaggataagggtttgctaggcaaggtgctggtcgccctggcttccgaagaattagccaagggttggacacaatggtacgacctgacagaggacggcacgcgtccacaggcgatgacatag

SEQ ID NO: 205385 - DNA, 5960 bp, Artificial Sequence
  derived and/or modified sequence
agtatccaccccgcccgctcccggtgacgtgccagccccaggcccacgccgctcccgccccgcgtgatgacgccaccgtcccgggcggaggcgggcgtgcggcggagccgcgtcccctcagaggggcgctggcgcggggctgagccgcccgggatcagcgcgagcacccagcccgcctcggccgggagggcagcgcggcactgcggggcgatgagcggcgcccggggcgagggcccggaggcgggcgccggcggggctgggggccgcgcggcgcctgagaaccccgggggcgtgctgagcgtggagctgcccgggctgctggcgcagctggcgcggagcttcgcgctgctgctgcccgtgtacgcgctgggctacctggggctcagcttcagctgggttctcctcgcgctcgcgctgctcgcctggtgtcgccgcagccgcggcctcaaggccctgcgcctgtgccgcgcgctggcgctgctggaagacgaggagcgcgtcgtgcgcctgggggtgcgcgcctgcgacctgcccgcctgggttcattttccagacactgaaagagcagaatggctaaataagactgtaaaacacatgtggcctttcatttgccaatttatagagaagttgtttcgagaaactatagaaccagccgtgcggggagcaaacacccaccttagcacctttagtttcacgaaggtcgacgtgggccagcagcccctcaggatcaatggtgttaaggtatacactgaaaatgtagacaaaaggcaaattattttggaccttcagattagttttgtaggaaattgtgagattgatttggagatcaaacgatatttttgtagagctggtgtgaaaagtatccagattcatggtaccatgcgggtgatcctggaaccgttgattggagatatgcccttagttggagctttgtctatcttcttccttaggaaaccacttttagaaattaactggacaggactgacgaatcttctggatgtccctggattgaatggtttatcagatactatcattttggatataatatcaaactatctggtgcttcccaatcgaatcaccgttccacttgtcagtgaagttcaaatagctcagttgcggtttcctgtaccaaagggtgttctaaggatacattttattgaagctcaggatcttcaggggaaagacacttaccttaagggacttgtcaagggaaagtcagacccctatggaatcattagagttggcaaccaaatcttccaaagcagagtcatcaaggagaacctcagtccaaagtggaatgaagtctatgaggctttagtgtatgaacatcctggacaagaattagagattgagctctttgatgaagacccagacaaggatgactttttaggaagtcttatgattgacctcattgaagttgaaaaggagcgccttttagatgaatggttcactctggacgaggttcccaaggggaagctacacttgagactggagtggctcacgttaatgccaaatgcgtcaaacctcgacaaggtgctaacagacatcaaagctgacaaagaccaagccaacgatggtctttcctctgcattgctgatcttgtacttggattcagcaaggaaccttccgtcagggaagaaaataagcagcaacccaaatcctgttgtccagatgtcagttgggcacaaggcccaggagagcaagattcgatacaaaaccaatgaacctgtgtgggaggaaaacttcactttcttcattcacaatcccaagcgccaggaccttgaagttgaggtcagagacgagcagcaccagtgttccctggggaacctgaaggtccccctcagccagctgctcaccagtgaggacatgactgtgagccagcgcttccagctcagtaactcgggtccaaacagcaccatcaagatgaagattgccctgcgggtgctccatctcgaaaagcgagaaaggcctccagaccaccaacactcagctcaagtcaaacgtccctctgtgtccaaagaggggaggaaaacatccatcaaatctcatatgtctgggtctccaggccctggtggcagcaacacagctccatccacaccagtcattgggggcagtgataagcctggtatggaagaaaaggcccagccccctgaggccggccctcaggggctgcacgacctgggcagaagctcctccagcctcctggcctccccaggccacatctcagtcaaggagccgacccccagcatcgcctcggacatctcgctgcccatcgccacccaggagctgcggcaaaggctgaggcagctggaaaacgggacgaccctgggacagtctccactggggcagatccagctgaccatccggcacagctcgcagagaaacaagcttatcgtggtcgtgcatgcctgcagaaacctcattgccttctctgaagacggctctgacccctatgtccgcatgtatttattaccagacaagaggcggtcaggaaggaggaaaacacacgtgtcaaagaaaacattaaatccagtgtttgatcaaagctttgatttcagtgtttcgttaccagaagtgcagaggagaacgctcgacgttgccgtgaagaacagtggcggcttcctgtccaaagacaaagggctccttggcaaagtattggttgctctggcatctgaagaacttgccaaaggctggacccagtggtatgacctcacggaagatgggacgaggcctcaggcgatgacatagccgcagcaggcaggaggcgtcctcttcagcgtagctctccacctctacccggaacacaccctctcacagacgtaccaatgttatttttataatttcatggatttagttatacataccttaatagttttataaaattgttgacatttcaggcaaatttggccaatattatcattgaattttctgtgttggatttcctctaggatttcgccagttcctacaacgtgcagtagggcggcggtagctcttgtgtctgtggactctgctcagctgtgtccgtaggagtcggatgtgtctgtgctttattatggccttgtttatatatcactgaggtatactatgccatgtaaatagactattttttataatctttacatgctggtttaaattcagaaggaaatagatcaaggaaatatatatattttcttctaaaacttattaaattcgtgtgacaaataatcattttcatcttggcagcaaaaagttctcagtgacctattttgtggtgtttctttttgaaaagaaaagctgaaatattattaaatgctagtatgtttctgcccattatgaaagatgaaataaagtattcaaaatattaacattttcataaatataaggatgtattattgagaagtaagttgaagggcttataaggaaaaatgttttataactgagtaatatattaagagaattgtcatggttcataaatcacattatgctaatctgaaatttcttacataaaaatgaagtgtcttatgtttattttaattgctgttgtaacttactcatgaaacagtatacagacaccttgtacttttcctcaactgtaagagcagactttcaatgttagcaattaagctgttgtcaaacaatcagtcatgagctttgttaattttcaatgttttcccagcctataaaaaaaggaaggtacacgttgtccttttaaaggttgtgaggtagattggagtgagtagacaggatattgcattaaaaattgaaagctcgatctcattattgtcaggaacccccagtgtgacctcacacataggatgtgggacctttgagccgatgtgcactggccaccaccagggttgggggcgccacagctgcgagcccggcccctgctgttctcagcagccacttcccaggctgcctcactttatgccatgactgaccttaatattgggatattgttatgcaatttttatcctgtttagactgttaaaagcaggtttctgtacttaagagtcccccagacctcctgtgaggtgaggctctgttgcagtgtcgtaggctgtgtgtgtctgtaaagaaagaatgcacatatgtagacgattaagtgtatattataagctatatgctgaaaatggcttccatagccatgagaacatcttaaaactatgtgtaaatatattaaggaaagtatagctttgtaatttaaattggagcttttagcttgtttcatggaactatacaacttgtgggtaactcacatgaccaaacaaaccaaagtgcctgtgacggggcgggtggcgtctacccaccctcccttctagcagattcttattttgtttgaatttataaacaaggctggtggctgtctacccaccctcccttctagcagattttgattttgtttcaatttataacttacactttgaaccatgggtttacttataatggagtctgtagcttcacagcatatttcatgtaatcataaagaccagtatattccctcctgctgaatgacatgcgactgtaaagcctctttataaaccatttccaatgttagtatataggattatttgggaagcgtatcaatacctttatagacaaatacgaacatgtatgcacacaaaacatttaactatggtatttatggaagacaggtaacaacattaaatctagttgctttcccttagtattagatttgttgagggttttttaaaaatcaggtctgttgaaagtcttctgtcataatctataaagcagcagcactcatggaaattgtagcatgccagtaatttttaccaacatcccatacatctgagttctgcagtccagtgtgtaatccgctccatgtgtattttgcttaatggaatgctttatttaagcacttaggcagagtagacacaattaaaggtacaaagcccagaggaagtggtagagcagcaccgtgcctgccctgaggcagtggagtcagtagcgctgtccccagggccttgagtgcctggaggtgcttggcctccagtagctgcctccattctcttttaaaaaaagggggtgattctgaggcactgaagtgcctcccagatgtggaggagtgaagccaccatcgaggccacactcagcactccaggatcccagcgatgtcagacactcttgagttgtcaaaacgttaattttcagttttaaataatcagtttatctaagaaaagggaattttaacttttctaccttgagccaagccaatgaagggaaaattaattaacttagtaaatttgaagtgcagctctgttagctcgtacatgtgggttcttatcctgatcctgtgccttaaagtaggaaggtgtttccaagttcagattaaaatagaagcagctggccgggtgcggtggctcacgcctgtaatcccagcactttgggaggccgaggcgggcggatgacctgaggtcaggagttcaagaccagcctggccaacatggagaaaccccatctttactaaaaatacaaaaattagccgggcgtggtggtggagcgcacgcctgtagtcccagctactcgggaggctgaggcaggagaattgcttgaacccaggaggcggaggttgcagtgagccaagatcgcaccactgcactccagcctgggcaacagagtgagactccgtctcaaaaaataaataaaatagaagcagccttgtaactgtatttaccatgataatatattctgcacggtaagaattccttttacagacattctttatcaagaggtcggcccttctttttcaggcacataagccaaatgcaggcctgtgtgtagctgtgtgttttttctgtggttgccgcatttattccacctccagctggaccccccactgcaaatagagaacagcggtgggggatgggggttaaaaagtagagaacctcctttctgttcaactaatttcacgtgacagtgcatgtatttattcaataaaacctttatgttagctcagt

SEQ ID NO: 205386 - DNA, 2088 bp, Artificial Sequence
  derived and/or modified sequence
tgtgtctttgttaggagatttcataccatgttaatcattatggaaacactacttaagagaatatggctgaaatatgtttgggtttttaaaaatatctttcttacagactaatattgtctgtggacctttctacatttgtttgtttgtttttgaaacagttttgtcacccaggctggagtgcagtggcgcgatatcagctcactgcagccgcctcctcccaggttcaagcgattctcatgcctcagcctcttgagtggctgggactacaggtgcgcgccaccatgcccaactaattttttgtatttttagtagagatgaggtttcaccatgttggccaggctggtctcgaacccctggcctcaggtgatctgagcctcccaaagtgctgaaattacaggcgtgagccaccccacctggcccctttctacattttctaagttcctatctctgaggacaaagggtcaggagcgtagacaacgtagaaaggttctgcagacatgatcctagttatgccagtgtttccaccctgtgttttgcaggtcagagacgagcagcaccagtgttccctggggaacctgaaggtccccctcagccagctgctcaccagtgaggacatgactgtgagccagcgcttccagctcagtaactcgggtccaaacagcaccatcaagatgaagattgccctgcgggtgctccatctcgaaaagcgagaaaggcctccagaccaccaacactcagctcaagtcaaacgtccctctgtgtccaaagaggggaggaaaacatccatcaaatctcatatgtctgggtctccaggccctggtggcagcaacacagctccatccacaccagtcattgggggcagtgataagcctggtatggaagaaaaggcccagccccctgaggccggccctcaggggctgcacgacctgggcagaagctcctccagcctcctggcctccccaggccacatctcagtcaaggagccgacccccagcatcgcctcggacatctcgctgcccatcgccacccaggagctgcggcaaaggctgaggcagctggaaaacgggacgaccctgggacagtctccactggggcagatccagctgaccatccggcacagctcgcagaaacaagcttatcgtggtcgtgcatgcctgcagaaacctcattgccttctctgaagacggctctgacccctatgtccgcatgtatttattaccagacaagaggcggtcaggaaggaggaaaacacacgtgtcaaagaaaacattaaatccagtgtttgatcaaagctttgatttcagtgtttcgttaccagaagtgcagaggagaacgctcgacgttgccgtgaagaacagtggcggcttcctgtccaaagacaaagggctccttggcaaagtattggttgctctggcatctgaagaacttgccaaaggctggacccagtggtatgacctcacggaagatgggacgaggcctcaggcgatgacatagccgcagcaggcaggaggcgtcctcttcagcgtagctctccacctctacccggaacacaccctctcacagacgtaccaatgttatttttataatttcatggatttagttatacataccttaatagttttataaaattgttgacatttcaggcaaatttggccaatattatcattgaattttctgtgttggatttcctctaggatttcgccagttcctacaacgtgcagtagggcggcggtagctcttgtgtctgtggactctgctcagctgtgtccgtaggagtcggatgtgtctgtgctttattatggccttgtttatatatcactgaggtatactatgccatgtaaatagactattttttataatctttacatgctggtttaaattcagaaggaaatagatcaaggaaatatatatattttcttctaaaacttattaaattcgtgtgacaaataatcattttcatcttggcagcaaaaagttctcagtgacctattttgtggtgtttctttttgaaaagaaaagctgaaatattattaaatgctagtatgtttctgcccattatgaaagatgaaataaagtattcaaaatatt

SEQ ID NO: 205387 - DNA, 6038 bp, Artificial Sequence
  derived and/or modified sequence
atgaccgcaaacagggacgccgccctctcatcccaccgccaccccggctgcgctcagcggccgcgcacccccacgtttgccagcagctcccagaggcggtcagcctttgggtttgacgacggcaacttcccgggcctcggcgagcgcagccacgcacccggaagccgcctcggggcgcgacgccgagccaaaaccgcccgcgggctccgaggccacaggcaaaggggcgctggcgcggggctgagccgcccgggatcagcgcgagcacccagcccgcctcggccgggagcgcctgagaaccccgggggcgtgctgagcgtggagctgcccgggctgctggcgcagctggcgcggagcttcgcgctgctgctgcccgtgtacgcgctgggctacctggggctcagcttcagctgggttctcctcgcgctcgcgctgctcgcctggtgtcgccgcagccgcggcctcaaggccctgcgcctgtgccgcgcgctggcgctgctggaagacgaggagcgcgtcgtgcgcctgggggtgcgcgcctgcgacctgcccgcctgggttcattttccagacactgaaagagcagaatggctaaataagactgtaaaacacatgtggcctttcatttgccaatttatagagaagttgtttcgagaaactatagaaccagccgtgcggggagcaaacacccaccttagcacctttagtttcacgaaggtcgacgtgggccagcagcccctcaggatcaatggtgttaaggtatacactgaaaatgtagacaaaaggcaaattattttggaccttcagattagttttgtaggaaattgtgagattgatttggagatcaaacgatatttttgtagagctggtgtgaaaagtatccagattcatggtaccatgcgggtgatcctggaaccgttgattggagatatgcccttagttggagctttgtctatcttcttccttaggaaaccacttttagaaattaactggacaggactgacgaatcttctggatgtccctggattgaatggtttatcagatactatcattttggatataatatcaaactatctggtgcttcccaatcgaatcaccgttccacttgtcagtgaagttcaaatagctcagttgcggtttcctgtaccaaagggtgttctaaggatacattttattgaagctcaggatcttcaggggaaagacacttaccttaagggacttgtcaagggaaagtcagacccctatggaatcattagagttggcaaccaaatcttccaaagcagagtcatcaaggagaacctcagtccaaagtggaatgaagtctatgaggctttagtgtatgaacatcctggacaagaattagagattgagctctttgatgaagacccagacaaggatgactttttaggaagtcttatgattgacctcattgaagttgaaaaggagcgccttttagatgaatggttcactctggacgaggttcccaaggggaagctacacttgagactggagtggctcacgttaatgccaaatgcgtcaaacctcgacaaggtgctaacagacatcaaagctgacaaagaccaagccaacgatggtctttcctctgcattgctgatcttgtacttggattcagcaaggaaccttccgagtaacccattagaatttaaccccgatgtcttgaagaagactgcagttcagagagctttaaagtcagggaagaaaataagcagcaacccaaatcctgttgtccagatgtcagttgggcacaaggcccaggagagcaagattcgatacaaaaccaatgaacctgtgtgggaggaaaacttcactttcttcattcacaatcccaagcgccaggaccttgaagttgaggtcagagacgagcagcaccagtgttccctggggaacctgaaggtccccctcagccagctgctcaccagtgaggacatgactgtgagccagcgcttccagctcagtaactcgggtccaaacagcaccatcaagatgaagattgccctgcgggtgctccatctcgaaaagcgagaaaggcctccagaccaccaacactcagctcaagtcaaacgtccctctgtgtccaaagaggggaggaaaacatccatcaaatctcatatgtctgggtctccaggccctggtggcagcaacacagctccatccacaccagtcattgggggcagtgataagcctggtatggaagaaaaggcccagccccctgaggccggccctcaggggctgcacgacctgggcagaagctcctccagcctcctggcctccccaggccacatctcagtcaaggagccgacccccagcatcgcctcggacatctcgctgcccatcgccacccaggagctgcggcaaaggctgaggcagctggaaaacgggacgaccctgggacagtctccactggggcagatccagctgaccatccggcacagctcgcagagaaacaagcttatcgtggtcgtgcatgcctgcagaaacctcattgccttctctgaagacggctctgacccctatgtccgcatgtatttattaccagacaagaggcggtcaggaaggaggaaaacacacgtgtcaaagaaaacattaaatccagtgtttgatcaaagctttgatttcagtgtttcgttaccagaagtgcagaggagaacgctcgacgttgccgtgaagaacagtggcggcttcctgtccaaagacaaagggctccttggcaaagtattggttgctctggcatctgaagaacttgccaaaggctggacccagtggtatgacctcacggaagatgggacgaggcctcaggcgatgacatagccgcagcaggcaggaggcgtcctcttcagcgtagctctccacctctacccggaacacaccctctcacagacgtaccaatgttatttttataatttcatggatttagttatacataccttaatagttttataaaattgttgacatttcaggcaaatttggccaatattatcattgaattttctgtgttggatttcctctaggatttcgccagttcctacaacgtgcagtagggcggcggtagctcttgtgtctgtggactctgctcagctgtgtccgtaggagtcggatgtgtctgtgctttattatggccttgtttatatatcactgaggtatactatgccatgtaaatagactattttttataatctttacatgctggtttaaattcagaaggaaatagatcaaggaaatatatatattttcttctaaaacttattaaattcgtgtgacaaataatcattttcatcttggcagcaaaaagttctcagtgacctattttgtggtgtttctttttgaaaagaaaagctgaaatattattaaatgctagtatgtttctgcccattatgaaagatgaaataaagtattcaaaatattaacattttcataaatataaggatgtattattgagaagtaagttgaagggcttataaggaaaaatgttttataactgagtaatatattaagagaattgtcatggttcataaatcacattatgctaatctgaaatttcttacataaaaatgaagtgtcttatgtttattttaattgctgttgtaacttactcatgaaacagtatacagacaccttgtacttttcctcaactgtaagagcagactttcaatgttagcaattaagctgttgtcaaacaatcagtcatgagctttgttaattttcaatgttttcccagcctataaaaaaaggaaggtacacgttgtccttttaaaggttgtgaggtagattggagtgagtagacaggatattgcattaaaaattgaaagctcgatctcattattgtcaggaacccccagtgtgacctcacacataggatgtgggacctttgagccgatgtgcactggccaccaccagggttgggggcgccacagctgcgagcccggcccctgctgttctcagcagccacttcccaggctgcctcactttatgccatgactgaccttaatattgggatattgttatgcaatttttatcctgtttagactgttaaaagcaggtttctgtacttaagagtcccccagacctcctgtgaggtgaggctctgttgcagtgtcgtaggctgtgtgtgtctgtaaagaaagaatgcacatatgtagacgattaagtgtatattataagctatatgctgaaaatggcttccatagccatgagaacatcttaaaactatgtgtaaatatattaaggaaagtatagctttgtaatttaaattggagcttttagcttgtttcatggaactatacaacttgtgggtaactcacatgaccaaacaaaccaaagtgcctgtgacggggcgggtggcgtctacccaccctcccttctagcagattcttattttgtttgaatttataaacaaggctggtggctgtctacccaccctcccttctagcagattttgattttgtttcaatttataacttacactttgaaccatgggtttacttataatggagtctgtagcttcacagcatatttcatgtaatcataaagaccagtatattccctcctgctgaatgacatgcgactgtaaagcctctttataaaccatttccaatgttagtatataggattatttgggaagcgtatcaatacctttatagacaaatacgaacatgtatgcacacaaaacatttaactatggtatttatggaagacaggtaacaacattaaatctagttgctttcccttagtattagatttgttgagggttttttaaaaatcaggtctgttgaaagtcttctgtcataatctataaagcagcagcactcatggaaattgtagcatgccagtaatttttaccaacatcccatacatctgagttctgcagtccagtgtgtaatccgctccatgtgtattttgcttaatggaatgctttatttaagcacttaggcagagtagacacaattaaaggtacaaagcccagaggaagtggtagagcagcaccgtgcctgccctgaggcagtggagtcagtagcgctgtccccagggccttgagtgcctggaggtgcttggcctccagtagctgcctccattctcttttaaaaaaagggggtgattctgaggcactgaagtgcctcccagatgtggaggagtgaagccaccatcgaggccacactcagcactccaggatcccagcgatgtcagacactcttgagttgtcaaaacgttaattttcagttttaaataatcagtttatctaagaaaagggaattttaacttttctaccttgagccaagccaatgaagggaaaattaattaacttagtaaatttgaagtgcagctctgttagctcgtacatgtgggttcttatcctgatcctgtgccttaaagtaggaaggtgtttccaagttcagattaaaatagaagcagctggccgggtgcggtggctcacgcctgtaatcccagcactttgggaggccgaggcgggcggatgacctgaggtcaggagttcaagaccagcctggccaacatggagaaaccccatctttactaaaaatacaaaaattagccgggcgtggtggtggagcgcacgcctgtagtcccagctactcgggaggctgaggcaggagaattgcttgaacccaggaggcggaggttgcagtgagccaagatcgcaccactgcactccagcctgggcaacagagtgagactccgtctcaaaaaataaataaaatagaagcagccttgtaactgtatttaccatgataatatattctgcacggtaagaattccttttacagacattctttatcaagaggtcggcccttctttttcaggcacataagccaaatgcaggcctgtgtgtagctgtgtgttttttctgtggttgccgcatttattccacctccagctggaccccccactgcaaatagagaacagcggtgggggatgggggttaaaaagtagagaacctcctttctgttcaactaatttcacgtgacagtgcatgtatttattcaataaaacctttatgttagctc

SEQ ID NO: 205388 - DNA, 2178 bp, Artificial Sequence
  derived and/or modified sequence
agtatccaccccgcccgctcccggtgacgtgccagccccaggcccacgccgctcccgccccgcgtgatgacgccaccgtcccgggcggaggcgggcgtgcggcggagccgcgtcccctcagaggggcgctggcgcggggctgagccgcccgggatcagcgcgagcacccagcccgcctcggccgggagggcagcgcggcactgcggggcgatgagcggcgcccggggcgagggcccggaggcgggcgccggcggggctgggggccgcgcggcgcctgagaaccccgggggcgtgctgagcgtggagctgcccgggctgctggcgcagctggcgcggagcttcgcgctgctgctgcccgtgtacgcgctgggctacctggggctcagcttcagctgggttctcctcgcgctcgcgctgctcgcctggtgtcgccgcagccgcggcctcaaggccctgcgcctgtgccgcgcgctggcgctgctggaagacgaggagcgcgtcgtgcgcctgggggtgcgcgcctgcgacctgcccgcctgggttcattttccagacactgaaagagcagaatggctaaataagactgtaaaacacatgtggcctttcatttgccaatttatagagaagttgtttcgagaaactatagaaccagccgtgcggggagcaaacacccaccttagcacctttagtttcacgaaggtcgacgtgggccagcagcccctcaggatcaatggtgttaaggtatacactgaaaatgtagacaaaaggcaaattattttggaccttcagattagttttgtaggaaattgtgagattgatttggagatcaaacgatatttttgtagagctggtgtgaaaagtatccagattcatggtaccatgcgggtgatcctggaaccgttgattggagatatgcccttagttggagctttgtctatcttcttccttaggaaaccacttttagaaattaactggacaggactgacgaatcttctggatgtccctggattgaatggtttatcagatactatcattttggatataatatcaaactatctggtgcttcccaatcgaatcaccgttccacttgtcagtgaagttcaaatagctcagttgcggtttcctgtaccaaagggtgttctaaggatacattttattgaagctcaggatcttcaggggaaagacacttaccttaagggacttgtcaagggaaagtcagacccctatggaatcattagagttggcaaccaaatcttccaaagcagagtcatcaaggagaacctcagtccaaagtggaatgaagtctatgaggctttagtgtatgaacatcctggacaagaattagagattgagctctttgatgaagacccagacaaggatgactttttaggaagtcttatgattgacctcattgaagttgaaaaggagcgccttttagatgaatggttcactctggacgaggttcccaaggggaagctacacttgagactggagtggctcacgttaatgccaaatgcgtcaaacctcgacaaggtgctaacagacatcaaagctgacaaagaccaagccaacgatggtctttcctctgcattgctgatcttgtacttggattcagcaaggaaccttccgtcagggaagaaaataagcagcaacccaaatcctgttgtccagatgtcagttgggcacaaggcccaggagagcaagattcgatacaaaaccaatgaacctgtgtgggaggaaaacttcactttcttcattcacaatcccaagcgccaggaccttgaagttgaggtcagagacgagcagcaccagtgttccctggggaacctgaaggtccccctcagccagctgctcaccagtgaggacatgactgtgagccagcgcttccagctcagtaactcgggtccaaacagcaccatcaagatgaagattgccctgcgggtgctccatctcgaaaagcgagaaaggcctccagaccaccaacactcagctcaagtcaaacgtccctctgtgtccaaagaggggaggaaaacatccatcaaatctcatatgtctgggtctccaggccctggtggcagcaacacagctccagccacatctcagtcaaggagccgacccccagcatcgcctcggacatctcgctgcccatcgccacccaggagctgcggcaaaggctga

SEQ ID NO: 205389 - DNA, 2090 bp, Artificial Sequence
  derived and/or modified sequence
tgtgtctttgttaggagatttcataccatgttaatcattatggaaacactacttaagagaatatggctgaaatatgtttgggtttttaaaaatatctttcttacagactaatattgtctgtggacctttctacatttgtttgtttgtttttgaaacagttttgtcacccaggctggagtgcagtggcgcgatatcagctcactgcagccgcctcctcccaggttcaagcgattctcatgcctcagcctcttgagtggctgggactacaggtgcgcgccaccatgcccaactaattttttgtatttttagtagagatgaggtttcaccatgttggccaggctggtctcgaacccctggcctcaggtgatctgagcctcccaaagtgctgaaattacaggcgtgagccaccccacctggcccctttctacattttctaagttcctatctctgaggacaaagggtcaggagcgtagacaacgtagaaaggttctgcagacatgatcctagttatgccagtgtttccaccctgtgttttgcaggtcagagacgagcagcaccagtgttccctggggaacctgaaggtccccctcagccagctgctcaccagtgaggacatgactgtgagccagcgcttccagctcagtaactcgggtccaaacagcaccatcaagatgaagattgccctgcgggtgctccatctcgaaaagcgagaaaggcctccagaccaccaacactcagctcaagtcaaacgtccctctgtgtccaaagaggggaggaaaacatccatcaaatctcatatgtctgggtctccaggccctggtggcagcaacacagctccatccacaccagtcattgggggcagtgataagcctggtatggaagaaaaggcccagccccctgaggccggccctcaggggctgcacgacctgggcagaagctcctccagcctcctggcctccccaggccacatctcagtcaaggagccgacccccagcatcgcctcggacatctcgctgcccatcgccacccaggagctgcggcaaaggctgaggcagctggaaaacgggacgaccctgggacagtctccactggggcagatccagctgaccatccggcacagctcgcagagaaacaagcttatcgtggtcgtgcatgcctgcagaaacctcattgccttctctgaagacggctctgacccctatgtccgcatgtatttattaccagacaagaggcggtcaggaaggaggaaaacacacgtgtcaaagaaaacattaaatccagtgtttgatcaaagctttgatttcagtgtttcgttaccagaagtgcagaggagaacgctcgacgttgccgtgaagaacagtggcggcttcctgtccaaagacaaagggctccttggcaaagtattggttgctctggcatctgaagaacttgccaaaggctggacccagtggtatgacctcacggaagatgggacgaggcctcaggcgatgacatagccgcagcaggcaggaggcgtcctcttcagcgtagctctccacctctacccggaacacaccctctcacagacgtaccaatgttatttttataatttcatggatttagttatacataccttaatagttttataaaattgttgacatttcaggcaaatttggccaatattatcattgaattttctgtgttggatttcctctaggatttcgccagttcctacaacgtgcagtagggcggcggtagctcttgtgtctgtggactctgctcagctgtgtccgtaggagtcggatgtgtctgtgctttattatggccttgtttatatatcactgaggtatactatgccatgtaaatagactattttttataatctttacatgctggtttaaattcagaaggaaatagatcaaggaaatatatatattttcttctaaaacttattaaattcgtgtgacaaataatcattttcatcttggcagcaaaaagttctcagtgacctattttgtggtgtttctttttgaaaagaaaagctgaaatattattaaatgctagtatgtttctgcccattatgaaagatgaaataaagtattcaaaatatt

SEQ ID NO: 205390 - DNA, 2682 bp, Artificial Sequence
  derived and/or modified sequence
atgaccccacccagcagagctgaggccggcgtgcggcgcagccgggtgcccagcgagggccgctggagaggagctgagcccccaggcatcagcgccagcacccagcctgccagcgctggccgggccgcccggcactgtggggccatgtctggggcccggggggagggccctgaggccggggccggcggggccggcggccgggccgccccagaaaatcctggaggagtgctgtctgtggagctgcccggcctgctggcccagctggcccggagctttgccctgctgctgcctgtgtatgccctgggctacctgggcctgtccttctcctgggtgctgctggccctggccctgctggcctggtgccgccgcagccggggcctgaaggccctgcggctgtgccgggccctggccctgctggaggatgaggagcgggtggtgcggctgggcgtgcgggcctgtgacctgcctgcctgggtgcacttcccagacacagaaagagctgagtggctgaacaagacagtgaagcacatgtggcccttcatctgccagttcatcgagaagctgttccgggagaccatcgagcctgctgtgcggggggccaacacccacctgagcaccttctccttcaccaaggtggatgtgggccagcagcccctgcgcatcaacggggtgaaggtgtacacagaaaatgtggacaagaggcagatcatcctggacctgcagatcagctttgtgggcaactgtgaaattgacctggagatcaagcgctacttctgcagagctggggtgaagagcatccagatccacggcaccatgagggtcatcctggagcccctcatcggggacatgcccctggtgggcgccctgagcatcttcttcctgaggaagcccctgctggagatcaactggacaggcctgaccaacctgctggatgtgcccggcctgaatggcctgagtgacaccatcatcctggacatcatcagcaactacctggtgctgcccaaccgcatcaccgtgcccctggtgtctgaggtgcagatcgcccagctgcgcttccctgtgcccaagggcgtgctgcgcatccacttcatcgaggcccaggacctgcagggcaaggacacctacctgaagggcctggtgaagggcaagagtgacccctacggcatcatccgggtgggcaaccagatcttccagagcagggtcatcaaggagaacctgagccccaagtggaatgaggtgtatgaggccctggtgtatgagcaccctggccaggagctggagattgagctgtttgatgaagatcctgacaaggatgacttcctgggcagcctgatgattgacctgattgaggtggagaaggagcggctgctggatgagtggttcaccctggatgaggtgcccaagggcaagctgcacctgcggctggagtggctgaccctgatgcccaatgccagcaacctggacaaggtgctgacagacatcaaggctgacaaggaccaggccaatgatggcctgagcagcgccctgctgatcctgtacctggacagcgccaggaacctgcccagcggcaagaagatcagcagcaaccccaaccctgtggtgcagatgtctgtgggccacaaggcccaggagagcaagatccgctacaagaccaatgaacctgtgtgggaggagaacttcaccttcttcatccacaaccccaagaggcaggacctggaggtggaggtgagagatgagcagcaccagtgcagcctgggcaacctgaaggtgcccctgagccagctgctgaccagcgaggacatgacagtgtcccagcgcttccagctgagcaacagcggccccaacagcaccatcaagatgaagatcgccctgcgggtgctgcacctggagaagcgggagcggcccccagaccaccagcacagcgcccaggtgaagaggcccagcgtgtccaaggagggcaggaagaccagcatcaagagccacatgagcggcagccctggccctgggggcagcaacacagcccccagcacccctgtgattggaggcagtgacaagccaggcatggaggagaaggcccagcccccagaggccggcccccagggcctgcatgacctgggccgcagcagcagcagcctgctggccagccctggccacatctctgtgaaggagcccacccccagcatcgccagtgacatcagcctgcccatcgccacccaggagctgcggcagaggctgcggcagctggagaatggcaccaccctgggccagagccccctgggccagatccagctgaccatccgccacagcagccagaggaacaagctgattgtggtggtgcacgcctgcaggaacctgattgccttctctgaagatggcagtgacccctacgtgaggatgtacctgctgcctgacaagaggaggagcggccgcaggaagacccacgtgtccaagaagaccctgaaccctgtgtttgaccagagctttgacttctctgtgtccctgcctgaggtgcagaggaggaccctggatgtggccgtgaagaacagcggcggcttcctgagcaaggacaagggcctgctgggcaaggtgctggtggccctggccagcgaggagctggccaagggctggacccagtggtatgacctgacagaagatggcacccggccccaggccatgacctag

SEQ ID NO: 205391 - DNA, 672 bp, Artificial Sequence
  derived and/or modified sequence
atgcctgtgtttcctccctgtgtgctgcaggtgagagatgagcagcaccagtgcagcctgggcaacctgaaggtgcccctgagccagctgctgaccagcgaggacatgacagtgtcccagcgcttccagctgagcaacagcggccccaacagcaccatcaagatgaagatcgccctgcgggtgctgcacctggagaagcgggagcggcccccagaccaccagcacagcgcccaggtgaagaggccttctgtgtccaaggagggcaggaagaccagcatcaagagccacatgagcggcagccctggccctgggggcagcaacacagcccccagcacccctgtgattggaggcagtgacaagccaggcatggaggagaaggcccagcccccagaggccggcccccagggcctgcatgacctgggccgcagcagcagcagcctgctggccagccctggccacatctctgtgaaggagcccacccccagcatcgccagtgacatcagcctgcccatcgccacccaggagctgcggcagaggctgcggcagctggagaatggcaccaccctgggccagagccccctgggccagatccagctgaccatccgccacagcagccagaagcaggcctaccggggccgggcctgcctgcagaagccccactgcctgctgtag

SEQ ID NO: 205392 - DNA, 2829 bp, Artificial Sequence
  derived and/or modified sequence
atgacagccaacagagatgctgccctgagcagccaccgccaccctggctgtgcccagaggcccaggacccccacctttgccagcagcagccagaggagaagtgccttcggctttgatgatggcaacttccctggcctgggggagaggagccacgcccctggcagccggctgggcgccaggagaagagccaagacagcccggggcctgcggggccaccggcagagaggagctggagctggcctgagccggcccggcagcgcccgggcccccagcccccccaggcctggggccccagaaaatcctggaggagtgctgtctgtggagctgcccggcctgctggcccagctggcccggagctttgccctgctgctgcctgtgtatgccctgggctacctgggcctgtccttctcctgggtgctgctggccctggccctgctggcctggtgccgccgcagccggggcctgaaggccctgcggctgtgccgggccctggccctgctggaggatgaggagcgggtggtgcggctgggcgtgcgggcctgtgacctgcctgcctgggtgcacttcccagacacagaaagagctgagtggctgaacaagacagtgaagcacatgtggcccttcatctgccagttcatcgagaagctgttccgggagaccatcgagcctgctgtgcggggggccaacacccacctgagcaccttctccttcaccaaggtggatgtgggccagcagcccctgcgcatcaacggggtgaaggtgtacacagaaaatgtggacaagaggcagatcatcctggacctgcagatcagctttgtgggcaactgtgaaattgacctggagatcaagcgctacttctgcagagctggggtgaagagcatccagatccacggcaccatgagggtcatcctggagcccctcatcggggacatgcccctggtgggcgccctgagcatcttcttcctgaggaagcccctgctggagatcaactggacaggcctgaccaacctgctggatgtgcccggcctgaatggcctgagtgacaccatcatcctggacatcatcagcaactacctggtgctgcccaaccgcatcaccgtgcccctggtgtctgaggtgcagatcgcccagctgcgcttccctgtgcccaagggcgtgctgcgcatccacttcatcgaggcccaggacctgcagggcaaggacacctacctgaagggcctggtgaagggcaagagtgacccctacggcatcatccgggtgggcaaccagatcttccagagcagggtcatcaaggagaacctgagccccaagtggaatgaggtgtatgaggccctggtgtatgagcaccctggccaggagctggagattgagctgtttgatgaagatcctgacaaggatgacttcctgggcagcctgatgattgacctgattgaggtggagaaggagcggctgctggatgagtggttcaccctggatgaggtgcccaagggcaagctgcacctgcggctggagtggctgaccctgatgcccaatgccagcaacctggacaaggtgctgacagacatcaaggctgacaaggaccaggccaatgatggcctgagcagcgccctgctgatcctgtacctggacagcgccaggaacctgcccagcaaccccctggagttcaacccagatgtgctgaagaagacagctgtgcagagggccctgaagagcggcaagaagatcagcagcaaccccaaccctgtggtgcagatgtctgtgggccacaaggcccaggagagcaagatccgctacaagaccaatgaacctgtgtgggaggagaacttcaccttcttcatccacaaccccaagaggcaggacctggaggtggaggtgagagatgagcagcaccagtgcagcctgggcaacctgaaggtgcccctgagccagctgctgaccagcgaggacatgacagtgtcccagcgcttccagctgagcaacagcggccccaacagcaccatcaagatgaagatcgccctgcgggtgctgcacctggagaagcgggagcggcccccagaccaccagcacagcgcccaggtgaagaggccttctgtgtccaaggagggcaggaagaccagcatcaagagccacatgagcggcagccctggccctgggggcagcaacacagcccccagcacccctgtgattggaggcagtgacaagccaggcatggaggagaaggcccagcccccagaggccggcccccagggcctgcatgacctgggccgcagcagcagcagcctgctggccagccctggccacatctctgtgaaggagcccacccccagcatcgccagtgacatcagcctgcccatcgccacccaggagctgcggcagaggctgcggcagctggagaatggcaccaccctgggccagagccccctgggccagatccagctgaccatccgccacagcagccagaggaacaagctgattgtggtggtgcacgcctgcaggaacctgattgccttctctgaagatggcagtgacccctacgtgaggatgtacctgctgcctgacaagagaagaagtggaagaaggaagacccacgtgtccaagaagaccctgaaccctgtgtttgaccagagctttgacttctctgtgtccctgcctgaggtgcagaggaggaccctggatgtggccgtgaagaacagcggcggcttcctgagcaaggacaagggcctgctgggcaaggtgctggtggccctggccagcgaggagctggccaagggctggacccagtggtatgacctgacagaagatggcacccggccccaggccatgacctag

SEQ ID NO: 205393 - DNA, 1584 bp, Artificial Sequence
  derived and/or modified sequence
atgtggcccttcatctgccagttcatcgagaagctgttccgggagaccatcgagcctgctgtgcggggggccaacacccacctgagcaccttctccttcaccaaggtggatgtgggccagcagcccctgcgcatcaacggggtgaaggtgtacacagaaaatgtggacaagaggcagatcatcctggacctgcagatcagctttgtgggcaactgtgaaattgacctggagatcaagcgctacttctgcagagctggggtgaagagcatccagatccacggcaccatgagggtcatcctggagcccctcatcggggacatgcccctggtgggcgccctgagcatcttcttcctgaggaagcccctgctggagatcaactggacaggcctgaccaacctgctggatgtgcccggcctgaatggcctgagtgacaccatcatcctggacatcatcagcaactacctggtgctgcccaaccgcatcaccgtgcccctggtgtctgaggtgcagatcgcccagctgcgcttccctgtgcccaagggcgtgctgcgcatccacttcatcgaggcccaggacctgcagggcaaggacacctacctgaagggcctggtgaagggcaagagtgacccctacggcatcatccgggtgggcaaccagatcttccagagcagggtcatcaaggagaacctgagccccaagtggaatgaggtgtatgaggccctggtgtatgagcaccctggccaggagctggagattgagctgtttgatgaagatcctgacaaggatgacttcctgggcagcctgatgattgacctgattgaggtggagaaggagcggctgctggatgagtggttcaccctggatgaggtgcccaagggcaagctgcacctgcggctggagtggctgaccctgatgcccaatgccagcaacctggacaaggtgctgacagacatcaaggctgacaaggaccaggccaatgatggcctgagcagcgccctgctgatcctgtacctggacagcgccaggaacctgcccagcggcaagaagatcagcagcaaccccaaccctgtggtgcagatgtctgtgggccacaaggcccaggagagcaagatccgctacaagaccaatgaacctgtgtgggaggagaacttcaccttcttcatccacaaccccaagaggcaggacctggaggtggaggtgagagatgagcagcaccagtgcagcctgggcaacctgaaggtgcccctgagccagctgctgaccagcgaggacatgacagtgtcccagcgcttccagctgagcaacagcggccccaacagcaccatcaagatgaagatcgccctgcgggtgctgcacctggagaagcgggagcggcccccagaccaccagcacagcgcccaggtgaagaggcccagcgtgtccaaggagggcaggaagaccagcatcaagagccacatgagcggcagccctggccctgggggcagcaacacagccccagccaccagccagagccgcagccggcccccagccagccccaggaccagccgctgccccagcccccccaggagctgtgggaagggctag

SEQ ID NO: 205394 - DNA, 987 bp, Artificial Sequence
  derived and/or modified sequence
atgcctgtgtttcctccctgtgtgctgcaggtgagagatgagcagcaccagtgcagcctgggcaacctgaaggtgcccctgagccagctgctgaccagcgaggacatgacagtgtcccagcgcttccagctgagcaacagcggccccaacagcaccatcaagatgaagatcgccctgcgggtgctgcacctggagaagcgggagcggcccccagaccaccagcacagcgcccaggtgaagaggccttctgtgtccaaggagggcaggaagaccagcatcaagagccacatgagcggcagccctggccctgggggcagcaacacagcccccagcacccctgtgattggaggcagtgacaagccaggcatggaggagaaggcccagcccccagaggccggcccccagggcctgcatgacctgggccgcagcagcagcagcctgctggccagccctggccacatctctgtgaaggagcccacccccagcatcgccagtgacatcagcctgcccatcgccacccaggagctgcggcagaggctgcggcagctggagaatggcaccaccctgggccagagccccctgggccagatccagctgaccatccgccacagcagccagaggaacaagctgattgtggtggtgcacgcctgcaggaacctgattgccttctctgaagatggcagtgacccctacgtgaggatgtacctgctgcctgacaagagaagaagtggaagaaggaagacccacgtgtccaagaagaccctgaaccctgtgtttgaccagagctttgacttctctgtgtccctgcctgaggtgcagaggaggaccctggatgtggccgtgaagaacagcggcggcttcctgagcaaggacaagggcctgctgggcaaggtgctggtggccctggccagcgaggagctggccaagggctggacccagtggtatgacctgacagaagatggcacccggccccaggccatgacctag

SEQ ID NO: 205395 - DNA, 2682 bp, Artificial Sequence
  derived and/or modified sequence
atgaccccccccagccgggccgaggccggcgtgcggcggagccgggtgccaagcgaagggcgctggcgcggtgctgagccaccaggaatctctgctagcactcagcctgcctccgctgggagagccgcccgccattgcggggctatgtctggcgccagaggagaaggtcctgaagctggggccggtggggcaggtggccgtgctgcccccgaaaacccgggaggcgtcctgtccgtagagctcccaggtctgctggcccagctcgccaggagcttcgcgctcttactgcctgtgtatgccctgggctacctgggtctgtctttttcctgggtgttactggcattagctttgctagcctggtgccgcagaagccggggactgaaggccctacgattgtgcagagctcttgctctcttagaagacgaagagcgcgtggtcagacttggtgtcagagcatgtgaccttcccgcatgggtgcatttcccagacacagagagagctgaatggctcaacaagactgtcaaacacatgtggccttttatatgtcagtttatcgaaaaactgtttcgcgaaacaatagaaccagctgtcaggggggccaatacgcacctgtctacattttcattcacgaaagtcgatgtcggccagcaacccctgcggataaacggtgtgaaagtatacacagaaaatgttgacaaacgccaaattattctagatttgcaaatcagctttgtcggcaattgcgagatcgatctggaaatcaagcgctacttctgccgggccggcgtaaagagcatccagatacatgggaccatgcgagtaatactggagcctctcattggagacatgcccttggtcggcgccctgagcatcttttttctgcgtaagcctctgcttgagatcaattggacaggcctgacaaacctactcgatgtacctggtctgaatggcttgtcggacactattatcctggatattattagcaattatctggtattgcccaacaggataacagtaccattggtgtcggaggttcaaatcgcccagttgcgttttcctgtgccaaagggggtccttaggattcactttattgaagcccaagacctgcaggggaaagatacctatttgaaaggtctcgtgaaaggcaaatccgatccatacgggatcatccgagtaggcaatcagatcttccagtccagagtgataaaggaaaacctgagtccgaagtggaacgaagtttacgaggcacttgtgtatgagcaccctgggcaggagctcgagatcgagctcttcgatgaagatcctgataaagacgatttcctgggcagtctgatgattgacttaattgaggtcgaaaaagaaagactcctggacgagtggtttactttggacgaggtgccgaaggggaagctgcatctcagacttgaatggttaacattgatgccaaatgcctccaacttagacaaggttttgactgatatcaaagctgacaaggatcaggcaaacgatgggctttcctctgcgctcctgatactctacctggactccgcccgaaacctgccatccggcaagaagataagcagcaacccaaatccagtggtgcagatgtctgtgggccataaagcccaagagtccaagattagatacaagacaaacgagcccgtgtgggaagagaattttactttttttatacacaacccaaagaggcaggacctggaggtggaggtgcgggatgagcagcaccagtgctctctcggaaacctcaaggtgccgctgtctcagctcctgacttccgaggatatgactgtttcacaacgctttcagctgagtaatagcgggcccaattccacaatcaagatgaaaattgctttgcgagttctccacctggagaagagagaaagacctccagatcatcagcattcggctcaggtcaagcggccaagcgtgtctaaagaaggacggaaaactagcatcaagagccacatgagtggaagccccgggccaggcgggagcaacacggcacccagtacgcctgtcatcggcggatcagacaaaccaggaatggaagagaaagcccagccccctgaagcaggccctcagggtctccatgacttgggcaggtccagctcatctctcctggcctcacctggacacatttccgtcaaggagcccactccatcaatcgcaagcgacataagcttacctattgcgacccaggaactgaggcagagactccgacaactcgagaatgggactaccttgggacaaagccccctgggccagatacaactcaccatccgccattctagccagcggaacaaactgatcgtggtggtccacgcctgccgaaacctcatagccttttccgaggacgggagtgatccatatgttcgaatgtaccttctaccagataaacgaagaagcggcaggcgtaaaacacacgtgagcaaaaagacactgaacccagtcttcgaccaatcctttgacttttccgtgtccttgcccgaagtgcagaggcggactctcgacgtagcagtgaagaatagcggaggttttctctcaaaagataaaggactcctcggcaaggtgttggtggcgctggcctctgaggagctcgccaagggctggacacagtggtacgacctcaccgaggacggtacccgaccccaagctatgacatag

SEQ ID NO: 205396 - DNA, 672 bp, Artificial Sequence
  derived and/or modified sequence
atgcccgtgttccccccctgcgtgctgcaggtgcgggacgagcagcatcagtgctctctgggcaaccttaaggtgcccctgtcacagctgctgacatctgaggatatgaccgtgagtcagaggttccagctctcaaacagcgggccaaacagtacgatcaaaatgaagattgctttgcgtgtactgcatctggagaagcgcgaacgcccccctgatcaccagcactctgcgcaggtcaagcgcccctccgtcagtaaagaagggcgaaaaacatctatcaaaagccacatgtccgggtcaccgggacccggaggctccaataccgcgccctctactcccgtgattgggggctctgataagcctgggatggaagaaaaagcacagccgccagaagctggccctcaagggctgcacgacctaggccgatcatcatctagtctgctcgccagtcctggacatatttcggtgaaggagccaaccccaagcattgcgtctgacatttccctgccaattgcgacccaggagctgagacagagactgcgacagctggaaaatgggactacactcggacagtcgccactaggacagatccaactcacaattcggcatagttcccagaagcaagcgtaccgcggcagagcatgtttacagaagccacattgcttgctgtag

SEQ ID NO: 205397 - DNA, 2829 bp, Artificial Sequence
  derived and/or modified sequence
atgaccgccaaccgggacgccgccctgagcagccaccggcaccccggatgtgcacagcgtccacggacacccactttcgcaagctcaagccaacggcgctccgcatttgggttcgatgatggcaatttcccaggcctaggagagagaagccatgctcccggatctagactgggtgctagacggagagcgaagacagcccgaggcctgcgggggcatagacagcgaggcgccggggcagggttaagtcggcctggaagtgcaagggccccatctcctcctcggcctggagctccagagaacccaggaggggtactgagcgtcgagctgccaggactcctggctcagttagccaggtcgtttgccctcctgctgcctgtttacgccctggggtatctgggtttgtccttcagctgggtgcttctagctttggctctgttggcttggtgccgtcggtctcgggggctgaaggctctgcggctgtgcagagctcttgctctgttggaggatgaagaaagggtcgtcagactgggagtgcgagcttgcgacctgccagcctgggtgcatttccccgatacggaacgcgctgagtggcttaataagacagtgaaacatatgtggccattcatttgccagttcattgaaaagctgtttcgtgagacgattgagcccgccgtacgcggcgctaatacccacttgagcaccttttcattcactaaggtggacgttgggcagcagcccctcaggataaatggcgtaaaagtgtacactgagaatgtcgacaaacgccagatcatcctcgatctgcagatatcattcgttggcaactgcgagatcgacctggaaataaagcggtacttctgtagagccggcgtgaagtccatacagatccatggcactatgcgggtgatcttagagcctctgatcggggacatgccactcgtcggagccctgtcgatattttttctccggaagccactgcttgaaattaattggacagggcttactaaccttctggacgtgcccggactgaatgggctctctgacaccataattttagatattatctccaactatctggtcctccccaacagaatcaccgttccactggtttcggaggtccaaatcgctcagctccgatttcctgttccaaagggcgttctgcgaatccattttatcgaggcccaggatcttcagggaaaagatacgtatctgaagggactcgtaaagggtaagtccgacccctatggtataataagggtggggaatcaaatcttccagtcccgggtcatcaaagaaaacctcagtccgaagtggaatgaggtttacgaagcactcgtatacgagcacccgggacaggagctggagatcgaactgttcgatgaggacccagacaaagatgacttcttagggagtctgatgatagaccttattgaggtggagaaggaaagactgctggacgaatggtttacccttgacgaggtgccaaaaggcaaacttcacctgcgcctggagtggctcaccctgatgccgaatgcttccaatttagataaagtgctgacagatattaaagcggacaaggatcaggcgaatgatgggctaagtagtgccctgctcattctttacctggactccgcccgtaacctcccttctaatccactcgagttcaatccggacgtgctgaagaaaacggcggttcagcgagctctgaaatctggtaagaaaatctcatctaatccaaatccggtcgtccagatgtccgtgggccataaagctcaggagtccaaaattcggtacaagacaaatgagccggtctgggaggaaaacttcaccttctttatccataacccaaagaggcaggatttggaggtggaggtgcgggacgaacagcatcagtgcagcctgggcaaccttaaagtcccacttagccaactactaacgagcgaagacatgactgtctcccagaggtttcagctctctaactcggggcctaactccaccattaagatgaagatcgctcttagagtgctgcatctggaaaaaagagagaggccccccgaccatcagcactccgcccaggtcaaaagacctagcgtctccaaggaaggacgaaagacaagtatcaagtcacatatgtccgggtcccccgggccaggtggcagcaacaccgcgccttccacaccggtaatcggggggagcgacaagcccggaatggaggagaaggcccagcccccagaggctggtcctcagggtctccatgacctgggtcggtctagttcaagcctgctcgcatcccccggtcacatctcagtgaaagaaccaacaccaagcatagcaagcgacatatccctgccaattgcaacccaggagctgcggcaacgcctgcgccagctggagaatggcactacactcggtcaaagtcctctcggacagatccagctcacaatcaggcactcctcccagcggaataaactgattgtggtcgtgcacgcctgtagaaaccttatcgctttttctgaggatggttcagatccttatgtgcgcatgtatctgttgccagacaaaagacggagtggccggaggaaaacccacgtttccaaaaagacacttaacccagtattcgaccaaagctttgactttagcgtgagtctacctgaggtgcagcgcaggacactcgacgtggccgtaaaaaattctggagggttcctctccaaggataaggggctgctggggaaggtgcttgtagcgttggcctcagaggaattggctaaaggttggactcagtggtatgatctcacagaggatggcaccagacctcaggctatgacatag

SEQ ID NO: 205398 - DNA, 1584 bp, Artificial Sequence
  derived and/or modified sequence
atgtggcccttcatctgccagttcatcgagaagctgttccgggagactatcgaacctgccgtcaggggagctaacacacacctgagcactttttcctttaccaaggtggacgtcgggcagcagcctctccggataaatggcgtcaaggtgtacactgagaatgtggacaaacggcaaattatcctcgatctgcaaatcagtttcgtcggaaactgtgagattgatctcgaaataaaaaggtacttctgcagagccggcgtgaaatctatccagattcacggtacaatgagggtcatcttagagccactgattggtgatatgccgctcgtgggagctctttctatattttttctacgcaagccactcctggagatcaattggactggcctgacaaatctgttggatgtccctggactgaacggactttcggataccatcatcttagacattatctccaactatctggttctgccaaatcgaatcactgtgcctttggtcagtgaagttcagattgcccagctgcggttcccagtgcccaagggagtgctgcgtatccactttattgaagcccaagatctgcagggaaaagacacatatctgaaaggcctggtgaaaggaaagagtgacccctatgggataatcagagtgggaaaccagattttccagagccgggtgatcaaggaaaacctgagtcccaaatggaacgaagtgtacgaagccctcgtttatgagcatcctggtcaggaactcgaaatcgaacttttcgacgaggatcccgacaaagacgatttcctgggatcccttatgatcgatctaattgaagtggaaaaggagcgcctgcttgacgaatggtttacgctcgacgaggtgccaaaaggaaaactgcacctccggctggagtggctgactctcatgcctaatgccagtaacctggacaaggtgctaaccgatatcaaagccgataaggatcaggctaacgatgggttgagctccgcgctactcattctgtatctggatagcgccaggaacctgcccagcgggaaaaagatcagctctaaccctaatccagtggtacagatgtctgttggacacaaagcccaagagtctaaaatacgatataagactaatgagcccgtatgggaggaaaacttcacattttttattcataatcctaagagacaggacctcgaagttgaggtccgcgatgagcagcatcaatgctcactgggcaacctgaaagtacctctctctcagctactgacgtccgaagatatgaccgtgtcacaacgtttccaactctctaattcgggtcctaacagcacaataaaaatgaaaattgccttgcgagtacttcatctcgaaaaacgcgagagaccccccgaccaccagcattccgctcaggtcaagaggccatctgtctccaaggagggaaggaagacgtctattaagagtcacatgtctggaagcccaggtcccgggggctccaatacggccccagccacatctcagtcaaggtcaagacctcccgcctctcctagaacgtcacggtgtccgtccccccccaggagttgtggcaagggctag

SEQ ID NO: 205399 - DNA, 987 bp, Artificial Sequence
  derived and/or modified sequence
atgcccgtgttccccccctgcgtgctgcaggtgcgggacgagcagcaccagtgtagcctcggcaacctgaaggttccactctctcagctccttacctctgaagatatgaccgtgtctcagcggtttcaactgtccaacagtggccctaacagcaccatcaagatgaaaatagcattgagagtcctgcacctggagaaacgcgaaagaccacccgaccatcagcattccgcccaggtcaagaggcctagtgtctccaaggagggccggaaaacgtcaatcaaatcccatatgagcggaagcccgggcccaggagggtcgaacactgctccctcgacacccgtgatcggaggctctgataagcctggtatggaggaaaaggctcagccgcctgaagcggggcctcagggcctgcacgacctcggacgcagctcgtcctccctcctggcctctccaggccatatttcagtgaaggagcctaccccctcgatcgcaagtgacatttcattgcccatcgccacccaggaattgagacagaggcttagacagttggaaaacggcacaaccctgggacaatctcccctggggcaaatccagcttacaatcaggcatagtagccagaggaataagctgattgttgtggtccacgcctgtcgaaatttaatcgcattcagcgaggatgggagtgacccttatgttagaatgtacttgctcccagataagcggcggagtggacgtcgtaagacgcacgtgagtaagaaaactcttaacccagtatttgaccagtcttttgacttcagcgtatctctgcccgaggtccaaaggagaacattagatgtagctgtgaagaatagcggcgggtttttgagcaaggacaagggtctgctcggaaaggtgcttgtagccctggccagtgaggaattggcaaaagggtggactcaatggtacgacttgaccgaggacggaaccaggccacaagctatgacttag

SEQ ID NO: 205400 - DNA, 2682 bp, Artificial Sequence
  derived and/or modified sequence
atgacacccccatcaagggctgaagccggagttaggagatctcgagtcccctcagagggacgctggaggggggcagagcctcccggtatcagcgccagcactcagccggctagcgccggtagggccgcacgccactgtggggctatgagcggggcacgcggagaggggcctgaggcgggtgccggtggagccggaggacgagctgcaccagagaaccccggaggggtcctgtctgtggagttaccaggactcctggcacaactggccaggtctttcgcacttctgttacccgtgtatgccctggggtatctcggactgtcatttagctgggttcttttagcacttgccctccttgcttggtgccggagatctcgcggattgaaggccctacgcctgtgtcgtgccctcgccctcttagaagatgaggaaagagtggtgcggctgggcgtcagggcatgcgacttgccagcctgggtccacttccccgatactgaacgcgcagaatggctgaataagaccgtgaaacacatgtggccctttatatgccagtttattgaaaaactgtttcgggagactattgaacctgccgtgaggggggctaatacgcacctgtcaacattctcctttactaaagttgacgtggggcaacagcctctacggatcaatggcgtcaaggtttacacggagaacgtggacaaacgccagattatactggacctgcaaatcagctttgtagggaattgtgagattgatctggagataaaaagatatttttgtcgggctggggtcaaatccattcagatccacggtacaatgcgcgtaattttggagcccctgatcggagatatgcctttggtgggcgcattgagcatattctttttgagaaaacctctgttagaaattaattggacggggctgacaaacctgctagatgtgcccggactgaacggtctgagtgacacgataatcttagatataattagcaattaccttgtgctccccaatcgcatcacagtcccattagtttcagaggtgcagatcgcccagctgcgcttccctgtccctaagggagtgctgaggatccactttattgaagcacaagacttgcaagggaaggatacatacttgaagggactggtgaaaggaaaaagcgacccatacggaataattcgggttggaaatcagatatttcagtcacgcgttatcaaagagaacctgagcccaaaatggaacgaagtgtacgaggctttagtttacgagcacccaggccaggagttggagatcgagctgtttgatgaagacccagacaaagatgactttctgggatcactgatgatcgatctgattgaagtggagaaggaacggctgctggatgaatggttcaccctggacgaggtccctaagggcaagttgcacctgcgcctcgagtggctgaccctcatgcccaatgcctccaacctggacaaagtgcttaccgacatcaaggccgacaaggaccaagctaatgacggattaagttccgcgctgctgatcctgtaccttgactccgctcggaacctcccatccggaaaaaaaatctcctctaacccgaaccctgtcgtccaaatgtctgtcggccacaaagcccaggaaagtaagatcagatacaaaacaaatgagcccgtgtgggaggagaacttcactttttttatccacaatcctaaaagacaggatcttgaagtggaagtgcgggatgaacagcatcaatgttccctagggaatttgaaagtgccgctgagccagctcctgacctctgaggacatgactgtatcccaacgcttccagttatccaactcaggccctaactcaacgatcaaaatgaaaatagccctgcgggtgctgcacctcgagaagagggagcggccacctgaccatcagcattccgcccaggtcaaacggccttccgtgtccaaagaaggacggaaaaccagcataaaaagtcacatgtctggaagcccaggaccgggtggctcaaacactgctccttccactcctgtgatagggggaagtgacaaaccagggatggaggagaaggctcagcctcccgaagccggaccccagggtctgcatgacctgggccgaagttcctcctccctgctggcctcccccggacatatttcggtgaaggagccaaccccaagcattgcaagcgacatcagcttgcccattgccacgcaggagctccgacaacggctacggcagctggaaaatggcaccacactcggccagtctcctcttggacagattcagttgacaataagacactcgagccagcgaaacaaactgattgttgtcgtccacgcatgcagaaatctgatagcttttagcgaggacggctctgatccttacgtccgcatgtatcttctgccggacaagaggcggagcggcagaagaaaaacacacgttagcaaaaagacccttaacccggttttcgaccagagctttgactttagcgtttccttgcctgaggtacaacggaggacattggacgtggccgtgaaaaacagcggtgggtttctttccaaggataagggtcttctggggaaggttcttgtggctttagcatctgaggagctggccaaaggctggacgcagtggtatgatcttacggaggatggcacccgcccacaggctatgacctag

SEQ ID NO: 205401 - DNA, 672 bp, Artificial Sequence
  derived and/or modified sequence
atgcccgtgttccccccatgtgtactgcaggtgcgagacgagcagcaccagtgtagccttggtaatttaaaagtcccactctcacagctcctcaccagcgaagacatgaccgtgagccagcgcttccagctctctaatagcggtccaaattccactatcaagatgaagatagctcttcgcgtactgcacctcgaaaaacgagagcgcccacccgatcaccagcacagcgcccaggtgaaaaggccaagcgtgagtaaggaagggcgaaaaacaagtattaaatcccatatgagcggctcacctgggcctggcggatctaacactgcacctagcacaccggtgattgggggttcagataagccgggaatggaggagaaggctcagccacccgaggctggaccacaaggactacatgatcttgggcgatcatccagttcacttttggcctctcccggacatatttcagtgaaagagcccaccccatccattgcatcagatatatccctgcccatcgcgacacaggagctgcggcagagactgaggcaactggagaacggcacgacactaggccagtcccctctggggcaaattcagctcactatacggcacagttctcagaagcaggcctatcgtgggagggcctgtctgcagaaacctcactgccttctgtag

SEQ ID NO: 205402 - DNA, 2829 bp, Artificial Sequence
  derived and/or modified sequence
atgacagctaaccgggacgccgctctgagtagccatcggcaccctgggtgcgctcaacgaccaaggaccccaactttcgcatcttcctcccaaagacggagtgccttcggattcgatgacgggaattttcccggactcggagagaggtctcacgctcctgggagtaggctcggagctaggcggagggcaaaaaccgcccgtggtctgcggggacaccggcaaaggggagcaggagctggtctgtctcgccctgggtcggccagagcccctagcccgcctcgccctggagcccctgaaaaccctggcggagttctgtctgttgagttacctggtctgctggcccagctggctcgttccttcgcgctgctgctacccgtgtatgctctgggctatttgggactaagcttctcctgggtactgcttgccctcgccctgctggcctggtgtaggcgcagcagggggctcaaggcgcttcgtctatgccgcgctttagctctgctggaggacgaggagcgcgtggttaggctgggagtgagagcatgcgatcttcctgcttgggtacactttcctgatacggagagggcggaatggcttaataagacggttaaacacatgtggcccttcatttgccagttcattgaaaaactcttccgcgagactatcgagcccgctgtgaggggcgcaaacacacacctgtcaactttttcttttaccaaagtggacgtgggacaacagccactgcggattaacggcgtgaaagtgtacactgaaaacgtggacaaacgtcagattattctcgatctccagatctcctttgtgggtaattgtgaaatcgacctcgagattaaacggtatttctgccgcgcaggggtgaaatctattcagattcacgggacaatgcgggtcattctggagccattgattggggatatgcctctcgtgggcgctttatccatcttcttcttgcgtaaaccccttctcgagatcaattggactggcctgaccaatctgctggacgtgcccggactgaatggcctgtcggatactatcatattagatatcattagtaactatctcgtcctgccgaaccgcattaccgtcccactggttagcgaggtccagattgctcagcttagatttcctgtgccgaaaggtgtgctccgcatccacttcattgaggcccaggacctccagggaaaggatacgtacctcaaaggcctggtgaaaggtaaatctgacccctatggtatcatacgcgtagggaatcaaatttttcagagtagagtgattaaagagaatctgtctccgaaatggaatgaggtatacgaagcccttgtatacgagcatcccggtcaggagctggagattgaactcttcgacgaggaccccgacaaggacgatttcctcggttctctaatgatcgaccttatcgaggtggaaaaagagcgtctgctggacgaatggtttacgcttgatgaggtccccaaagggaagctgcatcttagattggaatggttgacacttatgcctaacgctagcaatctggacaaagtactgacagatattaaggccgacaaggaccaggcaaacgatgggttgtccagcgcactgctcattctgtatctggacagcgccagaaatttacctagcaatccactggaatttaatccggatgttctaaaaaaaactgctgtgcagcgcgctctgaagtccgggaaaaagatttcctcaaatcctaaccctgtggtgcaaatgtccgtgggccacaaggcacaggagtcaaaaatccggtataagactaacgaacccgtctgggaggagaacttcaccttctttatccataaccccaagcgtcaggacttagaagtcgaagtcagagatgagcagcaccaatgttcgctgggaaatctgaaggttcctctatctcagctgcttacatcagaggacatgaccgttagtcagcgatttcagctgagtaacagcggccctaatagcacaattaagatgaaaattgccctgagagtgctgcatttggaaaagagggaaaggccacccgaccaccaacatagtgctcaggttaagcgcccttcagtcagtaaggaaggacgaaaaacaagcattaaaagccatatgtctgggagtcccggtcctggtggatctaacaccgctccttccacacccgtgataggtgggtccgacaaacctggtatggaggagaaggcgcagccgcctgaggcgggtccacaggggcttcacgacctgggcaggtcctctagcagcctgctggccagcccaggacatataagtgttaaggagcccactccttccattgcttccgatatctccctccccatcgccacccaggaacttcgacagcgtctgcgacagctagagaatgggaccacgctgggtcaatcacctctggggcagatccagctgaccatcagacactcatcccagcgaaataagctcatagtggtcgtgcatgcatgtagaaacttgatcgcctttagcgaagatggctcagacccctacgtccggatgtacttactgcctgataagaggagatctggcaggcggaaaacccatgttagcaagaaaactctgaatccagtattcgaccagtctttcgacttttccgtgagtctgccagaagtgcaacgtcggaccctggacgtcgccgttaagaatagcgggggtttcctctctaaggataaagggctgcttggaaaagtgctcgtcgccctcgcttctgaagaactggccaaggggtggacgcaatggtatgatctgactgaggacggtactaggcctcaggcaatgacctag

SEQ ID NO: 205403 - DNA, 1584 bp, Artificial Sequence
  derived and/or modified sequence
atgtggccttttatttgtcaatttattgagaaactcttccgagaaactatcgagcccgctgtgagaggtgcgaacacccatctttcaaccttcagctttacgaaggtggacgtcggccagcagcccttgcgaatcaatggagtcaaggtgtataccgagaatgtggacaaaagacagatcatcctggacctgcagatttctttcgtaggaaattgtgagatcgacttggaaatcaagaggtatttttgcagggctggcgtgaaaagcatccagatccacggcaccatgagagtcatcttggagcctctcatcggcgacatgccgttggtaggagctctgagtatattcttcttgcgcaaaccccttctcgagatcaactggaccggattgacaaatctgctggacgtgccagggcttaacggattaagcgacactattattttagatattatctccaactatctggttctgcccaacagaatcactgtccccttagtgtcagaggtccagatcgcgcaactccgttttccggttccgaagggagtcctgagaattcactttatcgaagcccaggacttgcaaggaaaggacacttacctgaagggtctcgtgaaaggcaaaagtgatccgtacgggatcataagagtggggaaccagatcttccaatctcgggttatcaaagaaaacctgagcccgaaatggaatgaagtctatgaggccctggtttacgaacacccaggtcaggagctggagatcgagctgtttgacgaggaccctgacaaggacgactttcttggcagtctaatgatcgacctgattgaagtggagaaggagcgcttactggacgagtggttcaccctggatgaggtccctaagggaaaactgcatctgagactcgagtggctgacactgatgccaaatgcctccaatctcgataaagttcttacagatatcaaggctgataaagatcaagcgaacgatggactctcatctgccctacttattttgtacctggactccgcaaggaaccttccgagtgggaagaagatatccagtaaccctaatcctgtggttcagatgagtgtaggacataaggctcaggagtcaaagattagatacaaaaccaacgagcctgtgtgggaagaaaacttcacattcttcatacacaaccccaagaggcaggatctcgaggtcgaagtgagggatgaacagcatcaatgttcgcttggtaatctgaaggtgcccctcagccagctgctgacgagcgaagacatgactgtgagtcagcgtttccagctgagtaacagcggcccaaacagtaccatcaagatgaagatagcactgcgagtcctgcatctggaaaagcgggagcgcccacctgatcatcaacactcagctcaggtgaagcgaccatccgttagtaaagaaggaaggaagacgtcaatcaagtctcatatgagcggatctccaggtcccggtggatcaaacactgctccagcaacatcacaatcaaggagtaggccacccgcatcgccccgaacaagcaggtgcccctctccaccacggagttgcgggaagggctag

SEQ ID NO: 205404 - DNA, 987 bp, Artificial Sequence
  derived and/or modified sequence
atgccggtctttccaccctgcgtgctccaggtacgagacgagcaacaccaatgctcattggggaatctgaaagtgccgctctcccagctcctgactagcgaagacatgactgtcagccagagatttcagctgtctaattccggccctaactctaccatcaaaatgaagatcgcgcttcgcgttcttcatctggagaagagagaacgtccacctgaccaccagcacagcgcccaggtaaaacgtcctagtgtcagcaaagagggaagaaagacatcaatcaaatcccacatgtcaggatcccctggcccagggggttcgaacactgccccatccaccccggttatcgggggatcagacaaaccaggaatggaagaaaaggcccagccccctgaagccggaccccaggggcttcacgatctgggaagatcctcgtcgagcttactagcctccccaggacacattagcgtgaaggaacccacaccttcaattgcttcagatatttccttgcccatcgctacacaagagttaaggcagcggttacgtcagctcgaaaacgggactactctgggacagtcaccactgggtcagattcagctgactattcggcactcttctcagaggaacaagctgattgtcgttgtgcacgcctgccgtaatctaattgctttctctgaagacggtagcgacccatacgtgaggatgtatctgttacccgataaacggaggtccgggaggcggaagacccacgtgtcaaaaaagactctcaatcctgtattcgaccaatctttcgatttttctgtgtcgttaccagaagtgcaacgcaggaccctagatgtggctgtgaagaatagtggtggctttctatccaaagataagggattactgggcaaagtgttagtcgctctcgcatcagaggagttggcaaagggttggacccaatggtacgacctcactgaagatggcacgcggccacaggcaatgacctag

SEQ ID NO: 205405 - protein, 512 aa, Artificial Sequence
  derived and/or modified sequence
MERARKFSGSGLAMGLGSASASAWRRASQRWAWPLRSLRPGGDAREPRKIILHKGSTGLGFNIVGGEDGEGIFVSFILAGGPADLSGELRRGDRILSVNGVNLRNATHEQAAAALKRAGQSVTIVAQYRPEEYSRFESKIHDLREQMMNSSMSSGSGSLRTSEKRSLYVRALFDYDRTRDSCLPSQGLSFSYGDILHVINASDDEWWQARLVTPHGESEQIGVIPSKKRVEKKERARLKTVKFHARTGMIESNRSIKTKRKKSFRLSRKFPFYKSKENMAQESSIQEQGVTSNTSDSESSSKGQEDAILSYEPVTRQEIHYARPVIILGPMKDRVNDDLISEFPHKFGSCVPHTTRPRRDNEVDGQDYHFVVSREQMEKDIQDNKFIEAGQFNDNLYGTSIQSVRAVAERGKHCILDVSGNAIKRLQQAQLYPIAIFIKPKSIEALMEMNRRQTYEQANKIYDKAMKLEQEFGEYFTAIVQGDSLEEIYNKIKQIIEDQSGHYIWVPSPEKL

SEQ ID NO: 205406 - DNA, 1539 bp, Artificial Sequence
  derived and/or modified sequence
atggagcgggctcgcaagttttccggtagtggcctagccatgggactcggttcagcctccgcctccgcctggagacgggcgagtcagcggtgggcttggccccttcgtagcctccgccctggaggggacgctcgcgagccacgcaaaatcatcctccataagggcagcaccggcctcgggttcaacatcgtgggcggagaggacggtgaaggtatctttgtgtccttcattcttgctggcgggccagctgatttatctggtgagcttaggcgcggagacaggatactttccgtgaatggtgtgaatctccggaacgctacccatgagcaggctgcagcggccctcaaacgggctggtcagtctgtgaccatagtcgctcagtaccgtccagaagaatactcccggtttgagtcaaaaattcatgacctgcgtgagcaaatgatgaacagtagtatgtcgtctgggtccggaagcttgcggacatctgagaaaaggagcctgtacgtaagggctctcttcgattacgacagaacccgcgacagctgtctgcctagccaggggctgagtttttcctacggcgatatcctgcatgttatcaacgccagcgatgacgagtggtggcaagcccgtctcgtgactcctcacggggagagtgaacagatcggagttatcccatccaagaaacgtgttgagaaaaaagagcgtgccagactaaaaaccgtgaaattccacgcccgaacaggaatgattgaaagcaatcggtccatcaagactaaacgaaaaaaatccttccggttgtcccgaaaattccccttttataaaagcaaagagaatatggcacaagagagcagcatacaggagcagggcgttacttcaaatacgtcagactcggaatctagtagcaaaggtcaggaggatgccatcctctcttacgaacctgtgactaggcaagagatccactatgcccgaccagtgatcatcttagggccgatgaaagacagggtgaatgacgatcttatttcagagttcccccacaagtttggctcatgtgttccccacacaactcgtcccagacgggacaacgaagtcgatggtcaagattaccatttcgttgtttccagggaacagatggagaaggacatacaggataataaatttatcgaggcaggtcagttcaatgataatctgtacggaacctcaatacagagcgtgcgggccgttgccgagagagggaaacactgtatactcgatgtcagcggcaacgccatcaagagattacagcaggctcagctgtaccctatcgctattttcattaagcctaaatccatcgaggcccttatggaaatgaacaggagacagacatacgagcaggccaacaaaatatacgataaggccatgaagctggagcaggagtttggtgagtacttcaccgcaatcgttcagggtgactccctggaggagatctacaacaaaatcaaacagatcatcgaggatcaaagtgggcactatatttgggtgccctcacctgaaaagctctag

SEQ ID NO: 205407 - DNA, 1539 bp, Artificial Sequence
  derived and/or modified sequence
atggagcgggccaggaagttcagcggcagcggcctggccatgggcctgggcagcgccagcgccagcgcctggaggcgggccagccagcgctgggcctggcccctgcggagcctgcggcctggaggagatgcccgggagcccaggaagatcatcctgcacaagggcagcacaggcctgggcttcaacatcgtgggcggagaagatggagagggcatctttgtgtccttcatcctggccggcggccctgctgacctgagcggggagctgcggcggggggaccgcatcctgtctgtgaatggagtgaacctgagaaatgccacccatgagcaggccgctgctgccctgaagagagctggccagagcgtgaccatcgtggcccagtacagacctgaggagtacagcagatttgagagcaagatccatgacctgcgggagcagatgatgaacagctccatgagcagcggcagcggcagcctgcggaccagcgagaagaggagcctgtatgtgcgggccctgtttgattatgacaggacccgggacagctgcctgcccagccagggcctgtccttctcctatggagacatcctgcacgtgatcaatgccagtgatgatgagtggtggcaggcccggctggtgacccctcatggagagagcgagcagattggagtcatccccagcaagaagagggtggagaagaaggagcgggcccggctgaagacagtgaagttccacgccaggacaggcatgattgagagcaacagaagcatcaagaccaagaggaagaagagcttccggctgagcaggaagttccccttctacaagagcaaagaaaacatggcccaggagagcagcatccaggagcagggcgtgaccagcaacaccagtgacagcgagagcagcagcaagggccaggaggatgccatcctgtcctatgagcctgtgacccggcaggagatccactacgcccggcctgtgatcatcctgggccccatgaaggacagagtgaatgatgacctgatcagcgagttcccccacaagtttggcagctgtgtgccccacaccacccggccccggcgggacaatgaggtggatggccaggactaccactttgtggtgtcccgggagcagatggagaaggacatccaggacaacaagttcattgaagctggccagttcaatgacaacctgtatggcaccagcatccagagcgtgcgggctgtggccgagcggggcaagcactgcatcctggatgtgtctggaaatgccatcaagaggctgcagcaggcccagctgtaccccatcgccatcttcatcaagcccaagagcattgaggccctgatggagatgaacagacggcagacctatgagcaggccaacaagatctatgacaaggccatgaagctggagcaggagtttggagagtacttcaccgccatcgtgcagggcgacagcctggaggagatctacaacaagatcaagcagatcatcgaggaccagagcggccactacatctgggtgcccagccctgagaagctgtag

SEQ ID NO: 205408 - DNA, 1539 bp, Artificial Sequence
  derived and/or modified sequence
atggagcgggcccggaagttcagcggcagcggcctggccatgggcctcggatctgcgagcgccagcgcttggagacgggccagccaaaggtgggcctggccgttgcgcagcctaagaccaggcggcgacgccagggagccacggaaaatcatcctgcacaagggatcaactggcttagggttcaatatagtgggtggcgaagatggggagggcatcttcgtttcgttcatactggccggcggtccagctgacctctcaggagagctcagacgcggggacagaatcctgtctgttaacggggtcaacctccggaatgctacgcacgagcaggccgccgcagcactgaagcgggcaggccaatccgtaactatcgtcgcacagtatcgcccagaggaatactcccgtttcgaaagcaaaattcacgaccttagggagcagatgatgaattcttcaatgagcagtgggtccggaagccttaggacttcggagaagagatccttatacgtgcgtgccttatttgactatgatcgaacgcgcgactcctgtctcccttcccagggcctgtccttcagttacggggacattctccacgtcattaatgcctctgacgacgagtggtggcaggcgcgactcgtgactccccatggcgaatccgaacagataggggtgatcccttccaaaaagcgggtagaaaaaaaggagagggcacgtctgaagaccgttaaatttcatgcgaggaccggaatgattgagtccaatagatccatcaagactaagaggaagaaatctttcagactcagcaggaagtttcctttttacaaatccaaagagaacatggcgcaggaaagttccattcaggagcagggggtaactagtaacacttcagattcagaaagctcttcaaagggtcaggaggatgctatcttgtcttatgagccagtgacaagacaggagatccactatgcccgtcccgtgatcatactgggccctatgaaggatcgggtgaacgatgaccttatatccgagtttcctcataaattcgggagttgtgttcctcacacaacaaggccacggcgtgataacgaagtggacggacaggactaccatttcgttgtaagccgcgagcagatggaaaaagacattcaggacaacaaatttattgaagccggccagttcaatgataatctctacggtacatccatacagagcgtcagagcggtggccgaaaggggcaagcactgtatcctggatgtgagtggcaacgctatcaaacggctgcagcaggcccagctttaccccatcgccatttttattaagcccaagtcaatagaagccctgatggaaatgaatcgccgccagacttatgagcaggcaaataaaatttatgacaaagcaatgaaactggaacaagaatttggggagtacttcacagctatcgtccaaggggattcactggaagaaatttataacaagattaagcaaataatagaagatcagtccgggcattatatttgggtgccgtccccagagaagctctag

SEQ ID NO: 205409 - DNA, 1539 bp, Artificial Sequence
  derived and/or modified sequence
atggaaagagccaggaaattttccggcagtggactggcaatgggtcttgggtcagcttcggcatcagcttggcggagggcctctcagcggtgggcctggcctctcaggagtcttcgacctggcggtgacgctcgtgagcctcgcaagatcattctgcacaaggggagcacaggtctgggcttcaatattgttggaggtgaagatggcgaaggcatcttcgtgagctttattttggcgggaggtccagccgacctctctggggaactccgcagaggggaccggatcctgagtgtaaatggagtgaacctcaggaacgccacacacgagcaggccgctgccgctctcaagagggccggacagtctgtcactatagtcgctcagtatcgtcccgaggaatatagtagatttgaatctaagatccatgacttaagggagcagatgatgaatagttcgatgtcaagcgggtctggctccctgcgaacctccgaaaagcggagtctatatgtccgtgctttatttgactacgatcggactcgcgatagttgcttgccgtcacaaggcctgagcttttcatacggggacattctacatgtaattaatgcttccgatgacgagtggtggcaggcccgtctagttacaccccatggggaatcagagcagatcggggtgatcccttctaagaagcgggtcgagaaaaaagagcgtgctcggctgaaaacagtcaagttccatgcacgaaccggaatgatcgaatctaacagatcaatcaaaaccaagcggaaaaaatcttttagactctctaggaaattcccgttctacaagagcaaggagaacatggctcaggaatcctcaatccaagaacaaggcgttacttccaatacttcggactccgagagctcttcaaagggacaagaagacgccatcctatcatatgaacctgtgactcggcaggagatccattatgcacgtcctgtgatcattttgggtccaatgaaggacagggtgaatgacgatttaatcagcgaatttccccataaattcggaagctgtgtcccccacaccacgcggcctcgtcgcgacaatgaggtcgacgggcaggattaccacttcgtggtatcaagggaacagatggagaaggatatccaagataataagtttatcgaagccggtcagtttaatgacaatttgtatggcacgagtattcagtccgtgcgcgcagtcgcagagcgtggcaaacattgcattctggatgtgtccggaaatgcaatcaaacgcttgcaacaggcacagctgtacccaatcgccattttcataaagccaaagagtattgaggccctgatggagatgaatcggagacagacctatgaacaggccaacaaaatttatgacaaggccatgaagctcgagcaggagtttggtgagtacttcaccgccatcgtgcagggcgactccctcgaagagatttataataagatcaaacagatcattgaagaccagtccggacattatatttgggttccttcaccagagaaattatag

SEQ ID NO: 205410 - DNA, 1539 bp, Artificial Sequence
  derived and/or modified sequence
atggagagagccagaaagttcagcggcagcggcctggccatgggcctgggcagcgccagcgccagcgcctggagaagagccagccagagatgggcctggcccctgagaagcctgagacccggcggcgacgccagagagcccagaaagatcatcctgcacaagggcagcaccggcctgggcttcaacatcgtgggcggcgaggacggcgagggcatcttcgtgagcttcatcctggccggcggccccgccgacctgagcggcgagctgagaagaggcgacagaatcctgagcgtgaacggcgtgaacctgagaaacgccacccacgagcaggccgccgccgccctgaagagagccggccagagcgtgaccatcgtggcccagtacagacccgaggagtacagcagattcgagagcaagatccacgacctgagagagcagatgatgaacagcagcatgagcagcggcagcggcagcctgagaaccagcgagaagagaagcctgtacgtgagagccctgttcgactacgacagaaccagagacagctgcctgcccagccagggcctgagcttcagctacggcgacatcctgcacgtgatcaacgccagcgacgacgagtggtggcaggccagactggtgaccccccacggcgagagcgagcagatcggcgtgatccccagcaagaagagagtggagaagaaggagagagccagactgaagaccgtgaagttccacgccagaaccggcatgatcgagagcaacagaagcatcaagaccaagagaaagaagagcttcagactgagcagaaagttccccttctacaagagcaaggagaacatggcccaggagagcagcatccaggagcagggcgtgaccagcaacaccagcgacagcgagagcagcagcaagggccaggaggacgccatcctgagctacgagcccgtgaccagacaggagatccactacgccagacccgtgatcatcctgggccccatgaaggacagagtgaacgacgacctgatcagcgagttcccccacaagttcggcagctgcgtgccccacaccaccagacccagaagagacaacgaggtggacggccaggactaccacttcgtggtgagcagagagcagatggagaaggacatccaggacaacaagttcatcgaggccggccagttcaacgacaacctgtacggcaccagcatccagagcgtgagagccgtggccgagagaggcaagcactgcatcctggacgtgagcggcaacgccatcaagagactgcagcaggcccagctgtaccccatcgccatcttcatcaagcccaagagcatcgaggccctgatggagatgaacagaagacagacctacgagcaggccaacaagatctacgacaaggccatgaagctggagcaggagttcggcgagtacttcaccgccatcgtgcagggcgacagcctggaggagatctacaacaagatcaagcagatcatcgaggaccagagcggccactacatctgggtgcccagccccgagaagctgtag

SEQ ID NO: 205411 - DNA, 5074 bp, Artificial Sequence
  derived and/or modified sequence
ggggctgaggaggcgagggcagcggagtttcctgccctgagatagttgcagcccgctctgctgcaaccatttcaaattagagaagaaagcagttcagccggtggggctggcgggactctgaccggcccggtggcctcgccggcaacggccccgccccgctggcggcagcggcggcggcagcggctgcgcggggcctggaactggtcgggccggctggggttccgggggacaggtttgcagggtggggcccgagaggctggcgggcaggcagcagtggagccggaagggtaggcagccaggggagagagagaggagctatggagagggcccgcaagttctcgggctccggcttggccatgggcttgggctccgcctccgcttcggcctggaggagggcttcgcagaggtgggcctggccgctccgctccctgcggcccggaggggatgccagagagcctcgcaagatcatcctgcacaaaggctccacaggcctgggcttcaacatcgtaggaggagaggatggagaaggcatttttgtctccttcatcctggcaggaggcccagctgacctgagtggggagctgcgcaggggagaccggatcttatcggtgaatggagtgaatctgaggaatgcaactcatgagcaggctgcagctgctctgaaacgggccggccagtcagtcaccattgtggcccagtacagacctgaagaatacagtcgctttgaatcgaagatacatgacttacgagaacaaatgatgaacagcagcatgagctctgggtctgggtccctccgaacaagtgaaaagaggtccttgtatgtcagggccctgtttgattatgatcggactcgggacagctgcctgccaagccaggggctcagcttctcttatggtgacattctgcatgtcattaatgcctctgatgatgagtggtggcaggcaaggctggtgaccccacacggagaaagtgagcagatcggtgtgatccccagtaagaagagggtggaaaagaaagaaagagctcgattgaaaactgtgaagttccatgccaggacggggatgattgagtctaacaggtcgatcaaaacgaaacgtaaaaagagtttccgcctctctcgaaagtttccattttacaagagcaaagaaaacatggcccaggagagcagcatacaggaacagggagtgacatccaacaccagtgacagcgaaagcagttccaaaggacaagaggatgctattttgtcatatgagccagtgacacggcaagaaattcactatgcaaggcctgtgatcatcctgggcccaatgaaggaccgagtcaatgatgacctgatctccgaatttccacataaatttggatcctgtgtgccacatactacccggcctcgacgtgataatgaggtggatggacaagactaccactttgtggtgtcccgagaacaaatggagaaagatattcaggacaacaagttcatcgaggcgggccaatttaatgataacctctatgggaccagcatccagtcagtgcgggcagttgcagagaggggcaagcactgcatcttagatgtttccggcaatgctatcaagagactgcagcaagcacaactttaccccattgccattttcatcaagcccaagtccattgaagcccttatggaaatgaaccgaaggcagacatatgaacaagcaaataagatctatgacaaagccatgaaactggagcaggaatttggagagtactttacagccattgtacagggtgactcactggaagagatttataacaaaatcaaacaaatcattgaggaccagtctgggcactacatttgggtcccatcccctgaaaaactctgaagaatcccctccaaccattctcttgtgaacagaagaaatcaagtccctcttccctcctccctcttcattcctgtccccatggggagaacaaatgctactgttcttgtccccttttttagatatgtcaaaaaaaattaagttttctagtcctgttctttttttttttttaagtttttgtttgtttcagtttattttttgggatgatgccatctcattcatcatgtgactgtgcccattcctgcatggacctttcccaagcgctagcacaggtgcaaaatccatcagagccattgttttcataaaaaccaagcagaagtgaagagaaaagaggaggactgatggaaagacagactctggacagctgcacggcttgtgaagtgagctaaatgcaccacatgatgagatgctcctgggcatttctccctatctgtactgctgtcttgcagctctgaacggtgcaacgtaatggcgacagaaagtatcttatttatatatagatatatatatgtaatttatataaaatatatagaaattattatatatatatattatacactctcatataatatatatatattcacacacatttgggttagaaaatctatggagacttcatcaatggtactatgttattagagaaatgctttaattttcatattccaatcagatggcatcttctatcccagctggttgggaagggattgaagatggtagcaagtgctgcactaagggcactcgcatttggtcattctcttgagagctaggaggggtcagcctgaggccggagaggaagggcttttgcctggggtgagagggtgagagacttgacctgaaagcagctgctgcccctgaggtgcagccagagtcctgtgtgcggacagagagaatggctaatgatgctccgcgtggaattgcctattgttttatgccacctgatgtgtctgcatgagaggtttcctttttgttcctttttaagctgctgttaaaccaaaaccatgttgtgctactgtgtcagccttttcattattgcaaattttacttttactatttaagtgaatgcatagaatccaatttgccaaggttctaaaggcttatgaggtcctgaaggagccaggccttgtgatggagtaggtgacacaggcctggttgtcctgtcagcagaagggaaagcaggggctgggctgagaggaggacacggagggctctgctgaggttccttcctgggttccaccaacagggacagggagtcacttgccttccagttctgtgctgggatggcgggacagcacttggcttgcttggccagctgcgtcatgagtttgatttggtttttttttttttgcagctgcttcatatgctctgctccagcccctccccaacagctggtagcttatggtttcttcaagaggaaagtagactttatgctgtacatttgagctgtagagctaagattcgcttactggtgagctgtgaaaccttgttgctttttcccagagtctgatggcagtgactgtgatcaagggaatcttcaccgccacaagtgcaggcagcaggtgtggttcaggtccccccccaccccactgtgctcctttgaagccaacgtgcctccctcgcctccatactggagggacgacgcaggggagaacagagaagtgcttggccctaggattgaggcacttgtttcctagcccgctgggttagggctggtgcaagcgaggcaatgttgaggatgctttaagcactaccagccgaatccgggaactctgttaacagttgtccaaccagcagaatgaggctaactgtataaagcatgggacccaggatgaggataaggaaaggacagcggctttccctgggcagtacaatggcttgaaggcaaaaagggataaagtgacagccgactgtgactctggtgaggaggggtgagcagggaggttgattctctgatgttaactaagtggcaaagtctcaaccgtgctcagccctccccctcccagggaagagaaacaaagattcaaagtaagcatgatactagtgggtttaccagtgtttcttccaaggagacatatattttttaataaacgatagttgcaatgaactgtggctcagagaccttcttaaagtagttgagaagggagggcgtgggcaaagcagtgggaagaacatcccaaacttttgggggccagagggctctctccttagtgatgatcagctagccgagctgggccgtcctggggatcggtacagctccctggggtggtgacaggccctttgtgaaagttgtgtgcttggtcttccaccccagccccagacactgcttcaaatagcaccaaccagatgggagtccacatctgtggtggcaaaatgctgacattttcccaagaggtacacaaggtgggagaggcctgctgtagcagaggtgtgtgttagagaaagcaggggcctgatttagtagcagagaactgggtgagaaaaatggccagagaaagtgacctgccagctaccagtgtttccgaaaatgagggtgggatgggcccatttgcagagcaggacagcagtcatccccatagccctctgaggaggggagggatgcttagagcaggcagttctggcagttctgacgtggcaggtgccattgcaacttgtgcggaggagtcttaggaagtgctgtcataattcataaggtcaagagcaacatctggatgaatgagccacctgaaatgtgtgtgggctgagccacaggaagggtgagtcctcttgcttgtggtgctttatggtgtgcaggttgcttgctttcccacattctctcatttgcttgaaggcagcctaacaaaagggagtccccaaagagctccatgagagcttaagaaaattcatctcctgaggacaaagagaacaaagatctgtcctgtggtcacactgttgaggctctgtcttcacagctgatgttctcctagtggaggtacagctgaagaacattcagccccagcacgagaagatacagagcaacttggaaaccccaaagggagacacacccttaacactgccgtgctgtgctgtgccgtgtcctgaaggaggagagagccctatctcctcctggttttgttgctgacattgcagctgatcatgccttgactccttcatctctaacagaggaagaactgtattatcaaaccttatggtctacccatgaataaataaaatatttgttcaagcac

SEQ ID NO: 205412 - DNA, 4529 bp, Artificial Sequence
  derived and/or modified sequence
cccatcgcgcgcctcaggcgtctcctcctcctccctccttccccctcctctctcctcccctcctcccgcgcgccccgctttgtgtccgtggtctcccgcgcgggacggagggactggccggagctggcgctttctcagcactagatctggactccgacccggcgccagaatacagtcgctttgaatcgaagatacatgacttacgagaacaaatgatgaacagcagcatgagctctgggtctgggtccctccgaacaagtgaaaagaggtccttgtatgtcagggccctgtttgattatgatcggactcgggacagctgcctgccaagccaggggctcagcttctcttatggtgacattctgcatgtcattaatgcctctgatgatgagtggtggcaggcaaggctggtgaccccacacggagaaagtgagcagatcggtgtgatccccagtaagaagagggtggaaaagaaagaaagagctcgattgaaaactgtgaagttccatgccaggacggggatgattgagtctaacaggtcgatcaaaacgaaacgtaaaaagagtttccgcctctctcgaaagtttccattttacaagagcaaagaaaacatggcccaggagagcagcatacaggaacagggagtgacatccaacaccagtgacagcgaaagcagttccaaaggacaagaggatgctattttgtcatatgagccagtgacacggcaagaaattcactatgcaaggcctgtgatcatcctgggcccaatgaaggaccgagtcaatgatgacctgatctccgaatttccacataaatttggatcctgtgtgccacatactacccggcctcgacgtgataatgaggtggatggacaagactaccactttgtggtgtcccgagaacaaatggagaaagatattcaggacaacaagttcatcgaggcgggccaatttaatgataacctctatgggaccagcatccagtcagtgcgggcagttgcagagaggggcaagcactgcatcttagatgtttccggcaatgctatcaagagactgcagcaagcacaactttaccccattgccattttcatcaagcccaagtccattgaagcccttatggaaatgaaccgaaggcagacatatgaacaagcaaataagatctatgacaaagccatgaaactggagcaggaatttggagagtactttacagccattgtacagggtgactcactggaagagatttataacaaaatcaaacaaatcattgaggaccagtctgggcactacatttgggtcccatcccctgaaaaactctgaagaatcccctccaaccattctcttgtgaacagaagaaatcaagtccctcttccctcctccctcttcattcctgtccccatggggagaacaaatgctactgttcttgtccccttttttagatatgtcaaaaaaaattaagttttctagtcctgttctttttttttttttaagtttttgtttgtttcagtttattttttgggatgatgccatctcattcatcatgtgactgtgcccattcctgcatggacctttcccaagcgctagcacaggtgcaaaatccatcagagccattgttttcataaaaaccaagcagaagtgaagagaaaagaggaggactgatggaaagacagactctggacagctgcacggcttgtgaagtgagctaaatgcaccacatgatgagatgctcctgggcatttctccctatctgtactgctgtcttgcagctctgaacggtgcaacgtaatggcgacagaaagtatcttatttatatatagatatatatatgtaatttatataaaatatatagaaattattatatatatatattatacactctcatataatatatatatattcacacacatttgggttagaaaatctatggagacttcatcaatggtactatgttattagagaaatgctttaattttcatattccaatcagatggcatcttctatcccagctggttgggaagggattgaagatggtagcaagtgctgcactaagggcactcgcatttggtcattctcttgagagctaggaggggtcagcctgaggccggagaggaagggcttttgcctggggtgagagggtgagagacttgacctgaaagcagctgctgcccctgaggtgcagccagagtcctgtgtgcggacagagagaatggctaatgatgctccgcgtggaattgcctattgttttatgccacctgatgtgtctgcatgagaggtttcctttttgttcctttttaagctgctgttaaaccaaaaccatgttgtgctactgtgtcagccttttcattattgcaaattttacttttactatttaagtgaatgcatagaatccaatttgccaaggttctaaaggcttatgaggtcctgaaggagccaggccttgtgatggagtaggtgacacaggcctggttgtcctgtcagcagaagggaaagcaggggctgggctgagaggaggacacggagggctctgctgaggttccttcctgggttccaccaacagggacagggagtcacttgccttccagttctgtgctgggatggcgggacagcacttggcttgcttggccagctgcgtcatgagtttgatttggtttttttttttttgcagctgcttcatatgctctgctccagcccctccccaacagctggtagcttatggtttcttcaagaggaaagtagactttatgctgtacatttgagctgtagagctaagattcgcttactggtgagctgtgaaaccttgttgctttttcccagagtctgatggcagtgactgtgatcaagggaatcttcaccgccacaagtgcaggcagcaggtgtggttcaggtccccccccaccccactgtgctcctttgaagccaacgtgcctccctcgcctccatactggagggacgacgcaggggagaacagagaagtgcttggccctaggattgaggcacttgtttcctagcccgctgggttagggctggtgcaagcgaggcaatgttgaggatgctttaagcactaccagccgaatccgggaactctgttaacagttgtccaaccagcagaatgaggctaactgtataaagcatgggacccaggatgaggataaggaaaggacagcggctttccctgggcagtacaatggcttgaaggcaaaaagggataaagtgacagccgactgtgactctggtgaggaggggtgagcagggaggttgattctctgatgttaactaagtggcaaagtctcaaccgtgctcagccctccccctcccagggaagagaaacaaagattcaaagtaagcatgatactagtgggtttaccagtgtttcttccaaggagacatatattttttaataaacgatagttgcaatgaactgtggctcagagaccttcttaaagtagttgagaagggagggcgtgggcaaagcagtgggaagaacatcccaaacttttgggggccagagggctctctccttagtgatgatcagctagccgagctgggccgtcctggggatcggtacagctccctggggtggtgacaggccctttgtgaaagttgtgtgcttggtcttccaccccagccccagacactgcttcaaatagcaccaaccagatgggagtccacatctgtggtggcaaaatgctgacattttcccaagaggtacacaaggtgggagaggcctgctgtagcagaggtgtgtgttagagaaagcaggggcctgatttagtagcagagaactgggtgagaaaaatggccagagaaagtgacctgccagctaccagtgtttccgaaaatgagggtgggatgggcccatttgcagagcaggacagcagtcatccccatagccctctgaggaggggagggatgcttagagcaggcagttctggcagttctgacgtggcaggtgccattgcaacttgtgcggaggagtcttaggaagtgctgtcataattcataaggtcaagagcaacatctggatgaatgagccacctgaaatgtgtgtgggctgagccacaggaagggtgagtcctcttgcttgtggtgctttatggtgtgcaggttgcttgctttcccacattctctcatttgcttgaaggcagcctaacaaaagggagtccccaaagagctccatgagagcttaagaaaattcatctcctgaggacaaagagaacaaagatctgtcctgtggtcacactgttgaggctctgtcttcacagctgatgttctcctagtggaggtacagctgaagaacattcagccccagcacgagaagatacagagcaacttggaaaccccaaagggagacacacccttaacactgccgtgctgtgctgtgccgtgtcctgaaggaggagagagccctatctcctcctggttttgttgctgacattgcagctgatcatgccttgactccttcatctctaacagaggaagaactgtattatcaaaccttatggtctacccatgaataaataaaatatttgttcaagc

SEQ ID NO: 205413 - protein, 719 aa, Artificial Sequence
  derived and/or modified sequence
MPRTMIPPGECTYAGRKRRRPLQKQRPAVGAEKSNPSKRHRDRLNAELDHLASLLPFPPDIISKLDKLSVLRLSVSYLRVKSFFQVVQEQSSRQPAAGAPSPGDSCPLAGSAVLEGRLLLESLNGFALVVSAEGTIFYASATIVDYLGFHQTDVMHQNIYDYIHVDDRQDFCRQLHWAMDPPQVVFGQPPPLETGDDAILGRLLRAQEWGTGTPTEYSAFLTRCFICRVRCLLDSTSGFLARGSQAWQLRLCCPEPLMTMQFQGKLKFLFGQKKKAPSGAMLPPRLSLFCIAAPVLLPSAAEMKMRSALLRAKPRADTAATADAKVKATTSLCESELHGKPNYSAGRSSRESGVLVLREQTDAGRWAQVPARAPCLCLRGGPDLVLDPKGGSGDREEEQHRMLSRASGVTGRRETPGPTKPLPWTAGKHSEDGARPRLQPSKNDPPSLRPMPRGSCLPCPCVQGTFRNSPISHPPSPSPSAYSSRTSRPMRDVGEDQVHPPLCHFPQRSLQHQLPQPGAQRFATRGYPMEDMKLQGVPMPPGDLCGPTLLLDVSIKMEKDSGCEGAADGCVPSQVWLGASDRSHPATFPTRMHLKTEPDSRQQVYISHLGHGVRGAQPHGRATAGRSRELTPFHPAHCACLEPTDGLPQSEPPHQLCARGRGEQSCTCRAAEAAPVVKREPLDSPQWATHSQGMVPGMLPKSALATLVPPQASGCTFLP

SEQ ID NO: 205414 - DNA, 5661 bp, Artificial Sequence
  derived and/or modified sequence
ggcacgtggactccctttaatccagtgactgtcaggtcgatcatatgccgaggacgatgatcccgccgggggagtgcacgtacgcgggccggaagcggaggaggcccctgcagaaacagaggcccgccgtgggggcagagaagtccaacccctccaagcgacaccgggaccgcctcaacgccgagttggaccacctggccagcctgctgccgttcccgcctgacatcatctccaagctggacaagctttctgtcctgcgcctcagtgtcagttacctccgggtgaagagcttcttccaagtcgtgcaggagcagagctcacggcagcctgcggccggcgccccctcgcccggagacagctgtcctcttgcagggtctgccgtgctggagggaaggctgctgttggagtctcttaatggctttgctctggtcgtgagtgcagaagggacgatattttatgcatcagcaacgatcgtggactatctgggcttccatcagacggatgtaatgcaccagaacatttatgactacatccacgtggacgaccgccaggacttctgccggcagctccactgggccatggaccctccccaggtggtgtttgggcagcccccgcccttggagacaggagatgatgctatcctggggaggctgctcagggcccaggagtggggcacaggcacgcccaccgagtactcggccttcctgacccgctgcttcatctgccgtgtgcgctgcctgctggacagcacctcgggcttcctggcccgggggtcacaggcttggcagctgcggctctgctgtcccgagccactcatgacgatgcagtttcaaggaaaactaaaattcctgtttggacagaagaagaaggcgccgtcaggagccatgctcccgccgcggctgtcgctgttctgcattgcggcacccgttctcctcccctccgcagcggagatgaaaatgaggagcgcgctcctgagggcaaaacccagagcagacaccgcagccaccgcggatgcaaaagtaaaagccaccaccagtctgtgcgaatcggaactgcatggaaaacccaattactcagcaggaaggagcagcagagagagcggcgttttggtgctcagggaacagactgacgctggccgatgggcacaggttcccgccagggccccatgcctgtgcctccggggtggccctgaccttgtccttgaccccaaggggggctcaggggacagggaggaggagcagcacaggatgctgagcagggcctctggagtgacagggcggagggagactccaggacccacaaagcccctgccctggacagcgggaaagcacagtgaggatggtgccaggccgaggctgcagcccagcaagaatgacccgccctccctgcgccccatgccccgcggctcctgcctgccctgcccgtgtgtccagggcactttcaggaactcgcccatctctcacccgccgagcccgtcccccagtgcctactccagccggaccagcagacccatgcgggatgtcggtgaggaccaggtgcaccctcccctctgccactttccccagaggagcctgcagcaccagctccctcagcctggagctcagcgttttgccacgaggggctatcccatggaggacatgaagctgcaaggtgtaccgatgcctccgggggacctgtgtggtccgacgctgctgctagatgtgtccatcaagatggagaaggactctgggtgtgagggtgctgcagacggctgtgtgcccagccaggtgtggctgggggccagtgacaggagccacccagccaccttccctaccaggatgcacctgaaaacagagccagactctcggcaacaggtgtacatctcgcacctggggcacggcgtgcggggggctcagccccatgggagggccactgctgggcgcagcagggagctgacccctttccaccctgcacactgtgcctgcctggagcccacagacggccttccccagtcggagcctccccaccagctctgtgcacggggccgaggtgaacagtcctgcacctgcagagctgctgaggccgcccctgtggtcaagcgggagcccttggactcaccccagtgggctactcacagccagggaatggtgcccgggatgttgcccaaaagtgccttggccacgctggtcccgccccaagcttcggggtgcacattcctgccatagcgcagtgaccaccatccaagctcagatctgtgtgtctacgctcagatgcgtcggtggctgggctgccctgctcctggtcaggccggagcccgtcctaagacacacgctttgcagagctgtgcatgcgcagtctgctagtgtgtgtgtgcagcatacgcaggagcctatcctgaattttgtaaaatatcccaacagttcttaaatgaaaactggccttaagtctattcaagcatgacagcatttctctttgaggaattaaaatctttaggaaagtgatcatggctggacagcttcatgccccagaggcagcgagcacccgtcccatggctgccaagtccacagtcggggatgaagcagtcgggtgatgctcccaagtccgcagtcggggatgaagcggtcgggtgatgctcccaagtccgcagtcggggatgaagcggtcgggtgacacacctagctcagccctcccaggccacctgcagctcccagcctgtgctgtgcaggcagggtcagcccatcgccacagtgcactgtagaggccagcacacggcaaattagaaatacaacacgcggagaaaggggtccgtgagcccactcatagaggaatctagaacgttccaggcagcagaggctggcagcgtgggtcccacactgccccacaccgtgcggcaggtgctccatggcgccatgacagagtctgaggccagacctggactggaattgacagcataacccctgttccttctggacatctcccgagttctcagtgggtctctgcggacggttcttcctaatctgcctcttggtacatcacgtaatacagagttcacagactccgggtttggaagtacagagaaacacacaacgtagagagaagacacaggaaactgcgctgcctgtgggggtttctctctggctggctgtacagttcactcaaatgagggttcccattgccatcctaggagaataattagggacaagacagacaagtattaatagcattaaaacagttgtaaaggcgatattttctgagagtaggaaatttggatacaaaagcataagtcagaaagtgaaggtcaccaatccaccaacccgagaacctacagctgatggtgcatttcaggcttcttccacggtctggcctggaaccccacccggctggtgcaggcatcagatcagggtgtagaagtcaccccaagcaagaggaagccaggcagtgaggccctggggtgtggctgcagctgggcccacctgtgcgggggtgggaaggccccatcctcagggagagggcatcggcgccctgacgtcagctccactgggagtggcaggagctgtgggagcccatgggtgagggacccaccaccccgctgcactgtgcattgtgcctcccgtgtggacgccctctctgttgttggcccgcgggtgagggacccaccacccctagggacccaccaccccgccgcactgtgcattctgcctcctgtgtggacgccctctctgttgtcagtggctttgaggtgtcagtgcttacttagatgctggtttaatgctggacccatttgttaaacgcaccttcactttgtcaaaacccaggtttggttggcaggactgggtcttctgcccaatgccaggtgcctgcgcctctcagtggcctggttcttggacagtttgcccccatgtggcagggatagggataaggatctcctctcagtactggaagagaacagccaaccatctgagcccagagtcacagatccatcgtggccccctatgacccccaagccctaccgagggggcactcactctctgcttagccagggggcgtctttcaaaaggtgacctccatgctgtgctgtcgtgggtgtgagacgtgctcatggccttccactgccatctctcccttatctgatgcctaaagtcacgatggggacagagctacccaggggccagccatggggtgaccagccacctgagggtcagtcacctgtggagagcaggcacctgtgaagaccaggcacctgaggactggcgcctacttcccactttggccctacactggcacagagcccctctttattcatttctcatgctgagcatggcacacttctggcctctgggcatttatggatttaagaccaggatggtatttcagaagcttcccacttccttcctattctaaccgagtgcccagctcctttgctgatcatggaaagacccttaataattaggcctgcaggccaggcgcagtggctcatgcctataatcccagcactttaggaggtcaaggtaggaggatcgcttaagcccaggagttcaagaccagcctgggcaacacaggaagaatgtgtctctacaaaaaataattaaaaatcagatctgctgtatccctgaaaaagtctcaatcaacatgcatgttccactcttggagttccctgttctgagggccagccacgtcctgtgtcctggagcttagccctcagcagctcccttcagcctgggcgccgcctgggtcccaaacgtggcagctgctcttccagtctcggggccgaggagggcagggagctcagtgactgagagtcttgtgtatcacatgtcttgagtgtcctggagccaacggctgtcactgggaaaaacaccaggccccaaagatcgaatcagagacgtggctgcgtgtttgcgattgtagccaggcccttcagtgtcatcaaaggagcactggggcctccttaagcacagacggcagcccctgcccaggaggcttcttcaccacgtcctgccctgcagcctcccagacctttagatgcgcccctgcccaaggccctcctggtgacaggtgccagattgagtggtgggttgctgccaggcaggccacgctgtgttgacgctgcactcagcacgtgggtgttggctctgccggttttgtggtgtggggaccctacaggaggctgcggccctgagagcctgggatcagcgaggtgtccgacatcccttcctcaacggcaacaaaaactccccaagtcagcactttggttattttatagccacaaccctcttggaaaacagtggggaagactatggaacatagaaagtgtggatgtatcacttctctctaaaatgtcattgttagcactaattacaggttcatgtttttctgtgtatgtagcttttccctatatagctgaaaaagtattaaagtcaaatataaggtgggaatgggatggaagggaggagatcaatacaacttatatttttgcagtttctactggaagaaaaaagttttcaatacctagaccaacttgttgaatttttaaaacttatgcactataaatgcaactttctctactgctttctcagtgcctttaggaagctttcaaatttttttgtactgtggtttgtattaaatttgcaatattgatgtaaaatacatgacatgctagtacatgtttaacaaaaatttaaa

SEQ ID NO: 205415 - DNA, 2160 bp, Artificial Sequence
  derived and/or modified sequence
atgcccaggacaatgatccctccgggagaatgcacgtatgcaggacgtaagaggagaaggcctttgcaaaaacagcgcccggctgtgggggccgagaagtccaatcccagtaagcgacaccgggacaggctgaatgccgagctggatcatctggcatccctcctgcctttcccaccggatattatttctaaactggacaaacttagcgtgttgcgcctcagcgtgagctacctgcgtgtgaaatctttttttcaggtggtccaagaacagagcagcagacagcctgccgccggcgcgcctagtccaggagactcatgtcccctggccggatccgcagtacttgaagggcgcctgctcctggaatctctgaacgggttcgcccttgtggtcagcgccgaagggactattttctatgcctccgctactatagtggattacctgggattccatcaaaccgatgtgatgcaccagaacatctacgactacatccatgtggacgatcggcaggacttttgccgccaactgcattgggcaatggacccacctcaggtggtgtttggacagccacctccccttgaaaccggggacgacgccatccttgggcgattgcttagggcccaagaatggggcaccgggacacctactgagtatagcgcctttttgacgcggtgttttatttgccgagtgaggtgtctactcgactcaactagtggatttctcgcacggggaagtcaagcttggcagcttcggctctgctgtccagaaccacttatgacgatgcaattccaaggcaaactaaagtttctgttcggccagaagaaaaaggccccctcaggggcaatgcttccaccaagactctcgctcttttgcattgcagcacccgtcctgctgccttctgctgctgagatgaagatgcgatcagccctgctccgtgccaaaccaagggccgacacggctgcaactgcggacgccaaggtgaaggcaactacaagtctttgcgagagcgaattacacgggaaacctaattactctgctggtcggtccagtcgagaatcaggcgttctcgttcttagggagcagacagatgctgggagatgggcccaggtgcctgcccgtgctccctgcttgtgtctcaggggcggacctgatcttgtcctcgatcccaagggcggatctggcgatagggaggaggagcaacaccggatgctgtcaagagcatctggagtcaccggtaggagagagacaccagggccaacaaagcctcttccatggacggcaggcaagcactccgaagatggcgcgaggccccgactacaaccatctaagaacgacccaccttctctcaggccgatgccgcggggcagctgcctgccatgcccttgtgtccagggcacttttcggaatagtccgatatcacatccacctagcccatctccaagtgcttactcgagtagaacaagtcgcccaatgcgcgacgttggggaggatcaagtgcaccctcccctctgccactttccgcagaggagcttacaacatcagctgccccagccgggggcccagcgctttgccacccggggttatccaatggaggatatgaaactgcagggggttcccatgcccccaggggatttatgtggccctacactcctactggatgtcagcatcaaaatggagaaggactccggatgtgaaggagctgcagacggatgcgtgcccagtcaggtatggctgggagcatccgaccggtcacaccccgccacatttccaacaaggatgcacctgaagacagagccagattcccgccagcaggtgtatatttcccacctgggtcacggggtacgaggcgcccagccgcacggaagggccaccgctggaaggtcacgagagctgacaccgtttcaccctgcccattgtgcttgcctcgagcctactgacggacttccccaaagcgagcctccacatcagctttgtgcccgcggtagaggagaacaatcatgcacctgtagagccgctgaggccgctccagtggttaaacgggagccactggacagcccacagtgggccacccacagtcagggaatggttcctggcatgctcccaaagtcagcactagctacacttgtccccccacaggccagcggctgcacttttctgccttag

SEQ ID NO: 205416 - DNA, 2160 bp, Artificial Sequence
  derived and/or modified sequence
atgcccaggaccatgatccccccaggagagtgcacctacgccggcaggaagagaagaagacccctgcagaagcagaggcctgctgtgggcgctgagaagagcaaccccagcaagaggcaccgggaccggctgaatgctgagctggaccacctggccagcctgctgcccttccccccagacatcatcagcaagctggacaagctgtctgtgctgcggctgtctgtgtcctacctgcgggtgaagagcttcttccaggtggtgcaggagcagagcagccggcagcctgctgctggggcccccagccctggggacagctgccccctggccggcagcgctgtgctggagggccgcctgctgctggagagcctgaatggatttgccctggtggtgtctgctgagggcaccatcttctacgccagcgccaccatcgtggactacctgggcttccaccagacagatgtgatgcaccagaacatctatgactacatccacgtggatgaccggcaggacttctgccggcagctgcactgggccatggaccccccccaggtggtgtttggccagcccccacccctggagactggagatgatgccatcctgggccgcctgctgcgggcccaggagtggggcaccggcacccccacagagtacagcgccttcctgacccgctgcttcatctgccgggtgcgctgcctgctggacagcaccagcggcttcctggcccggggcagccaggcctggcagctgcggctgtgctgcccagagcccctgatgaccatgcagttccagggcaagctgaagttcctgtttggccagaagaagaaggcccccagcggggccatgctgcccccccggctgagcctcttctgcatcgccgcccctgtgctgctgcccagcgctgctgagatgaagatgaggtctgccctgctgcgggccaagcccagggctgacacagctgccacagcagatgccaaggtgaaggccaccaccagcctgtgtgagagcgagctgcacggcaagcccaactacagcgctggccgcagcagccgggagagcggcgtgctggtgctgcgggagcagacagatgctggccgctgggcccaggtgcctgcccgggccccctgcctgtgcctgcggggcggccctgacctggtgctggaccccaagggcggcagcggggaccgggaggaggagcagcacaggatgctgagccgggccagcggcgtgacaggccggcgggagaccccaggccccaccaagcccctgccctggacagctgggaagcacagtgaagatggagcccggccccggctgcagcccagcaagaatgacccccccagcctgcggcccatgccccggggcagctgcctgccctgcccctgtgtgcagggcaccttcaggaacagccccatcagccacccccccagccccagccccagcgcctacagcagcaggaccagccggcccatgagagatgtgggggaggaccaggtgcacccccccctgtgccacttcccccagaggagcctgcagcaccagctgccccagcccggggcccagagatttgccacccggggctaccccatggaggacatgaagctgcagggcgtgcccatgcctcctggggacctgtgtggccccaccctgctgctggatgtgtccatcaagatggagaaggacagcggctgtgagggcgctgctgatggctgtgtgcccagccaggtgtggctgggcgccagtgacaggagccacccagccaccttccccaccaggatgcacctgaagacagagccagacagccggcagcaggtgtacatcagccacctgggccatggagtgcggggggcccagccccacggccgggccacagctggccgcagccgggagctgacccccttccacccagcccactgtgcctgcctggagcccacagatggcctgccccagagcgagcccccccaccagctgtgtgcccggggccgcggggagcagagctgcacctgcagagctgctgaggccgcccctgtggtgaagcgggagcccctggacagcccccagtgggccacccacagccagggcatggtgcccggcatgctgcccaagagcgccctggccaccctggtgcccccccaggccagcggctgcaccttcctgccctag

SEQ ID NO: 205417 - DNA, 2160 bp, Artificial Sequence
  derived and/or modified sequence
atgccccggaccatgatcccccccggcgagtgcacctacgccggccgcaagcggcggcgccccctgcagaagcagagacccgccgtcggtgctgagaaatcaaacccttctaagaggcatagagatagactgaacgcagagctggatcacctggcgtcacttcttccattccctccggatataatttcgaaactagacaagctgagcgtcctaagactgtcagtgagctatctgcgcgtgaaaagtttcttccaggttgtgcaggaacagagctctcgacagccggctgcaggggccccatcccctggagactcctgccctctggctggttccgctgtactcgagggccgccttctgttagagtctctgaatggctttgctcttgtggtatctgccgaaggcacaatcttttatgcttctgctactattgtggactatcttgggtttcatcagacagatgtgatgcatcagaacatttatgattatattcatgtagacgacaggcaagatttctgtcggcagttgcactgggcgatggacccgcctcaggtcgtgtttggacagccgcctcctcttgagacgggagacgatgcaatcctggggcgtctccttcgtgcgcaggaatggggcacgggtactccgaccgagtacagtgcattccttacacgttgctttatctgccgcgtgcgttgtctccttgactccaccagtggcttcctggctagaggatctcaggcatggcaattgcgcttatgttgtcctgagccgctcatgacaatgcagttccaaggaaagctcaaatttttgtttggacagaaaaagaaagctccttctggagctatgctccccccccggttgagcctgttttgcatagccgccccagttctcctgcctagtgccgccgagatgaaaatgaggtctgctctgttgcgagcgaagccaagagccgataccgccgctaccgccgatgctaaggtaaaagcaacaacttctctgtgtgagagcgaactccacggaaaacctaactattccgccgggagaagctcaagggagtccggtgttcttgtgctgcgtgaacagactgacgccggaaggtgggcgcaggttcctgccagagcaccatgtctttgtctccgtggcggaccagacctcgtcctggaccctaagggaggttccggagacagagaggaagagcagcacagaatgctgtccagagcgtctggggtgacagggcggagggaaactcccggacccaccaaacctttgccttggacggctggcaagcacagtgaagacggggcccggcctcggctgcagccctccaagaacgatcccccatccctgcggcctatgccccgagggagctgtttaccttgtccttgcgtgcagggaacctttaggaatagcccaatctcccaccccccatctccttcaccctccgcgtatagctcacggacctcccgtcccatgcgcgacgtcggagaggatcaggtccaccccccactctgtcatttcccccagagatctttacagcatcaactaccacaaccaggggcacagcgcttcgctacccgcggctatccaatggaagacatgaagctgcagggggttcctatgccgcccggtgacctatgtggcccgacgctgctgctggatgtatctattaagatggagaaggactccggctgtgagggtgcagctgacggatgcgtgcctagtcaagtatggcttggcgcgagcgatcggtcacatccggccacctttcctacgaggatgcacctgaagacggaacctgatagccgacagcaggtctacattagtcatctcggtcacggggtacgcggggcccaaccacacggcagagctaccgccggcaggtcccgggaattgactcccttccatccagcacattgtgcctgcctggaaccaactgacggtctccctcagagtgaacctccacatcaactttgcgctcgagggaggggagagcagagctgcacatgccgcgccgctgaggccgcaccagtggtgaaaagagaacccctggattcaccccagtgggccacccatagtcagggcatggtccccggcatgttacccaagtccgccctggcaaccctggtccccccgcaggcatcagggtgtacttttcttccttag

SEQ ID NO: 205418 - DNA, 2160 bp, Artificial Sequence
  derived and/or modified sequence
atgcctagaactatgattccacctggggaatgcacgtacgctggacgaaagcgcaggagaccgctccagaaacagcggccagcagtgggcgcagagaaatccaaccctagtaaacgacaccgggaccgcttgaatgcagagttagatcaccttgccagtctcctccctttccccccagatatcatctctaaactggacaaactgagcgtactgagactctcggttagctatctccgggtgaagtcttttttccaagtggttcaagagcagtctagcagacagccagcagctggggctccatcccccggtgattcctgtccactggctggaagcgctgtgttagaggggcgattgctgctcgaaagtttaaatggatttgccttggtagtgtctgccgaaggaaccatattttacgcctcagctacgatcgtagactatctcggcttccaccagactgacgttatgcatcagaatatttacgattacattcatgttgatgacaggcaagacttttgtcggcagctccattgggccatggaccctccccaagtcgtctttggccagcccccacctctggagaccggggatgacgctattttgggcaggctgcttagggcacaagagtgggggacagggactccaaccgaatactctgcttttctgacgcggtgcttcatttgccgagtaagatgtctgcttgactctacgtcaggattcctcgccagagggtcccaggcctggcaattaaggctgtgctgtcccgagcctctgatgacgatgcagtttcagggcaagttgaagttcctgttcggccagaaaaagaaggcaccaagtggtgccatgcttccaccgcgtttgagccttttctgcattgcagcgccagtcctgctgccgtctgcggctgagatgaaaatgcggagcgcactgctccgtgccaaaccacgagcagacacagccgcaactgcagacgcaaaggtgaaggcgactacatccctttgcgagtccgaattgcacggaaaacctaattactcagctggcaggtcctccagagagtcgggtgtcttagtcctgcgagagcaaaccgatgccggacgatgggcccaagtccctgcgagggctccctgcctttgtttaagaggcggacccgatctagtcctggatcctaagggaggttcaggagacagggaggaagagcaacatcgaatgctctcaagagccagtggggttacaggaagacgagaaacaccgggtcctacaaagcccctgccctggacagccggtaagcacagcgaagacggcgctcgtcctcgacttcagccgagtaagaatgatcctccaagcctccgcccaatgccacgaggctcctgtttgccttgcccctgtgtgcaggggacctttcgaaactctcctatctcacacccaccttctcccagtcccagcgcctactcctcaagaacctctcgccctatgcgcgacgttggcgaggaccaggtacatcctccactctgccactttccgcagagaagccttcaacatcagctgccccagcccggagcgcagcgttttgccacccgcggttatccaatggaagatatgaagctgcagggtgtccccatgccaccaggcgacctgtgtggccctaccctcctgctcgatgtgtcgataaagatggaaaaagatagtggatgtgagggggcagccgacggctgcgtgccctcccaggtgtggttgggtgcctccgacaggtcgcacccagcgacattccctactaggatgcacctgaaaacagagcccgatagccggcagcaggtgtatattagtcacctaggccatggagtaagaggagcccagccccatggacgggcaaccgcaggcagatctcgcgagctcacaccatttcaccctgctcattgcgcctgtctagaacccacagatgggctgccacagtcagagccccctcatcagctgtgcgccaggggaagaggggaacagtcttgtacctgtagagctgcggaagctgcacctgtggtcaaacgcgagcccctggacagccctcagtgggccactcactcacagggaatggtgcctgggatgctgccaaagtcagccctggcaaccctagtgccaccacaggcttctggctgtaccttcctgccttag

SEQ ID NO: 205419 - DNA, 2160 bp, Artificial Sequence
  derived and/or modified sequence
atgcccagaaccatgatcccccccggcgagtgcacctacgccggcagaaagagaagaagacccctgcagaagcagagacccgccgtgggcgccgagaagagcaaccccagcaagagacacagagacagactgaacgccgagctggaccacctggccagcctgctgcccttcccccccgacatcatcagcaagctggacaagctgagcgtgctgagactgagcgtgagctacctgagagtgaagagcttcttccaggtggtgcaggagcagagcagcagacagcccgccgccggcgcccccagccccggcgacagctgccccctggccggcagcgccgtgctggagggcagactgctgctggagagcctgaacggcttcgccctggtggtgagcgccgagggcaccatcttctacgccagcgccaccatcgtggactacctgggcttccaccagaccgacgtgatgcaccagaacatctacgactacatccacgtggacgacagacaggacttctgcagacagctgcactgggccatggaccccccccaggtggtgttcggccagcccccccccctggagaccggcgacgacgccatcctgggcagactgctgagagcccaggagtggggcaccggcacccccaccgagtacagcgccttcctgaccagatgcttcatctgcagagtgagatgcctgctggacagcaccagcggcttcctggccagaggcagccaggcctggcagctgagactgtgctgccccgagcccctgatgaccatgcagttccagggcaagctgaagttcctgttcggccagaagaagaaggcccccagcggcgccatgctgccccccagactgagcctgttctgcatcgccgcccccgtgctgctgcccagcgccgccgagatgaagatgagaagcgccctgctgagagccaagcccagagccgacaccgccgccaccgccgacgccaaggtgaaggccaccaccagcctgtgcgagagcgagctgcacggcaagcccaactacagcgccggcagaagcagcagagagagcggcgtgctggtgctgagagagcagaccgacgccggcagatgggcccaggtgcccgccagagccccctgcctgtgcctgagaggcggccccgacctggtgctggaccccaagggcggcagcggcgacagagaggaggagcagcacagaatgctgagcagagccagcggcgtgaccggcagaagagagacccccggccccaccaagcccctgccctggaccgccggcaagcacagcgaggacggcgccagacccagactgcagcccagcaagaacgacccccccagcctgagacccatgcccagaggcagctgcctgccctgcccctgcgtgcagggcaccttcagaaacagccccatcagccacccccccagccccagccccagcgcctacagcagcagaaccagcagacccatgagagacgtgggcgaggaccaggtgcacccccccctgtgccacttcccccagagaagcctgcagcaccagctgccccagcccggcgcccagagattcgccaccagaggctaccccatggaggacatgaagctgcagggcgtgcccatgccccccggcgacctgtgcggccccaccctgctgctggacgtgagcatcaagatggagaaggacagcggctgcgagggcgccgccgacggctgcgtgcccagccaggtgtggctgggcgccagcgacagaagccaccccgccaccttccccaccagaatgcacctgaagaccgagcccgacagcagacagcaggtgtacatcagccacctgggccacggcgtgagaggcgcccagccccacggcagagccaccgccggcagaagcagagagctgacccccttccaccccgcccactgcgcctgcctggagcccaccgacggcctgccccagagcgagcccccccaccagctgtgcgccagaggcagaggcgagcagagctgcacctgcagagccgccgaggccgcccccgtggtgaagagagagcccctggacagcccccagtgggccacccacagccagggcatggtgcccggcatgctgcccaagagcgccctggccaccctggtgcccccccaggccagcggctgcaccttcctgccctag

SEQ ID NO: 205420 - protein, 2249 aa, Artificial Sequence
  derived and/or modified sequence
MAHNAGAAAAAGTHSAKSGGSEAALKEGGSAAALSSSSSSSAAAAAASSSSSSGPGSAMETGLLPNHKLKTVGEAPAAPPHQQHHHHHHAHHHHHHAHHLHHHHALQQQLNQFQQQQQQQQQQQQQQQQQQHPISNNNSLGGAGGGAPQPGPDMEQPQHGGAKDSAAGGQADPPGPPLLSKPGDEDDAPPKMGEPAGGRYEHPGLGALGTQQPPVAVPGGGGGPAAVPEFNNYYGSAAPASGGPGGRAGPCFDQHGGQQSPGMGMMHSASAAAAGAPGSMDPLQNSHEGYPNSQCNHYPGYSRPGAGGGGGGGGGGGGGSGGGGGGGGAGAGGAGAGAVAAAAAAAAAAAGGGGGGGYGGSSAGYGVLSSPRQQGGGMMMGPGGGGAASLSKAAAGSAAGGFQRFAGQNQHPSGATPTLNQLLTSPSPMMRSYGGSYPEYSSPSAPPPPPSQPQSQAAAAGAAAGGQQAAAGMGLGKDMGAQYAAASPAWAAAQQRSHPAMSPGTPGPTMGRSQGSPMDPMVMKRPQLYGMGSNPHSQPQQSSPYPGGSYGPPGPQRYPIGIQGRTPGAMAGMQYPQQQDSGDATWKETFWLMPPQYGQQGVSGYCQQGQQPYYSQQPQPPHLPPQAQYLPSQSQQRYQPQQDMSQEGYGTRSQPPLAPGKPNHEDLNLIQQERPSSLPDLSGSIDDLPTGTEATLSSAVSASGSTSSQGDQSNPAQSPFSPHASPHLSSIPGGPSPSPVGSPVGSNQSRSGPISPASIPGSQMPPQPPGSQSESSSHPALSQSPMPQERGFMAGTQRNPQMAQYGPQQTGPSMSPHPSPGGQMHAGISSFQQSNSSGTYGPQMSQYGPQGNYSRPPAYSGVPSASYSGPGPGMGISANNQMHGQGPSQPCGAVPLGRMPSAGMQNRPFPGNMSSMTPSSPGMSQQGGPGMGPPMPTVNRKAQEAAAAVMQAAANSAQSRQGSFPGMNQSGLMASSSPYSQPMNNSSSLMNTQAPPYSMAPAMVNSSAASVGLADMMSPGESKLPLPLKADGKEEGTPQPESKSKKSSSSTTTGEKITKVYELGNEPERKLWVDRYLTFMEERGSPVSSLPAVGKKPLDLFRLYVCVKEIGGLAQVNKNKKWRELATNLNVGTSSSAASSLKKQYIQYLFAFECKIERGEEPPPEVFSTGDTKKQPKLQPPSPANSGSLQGPQTPQSTGSNSMAEVPGDLKPPTPASTPHGQMTPMQGGRSSTISVHDPFSDVSDSSFPKRNSMTPNAPYQQGMSMPDVMGRMPYEPNKDPFGGMRKVPGSSEPFMTQGQMPNSSMQDMYNQSPSGAMSNLGMGQRQQFPYGASYDRRHEPYGQQYPGQGPPSGQPPYGGHQPGLYPQQPNYKRHMDGMYGPPAKRHEGDMYNMQYSSQQQEMYNQYGGSYSGPDRRPIQGQYPYPYSRERMQGPGQIQTHGIPPQMMGGPLQSSSSEGPQQNMWAARNDMPYPYQNRQGPGGPTQAPPYPGMNRTDDMMVPDQRINHESQWPSHVSQRQPYMSSSASMQPITRPPQPSYQTPPSLPNHISRAPSPASFQRSLENRMSPSKSPFLPSMKMQKVMPTVPTSQVTGPPPQPPPIRREITFPPGSVEASQPVLKQRRKITSKDIVTPEAWRVMMSLKSGLLAESTWALDTINILLYDDSTVATFNLSQLSGFLELLVEYFRKCLIDIFGILMEYEVGDPSQKALDHNAARKDDSQSLADDSGKEEEDAECIDDDEEDEEDEEEDSEKTESDEKSSIALTAPDAAADPKEKPKQASKFDKLPIKIVKKNNLFVVDRSDKLGRVQEFNSGLLHWQLGGGDTTEHIQTHFESKMEIPPRRRPPPPLSSAGRKKEQEGKGDSEEQQEKSIIATIDDVLSARPGALPEDANPGPQTESSKFPFGIQQAKSHRNIKLLEDEPRSRDETPLCTIAHWQDSLAKRCICVSNIVRSLSFVPGNDAEMSKHPGLVLILGKLILLHHEHPERKRAPQTYEKEEDEDKGVACSKDEWWWDCLEVLRDNTLVTLANISGQLDLSAYTESICLPILDGLLHWMVCPSAEAQDPFPTVGPNSVLSPQRLVLETLCKLSIQDNNVDLILATPPFSRQEKFYATLVRYVGDRKNPVCREMSMALLSNLAQGDALAARAIAVQKGSIGNLISFLEDGVTMAQYQQSQHNLMHMQPPPLEPPSVDMMCRAAKALLAMARVDENRSEFLLHEGRLLDISISAVLNSLVASVICDVLFQIGQL

SEQ ID NO: 205421 - DNA, 8126 bp, Artificial Sequence
  derived and/or modified sequence
cggccgccgccggcacccacagcgccaagagcggcggctccgaggcggctctcaaggagggtggaagcgccgccgcgctgtcctcctcctcctcctcctccgcggcggcagcggcggcatcctcttcctcctcgtcgggcccgggctcggccatggagacggggctgctccccaaccacaaactgaaaaccgttggcgaagcccccgccgcgccgccccaccagcagcaccaccaccaccaccatgcccaccaccaccaccaccatgcccaccacctccaccaccaccacgcactacagcagcagctaaaccagttccagcagcagcagcagcagcagcaacagcagcagcagcagcagcagcaacagcaacatcccatttccaacaacaacagcttgggcggcgcgggcggcggcgcgcctcagcccggccccgacatggagcagccgcaacatggaggcgccaaggacagtgctgcgggcggccaggccgaccccccgggcccgccgctgctgagcaagccgggcgacgaggacgacgcgccgcccaagatgggggagccggcgggcggccgctacgagcacccgggcttgggcgccctgggcacgcagcagccgccggtcgccgtgcccgggggcggcggcggcccggcggccgtcccggagtttaataattactatggcagcgctgcccctgcgagcggcggccccggcggccgcgctgggccttgctttgatcaacatggcggacaacaaagccccgggatggggatgatgcactccgcctccgccgccgccgccggggcccccggcagcatggaccccctgcagaactcccacgaagggtaccccaacagccagtgcaaccattatccgggctacagccggcccggcgcgggcggcggcggcggcggcggcggcggaggaggaggaggcagcggaggaggaggaggaggaggaggagcaggagcaggaggagcaggagcgggagctgtggcggcggcggccgcggcggcggcggcagcagcaggaggcggcggcggcggcggctatgggggctcgtccgcggggtacggggtgctgagctccccccggcagcagggcggcggcatgatgatgggccccgggggcggcggggccgcgagcctcagcaaggcggccgccggctcggcggcggggggcttccagcgcttcgccggccagaaccagcacccgtcgggggccaccccgaccctcaatcagctgctcacctcgcccagccccatgatgcggagctacggcggcagctaccccgagtacagcagccccagcgcgccgccgccgccgccgtcgcagccccagtcccaggcggcggcggcgggggcggcggcgggcggccagcaggcggccgcgggcatgggcttgggcaaggacatgggcgcccagtacgccgctgccagcccggcctgggcggccgcgcaacaaaggagtcacccggcgatgagccccggcacccccggaccgaccatgggcagatcccagggcagcccaatggatccaatggtgatgaagagacctcagttgtatggcatgggcagtaaccctcattctcagcctcagcagagcagtccgtacccaggaggttcctatggccctccaggcccacagcggtatccaattggcatccagggtcggactcccggggccatggccggaatgcagtaccctcagcagcaggactctggagatgccacatggaaagaaacattctggttgatgccacctcagtatggacagcaaggtgtgagtggttactgccagcagggccaacagccatattacagccagcagccgcagcccccgcacctcccaccccaggcgcagtatctgccgtcccagtcccagcagaggtaccagccgcagcaggacatgtctcaggaaggctatggaactagatctcaacctcctctggcccccggaaaacctaaccatgaagacttgaacttaatacagcaagaaagaccatcaagtttaccagatctgtctggctccattgatgacctccccacgggaacggaagcaactttgagctcagcagtcagtgcatccgggtccacgagcagccaaggggatcagagcaacccggcgcagtcgcctttctccccacatgcgtcccctcatctctccagcatcccggggggcccatctccctctcctgttggctctcctgtaggaagcaaccagtctcgatctggcccaatctctcctgcaagtatcccaggtagtcagatgcctccgcagccacccgggagccagtcagaatccagttcccatcccgccttgagccagtcaccaatgccacaggaaagaggttttatggcaggcacacaaagaaaccctcagatggctcagtatggacctcaacagacaggaccatccatgtcgcctcatccttctcctgggggccagatgcatgctggaatcagtagctttcagcagagtaactcaagtgggacttacggtccacagatgagccagtatggaccacaaggtaactactccagacccccagcgtatagtggggtgcccagtgcaagctacagcggcccagggcccggtatgggtatcagtgccaacaaccagatgcatggacaagggccaagccagccatgtggtgctgtgcccctgggacgaatgccatcagctgggatgcagaacagaccatttcctggaaatatgagcagcatgacccccagttctcctggcatgtctcagcagggagggccaggaatggggccgccaatgccaactgtgaaccgtaaggcacaggaggcagccgcagcagtgatgcaggctgctgcgaactcagcacaaagcaggcaaggcagtttccccggcatgaaccagagtggacttatggcttccagctctccctacagccagcccatgaacaacagctctagcctgatgaacacgcaggcgccgccctacagcatggcgcccgccatggtgaacagctcggcagcatctgtgggtcttgcagatatgatgtctcctggtgaatccaaactgcccctgcctctcaaagcagacggcaaagaagaaggcactccacagcccgagagcaagtcaaagaagtccagctcctccaccactactggggagaagatcacgaaggtgtacgagctggggaatgagccagagagaaagctctgggtcgaccgatacctcaccttcatggaagagagaggctctcctgtctcaagtctgcctgccgtgggcaagaagcccctggacctgttccgactctacgtctgcgtcaaagagatcgggggtttggcccaggttaataaaaacaagaagtggcgtgagctggcaaccaacctaaacgttggcacctcaagcagtgcagcgagctccctgaaaaagcagtatattcagtacctgtttgcctttgagtgcaagatcgaacgtggggaggagcccccgccggaagtcttcagcaccggggacaccaaaaagcagcccaagctccagccgccatctcctgctaactcgggatccttgcaaggcccacagaccccccagtcaactggcagcaattccatggcagaggttccaggtgacctgaagccacctaccccagcctccacccctcacggccagatgactccaatgcaaggtggaagaagcagtacaatcagtgtgcacgacccattctcagatgtgagtgattcatccttcccgaaacggaactccatgactccaaacgccccctaccagcagggcatgagcatgcccgatgtgatgggcaggatgccctatgagcccaacaaggacccctttgggggaatgagaaaagtgcctggaagcagcgagccctttatgacgcaaggacagatgcccaacagcagcatgcaggacatgtacaaccaaagtccctccggagcaatgtctaacctgggcatggggcagcgccagcagtttccctatggagccagttacgaccgaaggcatgaaccttatgggcagcagtatccaggccaaggccctccctcgggacagccgccgtatggagggcaccagcccggcctgtacccacagcagccgaattacaaacgccatatggacggcatgtacgggcccccagccaagcgccacgagggcgacatgtacaacatgcagtacagcagccagcagcaggagatgtacaaccagtatggaggctcctactcgggcccggaccgcaggcccatccagggccagtacccgtatccctacagcagggagaggatgcagggcccggggcagatccagacacacggaatcccgcctcagatgatgggcggcccgctgcagtcgtcctccagtgaggggcctcagcagaatatgtgggcagcacgcaatgatatgccttatccctaccagaacaggcagggccctggcggccctacacaggcgcccccttacccaggcatgaaccgcacagacgatatgatggtacccgatcagaggataaatcatgagagccagtggccttctcacgtcagccagcgtcagccttatatgtcgtcctcagcctccatgcagcccatcacacgcccaccacagccgtcctaccagacgccaccgtcactgccaaatcacatctccagggcgcccagcccagcgtccttccagcgctccctggagaaccgcatgtctccaagcaagtctccttttctgccgtctatgaagatgcagaaggtcatgcccacggtccccacatcccaggtcaccgggccaccaccccaaccacccccaatcagaagggagatcacctttcctcctggctcagtagaagcatcacaaccagtcttgaaacaaaggcgaaagattacctccaaagatatcgttactcctgaggcgtggcgtgtgatgatgtcccttaaatcaggtcttttggctgagagtacgtgggctttggacactattaatattcttctgtatgatgacagcactgttgctactttcaatctctcccagttgtctggatttctcgaacttttagtcgagtactttagaaaatgcctgattgacatttttggaattcttatggaatatgaagtgggagaccccagccaaaaagcacttgatcacaacgcagcaaggaaggatgacagccagtccttggcagacgattctgggaaagaggaggaagatgctgaatgtattgatgacgacgaggaagacgaggaggatgaggaggaagacagcgagaagacagaaagcgatgaaaagagcagcatcgctctgactgccccggacgccgctgcagacccaaaggagaagcccaagcaagccagtaagttcgacaagctgccaataaagatagtcaaaaagaacaacctgtttgttgttgaccgatctgacaagttggggcgtgtgcaggagttcaatagtggccttctgcactggcagctcggcgggggtgacaccaccgagcacattcagactcactttgagagcaagatggaaattcctcctcgcaggcgcccacctccccccttaagctccgcaggtagaaagaaagagcaagaaggcaaaggcgactctgaagagcagcaagagaaaagcatcatagcaaccatcgatgacgtcctctctgctcggccaggggcattgcctgaagacgcaaaccctgggccccagaccgaaagcagtaagtttccctttggtatccagcaagccaaaagtcaccggaacatcaagctgctggaggacgagcccaggagccgagacgagactcctctgtgtaccatcgcgcactggcaggactcgctggctaagcgatgcatctgtgtgtccaatattgtccgtagcttgtcattcgtgcctggcaatgatgccgaaatgtccaaacatccaggcctggtgctgatcctggggaagctgattcttcttcaccacgagcatccagagagaaagcgagcaccgcagacctatgagaaagaggaggatgaggacaagggggtggcctgcagcaaagatgagtggtggtgggactgcctcgaggtcttgagggataacacgttggtcacgttggccaacatttccgggcagctagacttgtctgcttacacggaaagcatctgcttgccaattttggatggcttgctgcactggatggtgtgcccgtctgcagaggcacaagatccctttccaactgtgggacccaactcggtcctgtcgcctcagagacttgtgctggagaccctctgtaaactcagtatccaggacaataatgtggacctgatcttggccactcctccatttagtcgtcaggagaaattctatgctacattagttaggtacgttggggatcgcaaaaacccagtctgtcgagaaatgtccatggcgcttttatcgaaccttgcccaaggggacgcactagcagcaagggccatagctgtgcagaaaggaagcattggaaacttgataagcttcctagaggatggggtcacgatggcccagtaccagcagagccagcacaacctcatgcacatgcagcccccgcccctggaaccacctagcgtagacatgatgtgcagggcggccaaggctttgctagccatggccagagtggacgaaaaccgctcggaattccttttgcacgagggccggttgctggatatctcgatatcagctgtcctgaactctctggttgcatctgtcatctgtgatgtactgtttcagattgggcagttatgacataagtgagaaggcaagcatgtgtgagtgaagattagagggtcacatataactggctgttttctgttcttgtttatccagcgtaggaagaaggaaaagaaaatctttgctcctctgccccattcactatttaccaattgggaattaaagaaataattaatttgaacagttatgaaattaatatttgctgtctgtgtgtataagtacatcctttggggttttttttttctcttttttttaaccaaagttgctgtctagtgcattcaaaggtcactttttgttcttcacagatctttttaatgttctttcccatgttgtattgcatttttgggggaagcaaattgactttaaagaaaaaagttgtggcaaaagatgctaagatgcgaaaatttcaccacactgagtcaaaaaggtgaaaaattatccatttcctatgcgttttactcctcagagaatgaaaaaaactgcatcccatcacccaaagttctgtgcaatagaaatttctacagatacaggtataggggctcaaggaggtatgtcggtcagtagtcaaaactatgaaatgatactggtttctccacaggaatatggttccattaggctgggagcaaaaacaatgttttttaagattgagaatacatacctgacaacgatccggaaactgctcctcaccactcccgtcatgcctgctgtcggcgtttgaccttccacgtgacagttcttcacaattcctttcatcattttttaaatattttttttactgcctatgggctgtgatgtatatagaagttgtacattaaacataccctcatttttttcttttcttttttttttttttttttagtacaaagttttagtttctttttcatgatgtggtaactacgaagtgatggtagatttaaataattttttatttttattttatatattttttcattagggccatatctccaaaaaaagaaagaaaaaatacaaaaaacaaaaacaaaaaaaaaagagggtaatgtacaagtttctgtatgtataaagtcatgctcgatttcaggagagcagctgatcacaatttgcttcatgaatcaaggtgtggaaatggttatatatggattgatttagaaaatggttaccagtacagtcaaaaaagagaaaatgaaaaaaatacaactaaaaggaagaaacacaacttcaaagatttttcagtgatgagaatccacatttgtatttcaagataatgtagtttaaaaaaaaaaaaaagaaaaaaacttgatgtaaattcctccttttcctctggcttaatgaatatcatttattcagtataaaatctttatatgttccacatgttaagaataaatgtacattaaatcttgttaagcactgtgaaaaaaaaaaaaaaaaaaaaaa

SEQ ID NO: 205422 - DNA, 6750 bp, Artificial Sequence
  derived and/or modified sequence
atggcccacaatgctggggcagccgccgctgccggtacccactctgcgaagtcgggagggtctgaagctgccctgaaagaaggcggcagcgccgctgccctgagttcatccagctcgagttccgctgccgccgctgccgcttcaagctcctccagttcaggtccagggtcagccatggaaacgggacttctcccgaatcacaagctcaagacagtgggggaagcaccggctgctccaccccaccaacagcaccatcaccatcaccatgctcaccaccatcaccaccatgcgcaccatctgcatcaccaccacgcgttgcagcagcagcttaaccagtttcagcagcagcagcaacagcagcaacagcaacagcaacagcagcagcagcagcagcatcccatctcaaataacaacagtctgggcggagctggcggcggggcaccccagcctggtcctgacatggagcagcctcagcatggcggggcgaaagacagcgcagctggcggacaggcagatccacccggtccaccactgttgagcaagcctggcgatgaagacgacgcccctcccaaaatgggggagcccgcaggcggtcgctacgaacaccccgggttgggggcactgggtacccaacagcctccagtcgccgtgccaggaggcggaggaggacccgccgctgttcccgaatttaataattactacgggagcgccgcccccgctagtggcggccccggtggacgtgcggggccttgctttgatcagcatggggggcagcagtctcccggaatgggtatgatgcacagcgcctctgctgctgccgctggcgccccaggatcgatggaccccctgcagaatagccatgaaggctatcctaattctcaatgtaatcattatccagggtactctaggcctggagcgggaggaggcggaggggggggcggtggcggagggggcggctcagggggaggaggcggagggggaggcgctggggctgggggtgcaggagccggcgctgtggcagccgcagctgccgccgcagcagctgccgcgggtggaggaggcggtggaggatacgggggttcctccgcaggctacggcgtactgtcctctcccagacagcagggcggcgggatgatgatgggcccgggagggggcggggctgcatccctctctaaagccgccgcaggctccgccgctggcggttttcaaaggttcgccggacagaatcagcatccatcaggagctacgccaacgctcaatcagctgctcacttccccctcaccaatgatgcggtcttacggtggatcctatcccgagtattcctcaccaagtgctcccccacctcccccttcccagccacagtcacaggccgccgccgcaggggcggctgcaggagggcagcaggccgccgccggaatgggtcttggcaaggatatgggcgcacagtacgcagccgcctcccctgcgtgggctgccgcacagcagcgaagccaccctgcgatgtctccaggaacccccggccccacaatgggaagatctcagggaagtccaatggatccaatggtgatgaagcggccgcagctgtacggaatggggtctaacccgcacagccagcctcagcagagttccccgtaccctggtggttcctatggcccgcctggtcctcagcgctacccgataggcatacaaggacgcacacccggggctatggctggcatgcagtatccgcagcagcaggactccggcgatgccacgtggaaagagactttctggttgatgccccctcagtatggtcagcagggagtcagcggatactgccaacagggccagcaaccgtactactcgcagcaaccacagcccccgcacctccctccccaggctcagtacctcccctcacagagtcagcagaggtatcagccccagcaggatatgagtcaggagggatacggcacacgatctcagcccccactcgcccccggcaagcctaatcacgaggacctcaatcttatccaacaagaacgcccatcctccctgcctgatctctccgggagcatcgatgatttacctacaggtaccgaggctaccctgagcagcgcagtgtctgctagcgggtccacctcttcacagggtgaccagagcaacccagcacagtcaccattcagcccccacgccagcccccacctctcctcaatccccggcggacccagtccttccccagtgggctcacctgtcggatccaatcagtctcgcagcggcccaattagcccagcctctatccccgggtcccagatgccccctcagccacctggaagccagtcagagagctccagccaccctgctctgtcccagtcgcctatgccccaggagagaggatttatggcgggtacacaacggaacccacagatggcacagtatggaccccaacagacaggacctagtatgagcccgcaccctagccccggcggccaaatgcacgcaggcatctcttccttccagcaatctaactccagcggcacatacggaccacagatgagccagtacggcccacaggggaattattcacgccctcctgcctactccggagtgcctagcgcaagctactctggacccgggccaggcatgggcatatctgcaaataaccagatgcatggccaaggcccttcccaaccctgcggtgccgtgcccctgggcaggatgccgtcagccggcatgcagaacaggccgtttcctggcaatatgtcctcaatgacgccatcatctcccggtatgtcccagcaggggggcccgggcatgggacccccaatgcccaccgttaaccggaaggcccaagaggcagcggcagcagtcatgcaagccgcagccaatagcgcacaatcccgccaggggtcctttccaggaatgaatcagagcggccttatggcttctagttcgccctactcacagcctatgaataatagttcctcactcatgaatactcaggcacctccttattcaatggctccagccatggtcaacagcagcgccgcttctgtggggctggcagacatgatgtcccctggggaatccaagctaccattgcccctcaaggctgatgggaaggaagaaggcacaccgcaacccgaatcaaagtctaaaaaatcctccagctctacaacaaccggggaaaaaattactaaagtgtacgaactcggcaacgagcccgagagaaagctttgggttgaccggtatctcacttttatggaggaacgggggtcgccagtctcttccctcccagccgtcggaaaaaaacctttggacctcttcaggttgtatgtatgcgtcaaagaaatcggcggcctcgctcaggtcaataagaataaaaagtggcgcgagcttgccacaaatctgaacgtaggaaccagtagttcggctgccagctcgctgaaaaagcaatacatccagtacttatttgcatttgagtgtaagatcgagagaggcgaggaacccccccctgaggttttcagtaccggcgacactaagaagcagccgaagctgcaaccaccaagtcccgcaaactctggcagcttgcagggaccccaaacgcctcagtcgaccggctcgaatagtatggcggaagtgccaggcgacctcaagccacccacgcccgcatcaacacctcacggacagatgaccccaatgcagggaggcagaagctctaccatcagcgtgcacgatcctttcagcgatgtttcagactccagttttcccaagagaaatagtatgacaccaaacgcaccctaccagcagggaatgagtatgcccgatgtgatgggccggatgccctacgagcctaataaggaccctttcggcggtatgagaaaagtgccgggatcaagcgaacccttcatgacacaaggtcagatgcctaacagcagtatgcaggatatgtacaatcagagcccaagtggagccatgagtaatctaggcatggggcagagacagcagttcccctacggcgcttcctacgacagacgccatgagccatatgggcagcagtaccccgggcagggtccacccagcggacaacctccctacggaggccaccaacccggcctttaccctcagcagcccaattataaacgccacatggatggaatgtacggtccacccgccaagcgccacgaaggagatatgtataacatgcagtattccagccagcaacaagaaatgtataaccaatatggagggagttattctggcccagatcggcgcccgattcaaggtcagtacccctacccatattcccgggagcggatgcaaggacctgggcaaatacagactcatggaatcccacctcagatgatggggggccctcttcagagcagttctagcgaaggacctcagcagaacatgtgggcagcacggaatgatatgccttatccataccagaaccgccagggccccgggggtcccacccaggcccccccctatccaggtatgaataggaccgatgacatgatggtccccgaccagcggattaaccatgagagccagtggccatctcacgtatctcagagacagccttacatgtcttccagcgcctcaatgcaacctattacccgccctccccagccctcctaccagacacccccaagtctccccaatcacatttccagggcaccaagccctgcctcgttccagcgttctctggaaaatcgtatgtctccgagtaagtctccatttctgcctagcatgaaaatgcaaaaggtgatgccaaccgtccccacctcacaagttaccggccccccccctcagccccctccaatcaggagggaaattacgtttcccccaggctccgtagaggcctcccagccagtgctgaagcagcggcggaagataacgagtaaggacatcgtcacacccgaggcttggagagtgatgatgagtctgaaatcgggactgcttgcggagtctacttgggcactagacacaattaacatcctgctttatgacgatagtaccgtggcaacctttaacctgagccagctcagtggcttcctggaactgctggtggagtatttccggaaatgtttgattgacatatttgggatactgatggagtacgaggttggcgatccgagtcagaaagcccttgaccacaatgctgctcgcaaggatgactcgcaatcattagctgacgacagtgggaaagaggaggaagacgccgagtgtatcgatgatgacgaggaggatgaggaggatgaggaagaagatagtgaaaagactgagtccgatgagaaaagtagcatcgcactcaccgcacctgatgcagccgccgacccaaaggaaaagccaaagcaagcgtcaaagtttgacaaactgccaatcaaaatcgtgaaaaaaaataatctgtttgtggtggataggtcagacaaactcggcagggtccaagagtttaattccgggctactgcattggcaactaggggggggtgacaccactgaacacattcagacccactttgagagtaagatggagatccccccccggcggcgaccaccaccacccctgtcatccgccggaaggaagaaagaacaggagggtaagggggactcggaagagcagcaggagaagtccattattgccaccattgatgatgtgctgagcgctcggccgggcgcgttacctgaagacgcaaaccccggcccccagaccgaatctagcaagttccccttcggaatccagcaggctaagagtcatagaaacattaagctgctggaagacgaaccccgttcacgggatgagactccattgtgcactatcgcccactggcaggatagcttggctaagagatgtatatgcgtctctaatattgttaggagcttgtcatttgttcctggtaacgatgctgagatgtccaaacatcccggtcttgttctgattctgggtaagttaatcctccttcatcacgaacacccagagaggaaacgcgcgcctcagacttacgaaaaggaggaggacgaagataaaggtgtcgcatgtagcaaggatgagtggtggtgggactgcctggaggttctacgagacaataccttagtgaccttggctaacattagtggtcagctggacctgagcgcctatactgagagcatctgcctcccgatcctggacggtctgctacactggatggtgtgcccatccgccgaagctcaggacccattccccaccgtggggcccaattctgttctgtcccctcagagactcgtgcttgagactttgtgtaaactgtcaatccaggataataatgtcgacctcattttggcgacccccccattcagccgccaggagaagttctacgcaacattggtgaggtacgtcggtgacaggaagaatcccgtttgcagggagatgagtatggccctgctgtctaatctggcgcagggtgatgccctggctgctagggccatcgccgtgcagaaagggtctataggaaacttgatcagttttttagaggatggtgtcacaatggcgcagtatcaacaatctcagcacaaccttatgcacatgcagcctcccccactggagccaccctcggtggatatgatgtgtcgcgcggccaaagctttgttggcaatggcacgagtagacgagaataggagcgaatttctcttgcacgaaggacgcctgcttgatatttctatcagcgctgttctgaatagtctcgtcgcctctgtaatatgcgatgtcctctttcagatcggccagctgtag

SEQ ID NO: 205423 - DNA, 6750 bp, Artificial Sequence
  derived and/or modified sequence
atggcccacaatgctggagctgctgctgctgctggcacccacagcgccaagagcggcggcagcgaggccgccctgaaggagggcggcagcgctgctgccctgagcagcagcagcagcagcagcgctgctgctgctgctgccagcagcagcagcagcagcggccctggcagcgccatggagaccggcctgctgcccaaccacaagctgaagacagtgggggaggccccagctgccccaccccaccagcagcaccaccaccaccaccacgcccaccaccaccaccaccacgcccaccacctgcaccaccaccacgccctgcagcagcagctgaaccagttccagcagcagcagcagcagcagcagcagcagcagcagcagcagcagcagcagcagcaccccatcagcaacaacaacagcctgggcggggccggcggcggggccccccagcccggccctgacatggagcagccccagcacggcggggccaaggacagcgctgctgggggccaggccgaccccccaggcccccccctgctgagcaagccaggagatgaagatgatgccccacccaagatgggagagcctgctgggggccgctatgagcaccctggcctgggcgccctgggcacccagcagccccctgtggccgtgcctgggggcggcggcggccctgctgctgtgcctgagttcaacaactactacggcagcgctgccccagccagcggcggccctgggggccgggccggcccctgctttgaccagcacggcggccagcagagccctggcatgggcatgatgcacagcgccagcgctgctgctgctggggcccctggctccatggaccccctgcagaacagccatgagggctaccccaacagccagtgcaaccactacccaggctacagcaggcctggggccggcggcggcggcggcggcggcggcggcggcggcggcggcagcggcggcggcggcggcggcggcggggccggggccggcggggccggggccggggctgtggccgctgctgctgctgctgctgctgctgctgctgggggcggcggcggcggcggctacggcggcagcagcgctggctatggagtgctgagcagcccccggcagcagggcggcggcatgatgatgggccctgggggcggcggggccgccagcctgagcaaggctgctgctggcagcgctgctgggggcttccagagatttgctggccagaaccagcaccccagcggggccacccccaccctgaaccagctgctgaccagccccagccccatgatgaggagctatggaggcagctacccagagtacagcagccccagcgcccctcctcctccacccagccagccccagagccaggccgctgctgctggagctgctgctgggggccagcaggccgctgctggcatgggcctgggcaaggacatgggcgcccagtatgctgctgccagccctgcctgggccgccgcccagcagaggagccacccagccatgagccctggcaccccaggccccaccatgggccgcagccagggcagccccatggaccccatggtgatgaagaggccccagctgtatggcatgggcagcaacccccacagccagccccagcagagcagcccctacccaggcggcagctatggccccccaggcccccagcgctaccccatcggcatccagggccgcacccctggggccatggccggcatgcagtacccccagcagcaggacagcggagatgccacctggaaggagaccttctggctgatgccaccccagtatggccagcagggcgtgtctggctactgccagcagggccagcagccctactacagccagcagccccagcccccccacctgcccccccaggcccagtacctgcccagccagagccagcagcgctaccagccccagcaggacatgagccaggagggctacggcaccaggagccagccccccctggcccctgggaagcccaaccacgaggacctgaacctgatccagcaggagcggcccagcagcctgcctgacctgagcggcagcattgatgacctgcccaccggcacagaggccaccctgagcagcgctgtgtctgccagcggcagcaccagcagccagggcgaccagagcaacccagcccagagccccttcagcccccacgccagcccccacctgagcagcatccctgggggccccagccccagccctgtgggcagccctgtgggcagcaaccagagccgcagcggccccatcagccctgccagcatccctggcagccagatgccaccccagcccccaggcagccagagcgagagcagcagccacccagccctgagccagagccccatgccccaggagcggggcttcatggccggcacccagaggaacccccagatggcccagtatggcccccagcagacaggccccagcatgagcccccaccccagccctgggggccagatgcacgccggcatcagcagcttccagcagagcaacagcagcggcacctacggcccccagatgagccagtatggcccccagggcaactacagccggcccccagcctacagcggcgtgcccagcgccagctacagcggccctggccctggcatgggcatcagcgccaacaaccagatgcacggccagggccccagccagccctgtggggctgtgcccctgggccgcatgcccagcgctggcatgcagaaccggcccttccctggcaacatgagctccatgacccccagcagccctggcatgagccagcagggcggccctggcatgggcccccccatgcccaccgtgaacaggaaggcccaggaggccgctgctgctgtgatgcaggccgccgccaacagcgcccagagccggcagggcagcttccctggcatgaaccagagcggcctgatggccagcagcagcccctacagccagcccatgaacaacagcagcagcctgatgaacacccaggccccaccctacagcatggccccagccatggtgaacagcagcgctgcctctgtgggcctggccgacatgatgagccctggagagagcaagctgcccctgcccctgaaggcagatggcaaggaggagggcaccccccagcctgagagcaagagcaagaagagcagcagcagcaccaccactggagagaagatcaccaaggtgtatgagctgggcaatgaacctgagaggaagctgtgggtggaccgctacctgaccttcatggaggagcggggcagccctgtgagcagcctgcctgctgtgggcaagaagcccctggacctcttccggctgtatgtgtgtgtgaaggagatcggcggcctggcccaggtgaacaagaacaagaagtggagggagctggccaccaacctgaatgtgggcaccagcagcagcgctgccagcagcctgaagaagcagtacatccagtacctgtttgcctttgagtgcaagattgaaagaggagaggagcccccacctgaggtgttcagcactggagacaccaagaagcagcccaagctgcagccccccagccctgccaacagcggcagcctgcagggcccccagaccccccagagcacaggcagcaacagcatggccgaggtgcctggggacctgaagccacccaccccagccagcaccccccacggccagatgacccccatgcagggcggccgcagcagcaccatctctgtgcatgaccccttcagtgatgtgtctgacagcagcttccccaagagaaattccatgaccccaaatgccccctaccagcagggcatgtccatgccagatgtgatgggccgcatgccctatgagcccaacaaggacccctttggaggcatgaggaaggtgcccggcagcagcgagcccttcatgacccagggccagatgcccaacagctccatgcaggacatgtacaaccagagccccagcggggccatgagcaacctgggcatgggccagaggcagcagttcccctatggagccagctatgacagaagacatgagccctacggccagcagtacccaggccagggccccccatctggccagcccccctacggcggccaccagcccggcctgtacccccagcagcccaactacaagaggcacatggatggcatgtatggccccccagccaagagacatgaaggagacatgtacaacatgcagtacagcagccagcagcaggagatgtacaaccagtatggaggcagctacagcggccctgaccggcggcccatccagggccagtacccctacccctacagccgggagaggatgcagggccctggccagatccagacccacggcatccccccccagatgatgggcggccccctgcagagcagcagcagcgagggcccccagcagaacatgtgggccgccagaaatgacatgccctacccctaccagaaccggcagggccctgggggccccacccaggccccaccctacccaggcatgaacagaacagatgacatgatggtgcctgaccagaggatcaaccacgagagccagtggcccagccacgtgtcccagaggcagccctacatgagcagcagcgcctccatgcagcccatcaccaggcctccccagcccagctaccagaccccacccagcctgcccaaccacatcagccgggcccccagccctgccagcttccagaggagcctggagaacaggatgagccccagcaagagccccttcctgcccagcatgaagatgcagaaggtgatgcccaccgtgcccaccagccaggtgactggacctccaccccagcccccacccatcagaagagagatcaccttccccccaggctctgtggaggccagccagcctgtgctgaagcagaggaggaagatcaccagcaaggacatcgtgaccccagaggcctggagggtgatgatgagcctgaagagcggcctgctggccgagagcacctgggccctggacaccatcaacatcctgctgtatgatgacagcacagtggccaccttcaacctgagccagctgagcggcttcctggagctgctggtggagtacttcaggaagtgcctgattgacatcttcggcatcctgatggagtatgaggtgggggaccccagccagaaggccctggaccacaatgctgccaggaaggatgacagccagagcctggctgatgacagcggcaaggaggaggaggatgctgagtgcattgatgatgatgaagaagatgaggaggatgaggaggaggacagcgagaagacagaaagtgatgagaagagcagcatcgccctgacagccccagatgctgctgctgaccccaaggagaagcccaagcaggccagcaagtttgacaagctgcccatcaagatcgtgaagaagaacaacctgtttgtggtggacagaagtgacaagctgggccgggtgcaggagttcaacagcggcctgctgcactggcagctgggcggcggggacaccacagagcacatccagacccactttgagagcaagatggagatccccccaagaagaagacctcctccacccctgagcagcgctggcaggaagaaggagcaggagggcaagggggacagcgaggagcagcaggagaagagcatcatcgccaccattgatgatgtgctgagcgcccggcctggggccctgcctgaagatgccaaccctggcccccagacagagagcagcaagttccccttcggcatccagcaggccaagagccacaggaacatcaagctgctggaggatgagcccaggagcagagatgagacccccctgtgcaccatcgcccactggcaggacagcctggccaagcgctgcatctgtgtgagcaacatcgtgcgcagcctgagctttgtgcctggaaatgatgctgagatgagcaagcaccctggcctggtgctgatcctgggcaagctgatcctgctgcaccacgagcaccctgagaggaagagggccccccagacctatgagaaggaggaggatgaagataaaggagtggcctgcagcaaggatgagtggtggtgggactgcctggaggtgctgcgggacaacaccctggtgaccctggccaacatcagcggccagctggacctgagcgcctacacagagagcatctgcctgcccatcctggatggcctgctgcactggatggtgtgccccagcgctgaggcccaggaccccttccccaccgtgggccccaacagcgtgctgagcccccagaggctggtgctggagaccctgtgcaagctgagcatccaggacaacaacgtggacctgatcctggccaccccacccttcagccggcaggagaagttctacgccaccctggtgcgctacgtgggggacaggaagaaccctgtgtgccgggagatgtccatggccctgctgagcaacctggcccagggagatgccctggccgcccgggccatcgctgtgcagaagggcagcatcggcaacctgatctccttcctggaggatggagtgaccatggcccagtaccagcagagccagcacaacctgatgcacatgcagcccccacccctggagcccccatctgtggacatgatgtgccgggccgccaaggccctgctggccatggcccgggtggatgagaacagaagtgagttcctgctgcacgagggccgcctgctggacatcagcatctctgctgtgctgaacagcctggtggccagcgtcatctgtgatgtgctcttccagatcggccagctgtag

SEQ ID NO: 205424 - DNA, 6750 bp, Artificial Sequence
  derived and/or modified sequence
atggcccacaacgccggcgccgccgccgccgccggcacccacagcgccaaatccgggggttctgaggccgcactgaaagagggcgggtctgcagcggccctgtctagcagctcatcatctagtgcagctgcagcagctgccagctcctcaagttcatctggaccgggatccgctatggagacaggccttctcccaaaccacaaattgaagaccgtcggagaagctcctgctgctcctccacaccagcagcaccatcaccatcaccatgcccaccaccatcaccatcacgcccaccatcttcatcatcatcatgccctgcagcaacagctgaaccagttccagcagcagcagcagcagcagcaacaacaacaacagcagcagcagcagcagcagcaccccatctcaaacaataacagcctcggcggggcaggaggaggcgctccccaacctggacccgatatggagcagccacagcacggaggtgccaaagattccgcagccggtggacaggcggacccccccggtccgcccctgttgagcaagccaggtgacgaagatgatgccccacccaaaatgggtgagccagccgggggcagatacgagcacccaggtctcggagcactggggactcagcagccacccgttgccgtgccaggcggaggtggtgggcctgctgcagtgcccgaattcaataattactatggctccgctgcaccagcttctggaggtcctggcggcagagcaggaccctgctttgatcaacatggcggacagcagtcccccgggatgggtatgatgcactccgcctcggccgcagcagccggggcaccaggctcaatggaccctttacagaattcccatgaaggctacccaaactcccaatgcaatcactacccagggtactcccggccaggggcagggggaggggggggtggggggggtggcggaggcggtggcagtggtggtggaggcggcggcggcggtgccggcgctggcggcgcaggtgcgggcgccgtggccgcggctgccgccgccgctgcggccgctgcaggggggggcggtggaggtggctacggtggaagctccgccggctacggagtgctgagctcgccacggcagcagggggggggaatgatgatggggccagggggcggcggagccgcatcactctcaaaggccgccgccggatccgcagctggggggttccagcggtttgccgggcaaaaccagcatccaagtggcgctacaccaactctgaatcagcttttgacaagtccttcccccatgatgcgcagttatggcggcagctatcctgagtatagcagtccaagcgctcccccgccccccccaagccagccccagtctcaggccgccgccgctggagctgcggccggcggtcagcaggcagccgctggaatggggctgggcaaggatatgggcgctcagtacgccgccgctagccctgcatgggccgcagctcagcaaaggagccatcccgcaatgagtcccggcacgcccggccccacaatgggccgatcacagggcagcccaatggaccctatggtaatgaagcgcccacagctctacggcatgggctcaaatccacactcacagccacaacagtcgtccccatatcctggtgggtcctatggcccccccggcccccaacgttatcccatcgggatacagggccggacacctggtgccatggccgggatgcagtatccccagcagcaggactccggagatgccacatggaaagaaacgttctggctcatgcctccacaatatgggcagcaaggcgtgtccggatactgccagcaggggcagcaaccttactattcacagcagccgcagcctcctcatctgcccccgcaggcccagtacttgccttcccagtctcagcagagatatcagcctcaacaagacatgagtcaggagggttacggaactagaagtcaacctccactggctcccgggaaacctaatcatgaggatttaaacctcattcagcaggaaaggccctcatccctaccagacctatccgggtccatcgacgatttgcctactggaacagaggctacactgtcaagtgctgtgtccgcttctggctctactagtagtcagggggatcagtctaatcccgcccagagtccctttagtccacacgcttcgcctcacttgtcctccatccctgggggacccagccccagtccggtgggcagcccagttgggagtaaccaatcccgctcaggccctatttcccctgcctctattcctggttcccagatgccaccgcagccgccgggctcccagtccgaatccagctcccatccggcgctttcccagtcacctatgcctcaagagaggggctttatggcaggtacccagcggaacccccagatggcccaatatggcccccaacagacgggcccctccatgagcccccacccctcccccgggggacagatgcatgccggcatcagctcctttcaacagtccaacagttccggcacatatggcccacaaatgagccagtacggtccccagggcaattattcgagaccccccgcctacagtggggttccgagcgcctcctattcaggacccggaccaggaatgggcatctctgcaaataatcagatgcatgggcagggaccctctcagccctgcggagccgtacctctggggcgcatgcctagtgcaggaatgcaaaaccgccccttccctggaaatatgtctagcatgaccccctctagtcccggtatgagccagcaggggggccccggcatggggccgcctatgccaacagttaacaggaaagcacaggaagccgcagccgctgtgatgcaggctgcagctaactccgcacagagccgtcagggatcgttcccgggcatgaatcagtccgggttgatggcctcatcttctccctatagccagcccatgaataactctagctccttaatgaatacacaggcaccaccctattccatggcccccgctatggtgaactcatcagccgcctccgtcggtctggccgacatgatgagcccgggagaatcgaagctgccactgcccctgaaggctgatggcaaagaagaaggtaccccccaaccagagtccaagagtaaaaagtccagcagtagcacaacaacgggggaaaagattaccaaggtgtatgaacttgggaatgaacccgagcggaaattatgggtcgatcggtatcttaccttcatggaagagaggggttcacccgtgagctctctccccgccgtgggaaagaagccactggatctctttaggctatacgtgtgcgtgaaggaaatcggtgggctggctcaagttaacaagaataaaaaatggcgcgaattggccacaaatctgaatgtcgggacatcttctagtgccgcttccagcctgaagaagcagtatattcagtacctgtttgcgttcgagtgtaaaattgagcggggagaggagccgccccccgaggtctttagcacaggagatacaaagaaacaaccaaagctacagccccctagcccagccaatagcgggagcctccagggaccgcagacgccgcagtctaccggttcaaactctatggcagaggtaccgggggacctgaagccccctacacctgccagcactccacacggccagatgactccgatgcagggagggcgttcctccacaatctctgttcatgaccccttctctgacgtgtctgactcatccttccccaagcggaacagtatgacacccaacgctccttaccagcagggaatgagtatgccagatgtgatgggtcgtatgccctatgaacctaacaaagatccctttggcgggatgcggaaagtgcccgggagcagtgaacctttcatgactcaaggacagatgcccaattcaagcatgcaggatatgtataaccagagcccgtcaggggccatgagcaacctgggcatgggccagagacagcaattcccgtatggggcctcctacgatagacggcacgagccttacgggcagcaatatccaggtcagggaccaccaagcgggcaacccccttatggaggtcatcagcctggactctaccctcaacagcctaattacaaaagacacatggatggcatgtacggtccaccagccaagagacatgaaggagatatgtacaacatgcagtacagcagccagcagcaggaaatgtacaaccagtacggtggtagttacagcggaccagatcgacggccaatccagggacaatatccatatccttactcaagagagcgaatgcaaggaccgggccagattcagactcatgggatcccaccacagatgatggggggccctctgcagagcagttctagtgaaggtccacagcagaatatgtgggcagcccggaacgacatgccttatccgtaccagaatcgccaggggcctggtggccccacccaggcacccccttacccaggcatgaacagaacggacgacatgatggtacccgaccagagaatcaatcacgaatcccagtggccctcacatgtgtcccagcggcagccttatatgtcttctagcgcctccatgcagcctataacaaggccaccccagcccagctaccagaccccccccagcctcccaaaccatatttcccgggctcccagtcccgcgtcattccaacggagtctagaaaaccggatgagccccagtaaaagtccgttcttgccttccatgaaaatgcagaaagtcatgccaactgtgcccacctcccaggtcaccggtcccccaccccagcctcctcccatcaggagagaaattacgtttccaccggggtcagtcgaggcctctcagcccgttctgaaacagaggcgcaagatcacatcaaaggatatcgtcacccctgaagcttggcgagtcatgatgagccttaaaagcggcctgctcgccgaatccacctgggccttggataccattaatatcctcctctacgatgactcaactgtggccacatttaatctctcacagctctccggctttctggaactgttggtcgaatatttccgtaaatgtctcatagatatctttggcatcctcatggaatacgaagtgggagatccaagtcagaaggccctcgaccacaatgccgcgcgcaaggatgacagccagtcacttgcagacgactcagggaaagaagaagaagacgcagagtgtatagacgacgatgaagaagacgaggaagacgaggaagaggactcagagaaaacagagtctgacgagaagagcagcattgctctcactgcacccgatgccgccgccgacccgaaggaaaagcctaaacaagcctctaagtttgacaaactccctataaagattgtgaagaagaataatttgtttgttgtagataggagtgataagctgggtagggtgcaggaatttaatagcgggctgctccattggcaactcggaggtggcgataccaccgagcatattcagactcactttgagtccaagatggaaatcccccccaggaggaggcctccaccgccactctccagtgctgggcgcaaaaaggaacaagagggaaaaggcgattctgaggaacagcaggagaagagcatcatagctactattgacgatgtcctgtcagctcggccaggggcccttcccgaggacgccaatcccggaccacaaacggaaagttctaagtttccatttggaatccagcaggcgaaatctcatagaaacataaaactcttggaagacgaaccccgttccagggatgagactcctctatgcacaatcgctcactggcaagacagcctcgccaaaaggtgcatttgtgtcagtaacatcgtccggtcattgtcgttcgttcccggaaatgatgcagagatgtccaagcaccccgggttggtgctaattctgggaaagctgattctcctacaccacgaacaccctgaacgcaaaagggccccacagacctatgaaaaagaggaagatgaggacaagggcgtagcttgctcaaaagacgagtggtggtgggattgcttagaagtgctcagggacaacacgctggtcacgttggcaaacatatctggacagctggatttgtccgcctacactgagagcatctgcctacctatcctggacggcctcttgcattggatggtgtgtccttccgcagaggctcaggacccattccccacagtcggccccaatagtgtgctgtcgcctcaacgccttgttctggagacattatgcaaactcagtattcaggataacaatgtggatctgatccttgcaactcccccgtttagccgacaagaaaagttctatgccaccctggtgcggtacgttggggaccggaagaatccagtgtgtcgggaaatgtccatggcactcctttccaacctggcacaaggggacgccctggcagcccgcgccattgccgttcagaaaggatccatcggtaacctcatctcgtttctggaggatggagttaccatggcgcagtatcagcaaagccagcataacctgatgcacatgcagccaccgccattggaaccaccctccgtggatatgatgtgtcgagccgcaaaagccctcctggcaatggcccgtgtggacgaaaaccgttctgagttcctgcttcacgagggaagacttctggatatcagtattagcgctgttctaaattccttagtggcttccgtcatttgcgacgtgttgttccaaatcggtcaactctag

SEQ ID NO: 205425 - DNA, 7221 bp, Artificial Sequence
  derived and/or modified sequence
catggcccataacgcgggcgccgcggccgccgccggcacccacagcgccaagagcggcggctccgaggcggctctcaaggagggtggaagcgccgccgcgctgtcctcctcctcctcctcctccgcggcggcagcggcggcatcctcttcctcctcgtcgggcccgggctcggccatggagacggggctgctccccaaccacaaactgaaaaccgttggcgaagcccccgccgcgccgccccaccagcagcaccaccaccaccaccatgcccaccaccaccaccaccatgcccaccacctccaccaccaccacgcactacagcagcagctaaaccagttccagcagcagcagcagcagcagcaacagcagcagcagcagcagcagcaacagcaacatcccatttccaacaacaacagcttgggcggcgcgggcggcggcgcgcctcagcccggccccgacatggagcagccgcaacatggaggcgccaaggacagtgctgcgggcggccaggccgaccccccgggcccgccgctgctgagcaagccgggcgacgaggacgacgcgccgcccaagatgggggagccggcgggcggccgctacgagcacccgggcttgggcgccctgggcacgcagcagccgccggtcgccgtgcccgggggcggcggcggcccggcggccgtcccggagtttaataattactatggcagcgctgcccctgcgagcggcggccccggcggccgcgctgggccttgctttgatcaacatggcggacaacaaagccccgggatggggatgatgcactccgcctccgccgccgccgccggggcccccggcagcatggaccccctgcagaactcccacgaagggtaccccaacagccagtgcaaccattatccgggctacagccggcccggcgcgggcggcggcggcggcggcggcggcggaggaggaggaggcagcggaggaggaggaggaggaggaggagcaggagcaggaggagcaggagcgggagctgtggcggcggcggccgcggcggcggcggcagcagcaggaggcggcggcggcggcggctatgggggctcgtccgcggggtacggggtgctgagctccccccggcagcagggcggcggcatgatgatgggccccgggggcggcggggccgcgagcctcagcaaggcggccgccggctcggcggcggggggcttccagcgcttcgccggccagaaccagcacccgtcgggggccaccccgaccctcaatcagctgctcacctcgcccagccccatgatgcggagctacggcggcagctaccccgagtacagcagccccagcgcgccgccgccgccgccgtcgcagccccagtcccaggcggcggcggcgggggcggcggcgggcggccagcaggcggccgcgggcatgggcttgggcaaggacatgggcgcccagtacgccgctgccagcccggcctgggcggccgcgcaacaaaggagtcacccggcgatgagccccggcacccccggaccgaccatgggcagatcccagggcagcccaatggatccaatggtgatgaagagacctcagttgtatggcatgggcagtaaccctcattctcagcctcagcagagcagtccgtacccaggaggttcctatggccctccaggcccacagcggtatccaattggcatccagggtcggactcccggggccatggccggaatgcagtaccctcagcagcaggactctggagatgccacatggaaagaaacattctggttgatgccacctcagtatggacagcaaggtgtgagtggttactgccagcagggccaacagccatattacagccagcagccgcagcccccgcacctcccaccccaggcgcagtatctgccgtcccagtcccagcagaggtaccagccgcagcaggacatgtctcaggaaggctatggaactagatctcaacctcctctggcccccggaaaacctaaccatgaagacttgaacttaatacagcaagaaagaccatcaagtttaccagatctgtctggctccattgatgacctccccacgggaacggaagcaactttgagctcagcagtcagtgcatccgggtccacgagcagccaaggggatcagagcaacccggcgcagtcgcctttctccccacatgcgtcccctcatctctccagcatcccggggggcccatctccctctcctgttggctctcctgtaggaagcaaccagtctcgatctggcccaatctctcctgcaagtatcccaggtagtcagatgcctccgcagccacccgggagccagtcagaatccagttcccatcccgccttgagccagtcaccaatgccacaggaaagaggttttatggcaggcacacaaagaaaccctcagatggctcagtatggacctcaacagacaggaccatccatgtcgcctcatccttctcctgggggccagatgcatgctggaatcagtagctttcagcagagtaactcaagtgggacttacggtccacagatgagccagtatggaccacaaggtaactactccagacccccagcgtatagtggggtgcccagtgcaagctacagcggcccagggcccggtatgggtatcagtgccaacaaccagatgcatggacaagggccaagccagccatgtggtgctgtgcccctgggacgaatgccatcagctgggatgcagaacagaccatttcctggaaatatgagcagcatgacccccagttctcctggcatgtctcagcagggagggccaggaatggggccgccaatgccaactgtgaaccgtaaggcacaggaggcagccgcagcagtgatgcaggctgctgcgaactcagcacaaagcaggcaaggcagtttccccggcatgaaccagagtggacttatggcttccagctctccctacagccagcccatgaacaacagctctagcctgatgaacacgcaggcgccgccctacagcatggcgcccgccatggtgaacagctcggcagcatctgtgggtcttgcagatatgatgtctcctggtgaatccaaactgcccctgcctctcaaagcagacggcaaagaagaaggcactccacagcccgagagcaagtcaaagaagtccagctcctccaccactactggggagaagatcacgaaggtgtacgagctggggaatgagccagagagaaagctctgggtcgaccgatacctcaccttcatggaagagagaggctctcctgtctcaagtctgcctgccgtgggcaagaagcccctggacctgttccgactctacgtctgcgtcaaagagatcgggggtttggcccaggttaataaaaacaagaagtggcgtgagctggcaaccaacctaaacgttggcacctcaagcagtgcagcgagctccctgaaaaagcagtatattcagtacctgtttgcctttgagtgcaagatcgaacgtggggaggagcccccgccggaagtcttcagcaccggggacaccaaaaagcagcccaagctccagccgccatctcctgctaactcgggatccttgcaaggcccacagaccccccagtcaactggcagcaattccatggcagaggttccaggtgacctgaagccacctaccccagcctccacccctcacggccagatgactccaatgcaaggtggaagaagcagtacaatcagtgtgcacgacccattctcagatgtgagtgattcatccttcccgaaacggaactccatgactccaaacgccccctaccagcagggcatgagcatgcccgatgtgatgggcaggatgccctatgagcccaacaaggacccctttgggggaatgagaaaagtgcctggaagcagcgagccctttatgacgcaaggacagatgcccaacagcagcatgcaggacatgtacaaccaaagtccctccggagcaatgtctaacctgggcatggggcagcgccagcagtttccctatggagccagttacgaccgaaggcatgaaccttatgggcagcagtatccaggccaaggccctccctcgggacagccgccgtatggagggcaccagcccggcctgtacccacagcagccgaattacaaacgccatatggacggcatgtacgggcccccagccaagcgccacgagggcgacatgtacaacatgcagtacagcagccagcagcaggagatgtacaaccagtatggaggctcctactcgggcccggaccgcaggcccatccagggccagtacccgtatccctacagcagggagaggatgcagggcccggggcagatccagacacacggaatcccgcctcagatgatgggcggcccgctgcagtcgtcctccagtgaggggcctcagcagaatatgtgggcagcacgcaatgatatgccttatccctaccagaacaggcagggccctggcggccctacacaggcgcccccttacccaggcatgaaccgcacagacgatatgatggtacccgatcagaggataaatcatgagagccagtggccttctcacgtcagccagcgtcagccttatatgtcgtcctcagcctccatgcagcccatcacacgcccaccacagccgtcctaccagacgccaccgtcactgccaaatcacatctccagggcgcccagcccagcgtccttccagcgctccctggagaaccgcatgtctccaagcaagtctccttttctgccgtctatgaagatgcagaaggtcatgcccacggtccccacatcccaggtcaccgggccaccaccccaaccacccccaatcagaagggagatcacctttcctcctggctcagtagaagcatcacaaccagtcttgaaacaaaggcgaaagattacctccaaagatatcgttactcctgaggcgtggcgtgtgatgatgtcccttaaatcaggtcttttggctgagagtacgtgggctttggacactattaatattcttctgtatgatgacagcactgttgctactttcaatctctcccagttgtctggatttctcgaacttttagtcgagtactttagaaaatgcctgattgacatttttggaattcttatggaatatgaagtgggagaccccagccaaaaagcacttgatcacaacgcagcaaggaaggatgacagccagtccttggcagacgattctgggaaagaggaggaagatgctgaatgtattgatgacgacgaggaagacgaggaggatgaggaggaagacagcgagaagacagaaagcgatgaaaagagcagcatcgctctgactgccccggacgccgctgcagacccaaaggagaagcccaagcaagccagtaagttcgacaagctgccaataaagatagtcaaaaagaacaacctgtttgttgttgaccgatctgacaagttggggcgtgtgcaggagttcaatagtggccttctgcactggcagctcggcgggggtgacaccaccgagcacattcagactcactttgagagcaagatggaaattcctcctcgcaggcgcccacctccccccttaagctccgcaggtagaaagaaagagcaagaaggcaaaggcgactctgaagagcagcaagagaaaagcatcatagcaaccatcgatgacgtcctctctgctcggccaggggcattgcctgaagacgcaaaccctgggccccagaccgaaagcagtaagtttccctttggtatccagcaagccaaaagtcaccggaacatcaagctgctggaggacgagcccaggagccgagacgagactcctctgtgtaccatcgcgcactggcaggactcgctggctaagcgatgcatctgtgtgtccaatattgtccgtagcttgtcattcgtgcctggcaatgatgccgaaatgtccaaacatccaggcctggtgctgatcctggggaagctgattcttcttcaccacgagcatccagagagaaagcgagcaccgcagacctatgagaaagaggaggatgaggacaagggggtggcctgcagcaaagatgagtggtggtgggactgcctcgaggtcttgagggataacacgttggtcacgttggccaacatttccgggcagctagacttgtctgcttacacggaaagcatctgcttgccaattttggatggcttgctgcactggatggtgtgcccgtctgcagaggcacaagatccctttccaactgtgggacccaactcggtcctgtcgcctcagagacttgtgctggagaccctctgtaaactcagtatccaggacaataatgtggacctgatcttggccactcctccatttagtcgtcaggagaaattctatgctacattagttaggtacgttggggatcgcaaaaacccagtctgtcgagaaatgtccatggcgcttttatcgaaccttgcccaaggggacgcactagcagcaagggccatagctgtgcagaaaggaagcattggaaacttgataagcttcctagaggatggggtcacgatggcccagtaccagcagagccagcacaacctcatgcacatgcagcccccgcccctggaaccacctagcgtagacatgatgtgcagggcggccaaggctttgctagccatggccagagtggacgaaaaccgctcggaattccttttgcacgagggccggttgctggatatctcgatatcagctgtcctgaactctctggttgcatctgtcatctgtgatgtactgtttcagattgggcagttatgacataagtgagaaggcaagcatgtgtgagtgaagattagagggtcacatataactggctgttttctgttcttgtttatccagcgtaggaagaaggaaaagaaaatctttgctcctctgccccattcactatttaccaattgggaattaaagaaataattaatttgaacagttatgaaattaatatttgctgtctgtgtgtataagtacatcctttggggttttttttttctcttttttttaaccaaagttgctgtctagtgcattcaaaggtcactttttgttcttcacagatctttttaatgttctttcccatgttgtattgcatttttgggggaagcaaattgactttaaagaaaaaagttgtggcaaaagatgctaagatgcgaaaatttcaccacactgagtcaaaaaggtgaaaaattatccatttcctatgcgttttactcctcagagaatgaaaaaaactgcat

SEQ ID NO: 205426 - DNA, 6749 bp, Artificial Sequence
  derived and/or modified sequence
atggcacataatgctggagcagcagccgctgccggaactcacagtgcaaagagcggtgggagcgaggccgctttaaaggagggtggcagcgcagccgctcttagctcatccagctcttcttccgcagcagccgcagctgcctcatccagctcctcatccgggcctggtagtgcgatggagactggacttttgcctaaccacaagctgaagactgttggcgaggctcctgctgcccctccacatcagcagcatcatcatcaccaccatgctcatcaccatcaccatcacgctcatcacctccaccaccatcacgctttacagcagcagcttaatcagttccagcagcagcagcagcagcagcagcaacagcagcagcagcaacagcagcagcagcacccgatatctaacaataattccctggggggtgctggaggcggagcacctcagcctggacctgatatggagcaaccacagcatggaggcgcaaaagactcagccgctgggggacaggccgaccccccaggccctccgttactttccaagcccggtgatgaagacgatgctccccctaagatgggggaaccagcagggggtcgctacgagcatcctggtctgggtgctttaggcacacaacagccacctgtggccgtaccaggaggaggtggtggtcctgccgcagtcccagagtttaataattattacgggtccgcggcaccagccagcgggggacccggaggtagggctggtccctgtttcgatcaacatgggggtcagcagagtcccggtatggggatgatgcactcagcctccgcagcagctgccggagcccctggttccatggacccactgcaaaattctcatgaaggctacccaaattctcagtgcaaccattaccccggatacagtaggccgggagctgggggtggaggcggaggcggaggcggaggcggaggcggatctggcggaggcggtggcggtgggggagccggagccggtggtgccggagcgggagccgttgccgctgcagccgcagctgccgcagccgctgctggaggcggaggtggcggaggctacggtggatctagtgcaggctacggagtcctatcatccccacgtcagcagggaggaggcatgatgatggggcctgggggtgggggtgccgcttccctgtcaaaagcggctgccggatctgccgctggcggttttcagaggttcgccggacaaaatcagcatccatccggcgctaccccaactctgaatcagcttctcactagccctagcccgatgatgcgctcctacggcggttcctacccagaatactcatcacccagcgcccctcccccaccccctagtcaaccccagtcacaggccgctgcagctggcgctgccgctggcggacagcaggctgctgccggaatgggattgggcaaggacatgggtgcccagtatgctgctgcttcccccgcatgggcagccgcacagcagcgaagccacccagcgatgagtcccggaacacctggtccaacgatgggacggtcccagggttcgcccatggaccccatggtgatgaaacggcctcagctgtacggcatgggcagcaacccacattcccagccacagcagtcttccccttacccaggcggttcctatggcccacccggtcctcaaagatacccaatcggaattcagggccgtacacccggtgccatggccggaatgcagtaccctcagcaacaggactccggcgacgctacttggaaagaaaccttctggctgatgcccccacagtacgggcagcaaggagtcagtgggtattgccagcagggccagcaaccgtattattcccagcaacctcagccccctcacctacctcctcaggcccaatatctcccctcacagtctcagcagagatatcaaccacaacaggatatgagtcaagagggttacggcacacggtcacagcctcccctcgcacctggaaaacccaatcatgaagatctgaacttaattcagcaagagaggcccagttcactgccagaccttagtgggagcatcgatgacctgcctactggcaccgaggcgaccctcagttccgccgtgagcgcaagcggctccacaagctcacagggcgaccagagcaatcctgcccagagcccgttttccccccacgcctccccccatttatcgagtataccagggggaccatctccttcccctgtggggtctcccgtcggctccaaccagtctaggagcggtccaatttcacccgctagcattccgggtagccaaatgcctccacagccaccaggatcacagagcgagtcatcaagccacccagccctttcacagtcccctatgcctcaagagcgtggatttatggccggaacacagagaaatcctcagatggcccagtacggaccccaacaaacgggaccctctatgagcccacacccgtcacccggagggcagatgcatgcaggcatttccagcttccaacaaagtaatagctctggaacgtatggtcctcagatgtcccagtacggaccccaggggaactactccagaccacccgcatacagcggggtaccaagtgcctcgtattcaggcccaggccctggtatggggatctccgcgaacaatcagatgcatgggcaaggtcccagtcaaccctgcggcgctgtgccattggggcgaatgccatccgctggaatgcagaaccggccattccctggaaacatgtctagtatgaccccaagctcacccggtatgtcccaacaagggggtccaggaatgggtcctcctatgccgaccgtgaatcggaaggctcaggaggcagcagcggcagtcatgcaggctgccgcaaactccgctcagagtaggcaaggatcattccctggaatgaaccagtccggcctgatggccagttcctctccctactcccaacccatgaacaactccagttccttaatgaacacccaagcacctccttacagcatggccccagcgatggtaaattccagtgcagcctctgttggcctggccgatatgatgtccccaggcgaatccaagctcccactacctctcaaggctgacggcaaggaggagggtactccacagcctgagtccaagtccaaaaagagctccagctccacaactacgggcgagaaaattacaaaggtctacgaactgggtaatgagcctgagcgaaagctctgggttgatcggtacctgactttcatggaggaacggggatcacccgttagctctttaccagccgtgggcaaaaaacctctggatctctttcggctgtacgtgtgcgtgaaggaaatcgggggactggcacaggtaaacaaaaataaaaagtggagggaactggccacaaacctaaatgttggcactagctcctccgccgcaagcagcctgaagaagcaatacattcagtatctcttcgcattcgagtgtaaaatagaaaggggtgaagaacccccaccagaagtgttttccactggtgacaccaagaagcagccaaaactgcagccaccctctcctgccaacagtggatctctgcagggacctcagaccccacagagcaccggtagtaattccatggcggaggtacccggtgaccttaaaccacccactcccgctagcaccccacacggccagatgacaccaatgcagggcggtcgatcttcaacgatttctgtccatgaccctttctcggatgtttcagacagcagtttccccaaaagaaatagtatgacgcctaacgcaccataccagcagggaatgtctatgcctgacgtaatggggagaatgccttacgaacccaacaaagacccatttggcggtatgcgcaaggtgcctggctcatccgagcccttcatgacccagggccagatgcccaacagctctatgcaggacatgtataaccagagcccctctggagcaatgtccaatctgggcatggggcaacggcaacagttcccttatggggcaagctacgaccggcgtcacgagccatacggtcagcagtatcccggacaaggccctcccagtggacaacctccttacgggggacaccagcccggactatatccccagcagcccaattataaaaggcatatggatggaatgtacggaccacccgcaaagcggcatgaaggtgatatgtacaacatgcaatactcctcccagcagcaggagatgtataaccagtatggaggcagctatagcggacccgatcgcaggcccatccaggggcagtatccctacccttactctcgggagcgcatgcaggggccagggcaaatacagacccacgggatacctccacagatgatggggggaccacttcagagctcctctagtgaaggccctcagcagaacatgtgggccgctcggaatgatatgccctacccctatcaaaatcggcaggggcctggcggtccaacgcaagccccaccataccctgggatgaataggaccgatgacatgatggtgcccgatcagcgaatcaatcacgaaagccagtggccatcccacgtgtctcagcgccagccatacatgagttcaagcgcgtcaatgcagcctatcacccggcctcctcagccatcctaccagacgccgccttccctgcctaaccatataagtagggccccttctcccgcttctttccagagaagcctagagaatcgtatgagccctagtaagtcacccttcttaccatctatgaaaatgcagaaggtcatgccgactgtgccaacctctcaggtgaccgggccacctccacagcctcctccaattcgaagagagattacattccccccaggttcagtcgaagccagtcaaccggtgctcaaacagaggaggaagataactagtaaagacatcgtgactcccgaggcatggcgggtcatgatgagccttaaatccggtcttctcgccgaatctacttgggctctggacacaatcaatatattactgtacgatgactccactgttgcaacttttaatttgagccagctgtctggtttccttgaactgctcgtggagtacttccgcaagtgcctgatagacatatttggcatcctcatggaatatgaggtgggcgatcctagccagaaagctctggatcataatgccgcacgcaaagacgactctcagagcctggccgatgacagtggcaaagaggaggaagatgctgaatgtattgacgatgacgaagaggacgaagaagacgaggaggaagatagtgagaaaaccgaaagtgacgagaagagctctatcgcactgactgcgcctgatgctgcagccgaccctaaggaaaaacctaaacaagcctcaaagtttgataagctacctattaagatcgtgaaaaagaacaacttattcgtggtggatcgctctgataagctcggaagggtgcaagagtttaactctggactgctgcattggcagctgggtgggggtgacaccaccgaacacatccagacccacttcgaatcaaagatggaaatacctccgaggagaaggcctccacccccattaagcagtgccggtcgtaagaaagaacaagagggaaaaggggattctgaggaacagcaggagaagtccatcatcgccactattgacgacgtcctttccgccaggccaggagcccttccggaagatgcgaacccagggccacagacagagtccagcaagttcccattcggtattcagcaggccaaatcccatcgcaatataaaactcctggaggatgagcccagatctagggatgagaccccattgtgcaccatcgcccactggcaggactctctcgctaagagatgcatctgcgtctcaaatatcgtcagatcgctgtcattcgttcccggaaacgatgccgagatgagcaagcaccccggactggtgctgatcctaggcaaattgattctactgcatcacgagcatcctgagcgaaaaagagccccacaaacctatgagaaagaggaagacgaggataagggagtagcatgctcaaaagatgaatggtggtgggactgtctcgaagtgcttagagacaacaccctggttactctggccaacatctccggccagttggacttgtcggcctatacagagtcaatttgcctcccaattctcgatgggttactacattggatggtttgcccctccgctgaagctcaagacccattcccaacagttggtcccaactccgtgctctctccacagcgactcgtactggaaacactgtgcaagctcagtatacaggataacaatgtagatctcatactggcaacgcctcccttctcaaggcaggagaagttttacgctaccctggtgcggtatgtgggtgaccggaagaacccagtttgcagagagatgagcatggcattgctctctaatcttgcccaaggggatgccctggcagctagagcaattgccgtgcaaaaaggatcaatcgggaacctcatcagttttttggaggacggcgttacgatggcccaataccagcagtcccaacacaatctcatgcacatgcagccaccaccgctggagcctccgagcgtagacatgatgtgccgtgctgctaaagcattgctcgccatggcaagagtagatgagaacagaagtgaatttctgctccatgaagggaggctcctggacataagtatttctgccgtgctaaatagcttggtggccagtgtgatctgtgacgtgctcttccagatagggcagttata

SEQ ID NO: 205427 - DNA, 6750 bp, Artificial Sequence
  derived and/or modified sequence
atggcccacaacgccggcgccgccgccgccgccggcacccacagcgccaagagcggcggcagcgaggccgccctgaaggagggcggcagcgccgccgccctgagcagcagcagcagcagcagcgccgccgccgccgccgccagcagcagcagcagcagcggccccggcagcgccatggagaccggcctgctgcccaaccacaagctgaagaccgtgggcgaggcccccgccgcccccccccaccagcagcaccaccaccaccaccacgcccaccaccaccaccaccacgcccaccacctgcaccaccaccacgccctgcagcagcagctgaaccagttccagcagcagcagcagcagcagcagcagcagcagcagcagcagcagcagcagcagcaccccatcagcaacaacaacagcctgggcggcgccggcggcggcgccccccagcccggccccgacatggagcagccccagcacggcggcgccaaggacagcgccgccggcggccaggccgacccccccggcccccccctgctgagcaagcccggcgacgaggacgacgccccccccaagatgggcgagcccgccggcggcagatacgagcaccccggcctgggcgccctgggcacccagcagccccccgtggccgtgcccggcggcggcggcggccccgccgccgtgcccgagttcaacaactactacggcagcgccgcccccgccagcggcggccccggcggcagagccggcccctgcttcgaccagcacggcggccagcagagccccggcatgggcatgatgcacagcgccagcgccgccgccgccggcgcccccggcagcatggaccccctgcagaacagccacgagggctaccccaacagccagtgcaaccactaccccggctacagcagacccggcgccggcggcggcggcggcggcggcggcggcggcggcggcggcagcggcggcggcggcggcggcggcggcgccggcgccggcggcgccggcgccggcgccgtggccgccgccgccgccgccgccgccgccgccgccggcggcggcggcggcggcggctacggcggcagcagcgccggctacggcgtgctgagcagccccagacagcagggcggcggcatgatgatgggccccggcggcggcggcgccgccagcctgagcaaggccgccgccggcagcgccgccggcggcttccagagattcgccggccagaaccagcaccccagcggcgccacccccaccctgaaccagctgctgaccagccccagccccatgatgagaagctacggcggcagctaccccgagtacagcagccccagcgcccccccccccccccccagccagccccagagccaggccgccgccgccggcgccgccgccggcggccagcaggccgccgccggcatgggcctgggcaaggacatgggcgcccagtacgccgccgccagccccgcctgggccgccgcccagcagagaagccaccccgccatgagccccggcacccccggccccaccatgggcagaagccagggcagccccatggaccccatggtgatgaagagaccccagctgtacggcatgggcagcaacccccacagccagccccagcagagcagcccctaccccggcggcagctacggcccccccggcccccagagataccccatcggcatccagggcagaacccccggcgccatggccggcatgcagtacccccagcagcaggacagcggcgacgccacctggaaggagaccttctggctgatgcccccccagtacggccagcagggcgtgagcggctactgccagcagggccagcagccctactacagccagcagccccagcccccccacctgcccccccaggcccagtacctgcccagccagagccagcagagataccagccccagcaggacatgagccaggagggctacggcaccagaagccagccccccctggcccccggcaagcccaaccacgaggacctgaacctgatccagcaggagagacccagcagcctgcccgacctgagcggcagcatcgacgacctgcccaccggcaccgaggccaccctgagcagcgccgtgagcgccagcggcagcaccagcagccagggcgaccagagcaaccccgcccagagccccttcagcccccacgccagcccccacctgagcagcatccccggcggccccagccccagccccgtgggcagccccgtgggcagcaaccagagcagaagcggccccatcagccccgccagcatccccggcagccagatgcccccccagccccccggcagccagagcgagagcagcagccaccccgccctgagccagagccccatgccccaggagagaggcttcatggccggcacccagagaaacccccagatggcccagtacggcccccagcagaccggccccagcatgagcccccaccccagccccggcggccagatgcacgccggcatcagcagcttccagcagagcaacagcagcggcacctacggcccccagatgagccagtacggcccccagggcaactacagcagaccccccgcctacagcggcgtgcccagcgccagctacagcggccccggccccggcatgggcatcagcgccaacaaccagatgcacggccagggccccagccagccctgcggcgccgtgcccctgggcagaatgcccagcgccggcatgcagaacagacccttccccggcaacatgagcagcatgacccccagcagccccggcatgagccagcagggcggccccggcatgggcccccccatgcccaccgtgaacagaaaggcccaggaggccgccgccgccgtgatgcaggccgccgccaacagcgcccagagcagacagggcagcttccccggcatgaaccagagcggcctgatggccagcagcagcccctacagccagcccatgaacaacagcagcagcctgatgaacacccaggcccccccctacagcatggcccccgccatggtgaacagcagcgccgccagcgtgggcctggccgacatgatgagccccggcgagagcaagctgcccctgcccctgaaggccgacggcaaggaggagggcaccccccagcccgagagcaagagcaagaagagcagcagcagcaccaccaccggcgagaagatcaccaaggtgtacgagctgggcaacgagcccgagagaaagctgtgggtggacagatacctgaccttcatggaggagagaggcagccccgtgagcagcctgcccgccgtgggcaagaagcccctggacctgttcagactgtacgtgtgcgtgaaggagatcggcggcctggcccaggtgaacaagaacaagaagtggagagagctggccaccaacctgaacgtgggcaccagcagcagcgccgccagcagcctgaagaagcagtacatccagtacctgttcgccttcgagtgcaagatcgagagaggcgaggagcccccccccgaggtgttcagcaccggcgacaccaagaagcagcccaagctgcagccccccagccccgccaacagcggcagcctgcagggcccccagaccccccagagcaccggcagcaacagcatggccgaggtgcccggcgacctgaagccccccacccccgccagcaccccccacggccagatgacccccatgcagggcggcagaagcagcaccatcagcgtgcacgaccccttcagcgacgtgagcgacagcagcttccccaagagaaacagcatgacccccaacgccccctaccagcagggcatgagcatgcccgacgtgatgggcagaatgccctacgagcccaacaaggaccccttcggcggcatgagaaaggtgcccggcagcagcgagcccttcatgacccagggccagatgcccaacagcagcatgcaggacatgtacaaccagagccccagcggcgccatgagcaacctgggcatgggccagagacagcagttcccctacggcgccagctacgacagaagacacgagccctacggccagcagtaccccggccagggcccccccagcggccagcccccctacggcggccaccagcccggcctgtacccccagcagcccaactacaagagacacatggacggcatgtacggcccccccgccaagagacacgagggcgacatgtacaacatgcagtacagcagccagcagcaggagatgtacaaccagtacggcggcagctacagcggccccgacagaagacccatccagggccagtacccctacccctacagcagagagagaatgcagggccccggccagatccagacccacggcatccccccccagatgatgggcggccccctgcagagcagcagcagcgagggcccccagcagaacatgtgggccgccagaaacgacatgccctacccctaccagaacagacagggccccggcggccccacccaggcccccccctaccccggcatgaacagaaccgacgacatgatggtgcccgaccagagaatcaaccacgagagccagtggcccagccacgtgagccagagacagccctacatgagcagcagcgccagcatgcagcccatcaccagacccccccagcccagctaccagaccccccccagcctgcccaaccacatcagcagagcccccagccccgccagcttccagagaagcctggagaacagaatgagccccagcaagagccccttcctgcccagcatgaagatgcagaaggtgatgcccaccgtgcccaccagccaggtgaccggcccccccccccagcccccccccatcagaagagagatcaccttcccccccggcagcgtggaggccagccagcccgtgctgaagcagagaagaaagatcaccagcaaggacatcgtgacccccgaggcctggagagtgatgatgagcctgaagagcggcctgctggccgagagcacctgggccctggacaccatcaacatcctgctgtacgacgacagcaccgtggccaccttcaacctgagccagctgagcggcttcctggagctgctggtggagtacttcagaaagtgcctgatcgacatcttcggcatcctgatggagtacgaggtgggcgaccccagccagaaggccctggaccacaacgccgccagaaaggacgacagccagagcctggccgacgacagcggcaaggaggaggaggacgccgagtgcatcgacgacgacgaggaggacgaggaggacgaggaggaggacagcgagaagaccgagagcgacgagaagagcagcatcgccctgaccgcccccgacgccgccgccgaccccaaggagaagcccaagcaggccagcaagttcgacaagctgcccatcaagatcgtgaagaagaacaacctgttcgtggtggacagaagcgacaagctgggcagagtgcaggagttcaacagcggcctgctgcactggcagctgggcggcggcgacaccaccgagcacatccagacccacttcgagagcaagatggagatcccccccagaagaagaccccccccccccctgagcagcgccggcagaaagaaggagcaggagggcaagggcgacagcgaggagcagcaggagaagagcatcatcgccaccatcgacgacgtgctgagcgccagacccggcgccctgcccgaggacgccaaccccggcccccagaccgagagcagcaagttccccttcggcatccagcaggccaagagccacagaaacatcaagctgctggaggacgagcccagaagcagagacgagacccccctgtgcaccatcgcccactggcaggacagcctggccaagagatgcatctgcgtgagcaacatcgtgagaagcctgagcttcgtgcccggcaacgacgccgagatgagcaagcaccccggcctggtgctgatcctgggcaagctgatcctgctgcaccacgagcaccccgagagaaagagagccccccagacctacgagaaggaggaggacgaggacaagggcgtggcctgcagcaaggacgagtggtggtgggactgcctggaggtgctgagagacaacaccctggtgaccctggccaacatcagcggccagctggacctgagcgcctacaccgagagcatctgcctgcccatcctggacggcctgctgcactggatggtgtgccccagcgccgaggcccaggaccccttccccaccgtgggccccaacagcgtgctgagcccccagagactggtgctggagaccctgtgcaagctgagcatccaggacaacaacgtggacctgatcctggccaccccccccttcagcagacaggagaagttctacgccaccctggtgagatacgtgggcgacagaaagaaccccgtgtgcagagagatgagcatggccctgctgagcaacctggcccagggcgacgccctggccgccagagccatcgccgtgcagaagggcagcatcggcaacctgatcagcttcctggaggacggcgtgaccatggcccagtaccagcagagccagcacaacctgatgcacatgcagcccccccccctggagccccccagcgtggacatgatgtgcagagccgccaaggccctgctggccatggccagagtggacgagaacagaagcgagttcctgctgcacgagggcagactgctggacatcagcatcagcgccgtgctgaacagcctggtggccagcgtgatctgcgacgtgctgttccagatcggccagctgtag

SEQ ID NO: 205428 - protein, 1381 aa, Artificial Sequence
  derived and/or modified sequence
MASPRASRWPPPLLLLLLPLLLLPPAAPGTRDPPPSPARRALSLAPLAGAGLELQLERRPEREPPPTPPRERRGPATPGPSYRAPEPGAATQRGPSGRAPRGGSADAAWKHWPESNTEAHVENITFYQNQEDFSTVSSKEGVMVQTSGKSHAASDAPENLTLLAETADARGRSGSSSRTNFTILPVGYSLEIATALTSQSGNLASESLHLPSSSSEFDERIAAFQTKSGTASEMGTERAMGLSEEWTVHSQEATTSAWSPSFLPALEMGELTTPSRKRNSSGPDLSWLHFYRTAASSPLLDLSSSSESTEKLNNSTGLQSSSVSQTKTMHVATVFTDGGPRTLRSLTVSLGPVSKTEGFPKDSRIATTSSSVLLSPSAVESRRNSRVTGNPGDEEFIEPSTENEFGLTSLRWQNDSPTFGEHQLASSSEVQNGSPMSQTETVSRSVAPMRGGEITAHWLLTNSTTSADVTGSSASYPEGVNASVLTQFSDSTVQSGGSHTALGDRSYSESSSTSSSESLNSSAPRGERSIAGISYGQVRGTAIEQRTSSDHTDHTYLSSTFTKGERALLSITDNSSSSDIVESSTSYIKISNSSHSEYSSFFHAQTERSNISSYDGEYAQPSTESPVLHTSNLPSYTPTINMPNTSVVLDTDAEFVSDSSSSSSSSSSSSSSGPPLPLPSVSQSHHLFSSILPSTRASVHLLKSTSDASTPWSSSPSPLPVSLTTSTSAPLSVSQTTLPQSSSTPVLPRARETPVTSFQTSTMTSFMTMLHSSQTADLKSQSTPHQEKVITESKSPSLVSLPTESTKAVTTNSPLPPSLTESSTEQTLPATSTNLAQMSPTFTTTILKTSQPLMTTPGTLSSTASLVTGPIAVQTTAGKQLSLTHPEILVPQISTEGGISTERNRVIVDATTGLIPLTSVPTSAKEMTTKLGVTAEYSPASRSLGTSPSPQTTVVSTAEDLAPKSATFAVQSSTQSPTTVSSSASVNSCAVNPCLHNGECVADNTSRGYHCRCPPSWQGDDCSVDVNECLSNPCPSTAMCNNTQGSFICKCPVGYQLEKGICNLVRTFVTEFKLKRTFLNTTVEKHSDLQEVENEITKTLNMCFSALPSYIRSTVHASRESNAVVISLQTTFSLASNVTLFDLADRMQKCVNSCKSSAEVCQLLGSQRRIFRAGSLCKRKSPECDKDTSICTDLDGVALCQCKSGYFQFNKMDHSCRACEDGYRLENETCMSCPFGLGGLNCGNPYQLITVVIAAAGGGLLLILGIALIVTCCRKNKNDISKLIFKSGDFQMSPYAEYPKNPRSQEWGREAIEMHENGSTKNLLQMTDVYYSPTSVRNPELERNGLYPAYTGLPGSRHSCIFPGQYNPSFISDESRRRDYF

SEQ ID NO: 205429 - DNA, 4146 bp, Artificial Sequence
  derived and/or modified sequence
atggcctcccctcgggccagccggtggccgcctcctttgttgctgcttttactccctctgttgttactgcctccagcagctccgggaacacgtgatccgccgccttcgcctgcacgccgggccctgagcctggcgccacttgcaggagctggactggagctgcaactcgaaaggcgcccagagcgggagcctccccccactcccccgcgcgaacgcaggggtccggcgactcccggtccatcttacagagctccagagcccggggctgctacacagcggggacccagtgggcgggctccccgtgggggatctgcagacgctgcatggaaacactggcccgaatctaacactgaggcacacgtggaaaacatcacattctaccagaaccaggaagacttctcaaccgtgtcctccaaggaaggggtaatggtccaaacctcaggaaaaagccacgcggcttcagatgcccctgagaacctgacccttctcgctgagacagctgatgcgcgaggcagaagcgggtcctcgtcccgcacaaactttaccatcctgcctgtgggctactcgctggagatcgcaacggctttaacgtcacagtcaggcaacctcgcatcggaatcccttcatctgccttcaagctcaagtgagttcgatgagaggattgccgcgtttcagacaaagtcaggcaccgcgtctgagatggggaccgaacgcgccatgggcctcagcgaagagtggactgtccactcccaggaggctaccacaagcgcctggtccccaagttttctacccgccctggagatgggagagttgacaactccttccagaaaacggaacagttctggccccgacctctcctggctgcacttctacagaaccgcggcctcaagtcccctgctcgacctgtcgtctagcagcgagagcactgagaaattgaacaacagcacaggcctgcaatcatcctcggtgagccagaccaagactatgcacgttgctacagtgtttaccgatggtgggccaagaacgctgaggtctctgacggtgtctcttggcccggtctcaaagactgaaggattcccgaaagactccaggatcgcaacaacctcctcatccgtactgctctctccttccgccgtggagtccaggaggaactctcgcgtgactggtaacccgggagatgaagagttcatagagccatctaccgaaaacgagtttgggctgacttcattacggtggcaaaacgattctcccaccttcggggagcatcagctcgcctcctccagcgaggtacaaaacggcagcccaatgtctcagactgagacggtgtccaggagcgtggcccctatgcgcgggggggaaatcaccgcccattggctcctgactaatagcaccaccagtgccgatgtcacaggctctagcgcgagctatccagaaggcgtaaatgccagcgtgctgacccagttctctgattcgaccgtccagagtggaggatcccacacagctcttggagatcggagctattccgagtcaagctcgacatcaagtagcgaatcgctcaactcatcagccccgcgcggagagcggagcattgcaggaataagttacggccaggtccggggcacagcaattgagcagcggacctcaagcgatcatacagatcatacctacctgtcttcaactttcaccaagggcgagcgggctctactcagcatcacggataactcttccagcagcgatattgttgaaagctccacctcatacataaagatcagtaattcatctcactctgagtactcatcattcttccatgctcagacagagcgttcaaatatcagcagctatgacggtgaatatgcgcagccctctacggagtcacccgtgctccatacctccaatctgccgagctacactccaaccataaacatgcccaacacctccgtggtcctcgacacagatgctgaatttgtctctgacagttccagttcctcttctagctcaagctctagttcgtccagcggaccccccctgcccctgccatccgtgagtcaatcgcatcatttgtttagttcgatcctcccctcaactcgcgcttcagtgcacctgctgaaatctactagcgatgcaagcaccccttggtcctccagcccttcgccccttccggtgagcctcactacctcaacatccgcgccactgtccgtgtctcagactaccttgccccagagctcctctacaccagtccttccacgtgcccgcgaaaccccagttacgagctttcaaacttccaccatgacaagcttcatgacaatgctacactcatcccaaaccgctgacctgaagtcccagtctactcctcaccaagaaaaggtcattacagagagtaaatcccctagccttgttagtctgcctactgaatccaccaaagccgttacaacgaactctccgctacctccaagtctgacggagtcgtccaccgagcagactctccccgccacctcaactaacttggcccaaatgagccccaccttcacaactactattctgaaaacctcgcaaccactcatgactacaccaggcaccctttctagtacagcttctctggtgaccgggcccatcgccgtgcagaccacagcgggaaagcagctgagtctgacgcatcccgaaatcctcgtcccacagatcagcacagaaggggggatctcgacagaaaggaatcgggttattgtggacgctaccactggcctgatccctctgacgagcgtgcctacatccgccaaagaaatgactaccaaactgggagtgacagcagaatactcacctgcaagccggtcactgggaacctctccgagccctcagaccacggtggtaagcacagccgaggacttagcgcctaaatccgccaccttcgcagtgcagagtagtacgcagtctcctaccacagtgtcatcatctgcttccgtgaactcatgcgccgtgaacccctgtttgcataacggagaatgtgttgcggacaacaccagtagaggataccactgccggtgcccccctagctggcagggagacgactgcagtgttgacgtgaatgaatgcctctccaacccctgtccttccaccgcaatgtgtaacaatacccagggtagcttcatttgcaagtgtccagtgggttaccagctcgaaaaaggtatctgcaatctagtgcggacatttgtgaccgaattcaaactcaaacgcaccttcctgaatacaactgtcgagaagcactctgatttgcaggaggtcgaaaatgagatcaccaagacactgaatatgtgcttttcggcgttgccttcatacattagatctactgtccatgcctcacgggagagcaacgcggttgttatcagcctgcaaacaacgttttcactcgcgagtaacgtgacactattcgatttggccgaccgcatgcagaagtgcgtcaacagctgtaagtcttctgctgaagtctgtcagttgctgggctcccagagacgcatatttagagccgggtccctgtgtaagcgtaaaagcccagaatgcgataaggacacttctatctgcacagacctggacggggtcgccttgtgccaatgcaagtctggctatttccagttcaataagatggaccatagttgtcgggcatgcgaagatggatatcgtctggagaacgagacatgcatgagttgccccttcggcctggggggcctcaactgcggcaacccctaccagttaattaccgtcgtcattgccgccgctggtggggggctgctgctgattctagggattgccctcatagtcacatgttgtagaaagaataagaacgatattagcaagctgatcttcaaaagcggcgattttcagatgtccccctatgcggaatatccaaaaaatcctcggtctcaagagtggggacgagaggccattgaaatgcacgagaacggtagcacaaagaacttacttcagatgactgacgtctactacagtcctacctccgtgcgtaatccagagttagaacggaatgggctttatcccgcctatactggactgcctggctcccgccacagttgcatctttccaggccagtacaacccctcctttatttctgatgagagtaggaggcgtgactacttctag

SEQ ID NO: 205430 - DNA, 9156 bp, Artificial Sequence
  derived and/or modified sequence
ccgctgcccgctgcccgctgccctcgccccgcgcgccgggcatgtgagcgcgggcgggcgccgtcaccatggcctcgccgcgcgcctcgcggtggccgccgccgctcctgctgctgttgctgccgctgctgctgctgccgccggcggcccccgggacgcgggacccgccgccttccccggctcgccgcgcgctgagcctggcgcccctcgcgggagcggggctggagctgcagctggagcgccgcccggagcgcgagccgccgcccacgccgccccgggagcgccgcgggcccgcgacccccggccccagctacagggcccctgagccaggcgccgcgacacagcggggaccctccggccgggcccccagaggcgggagcgcggatgctgcctggaaacattggccagaaagtaacactgaggcccatgtagaaaacatcaccttctatcagaatcaagaggacttttcaacagtgtcctccaaagagggcgtgatggttcagacctctgggaagagccatgctgcttcggatgctccagaaaacctcactctactcgctgaaacagcagatgctagaggaaggagcggctcttcaagtagaacaaacttcaccattttgcctgttgggtactcactggagatagcaacagctctgacttcccagagtggcaacttagcctcagaaagtcttcacctgccatccagcagttcagagttcgatgaaagaattgccgcttttcaaacaaagagtggaacagcctcggagatgggaacagagagggcgatggggctgtcagaagaatggactgtgcacagccaagaggccaccacttcggcttggagcccgtcctttcttcctgctttggagatgggagagctgaccacgccttctaggaagagaaattcctcaggaccagatctctcctggctgcatttctacaggacagcagcttcctctcctctcttagacctttcctcatcttctgaaagtacagagaagcttaacaactccactggcctccagagctcctcagtcagtcaaacaaagacaatgcatgttgccaccgtgttcactgatggtggcccgagaacgctgcgatctttgacggtcagtctgggacctgtgagcaagacagaaggcttccccaaggactccagaattgccacgacttcatcctcagtccttctttcaccctctgcagtggaatcgagaagaaacagtagagtaactgggaatccaggggatgaggaattcattgaaccatccacagaaaatgaatttggacttacgtctttgcgttggcaaaatgattccccaacctttggagaacatcagcttgccagcagctctgaggtgcaaaatggaagtcccatgtctcagactgagactgtgtctaggtcagtcgcacccatgagaggtggagagatcactgcacactggctcttgaccaacagcacaacatctgcagatgtgacaggaagctctgcttcatatcctgaaggtgtgaatgcttcagtgttgacccagttctcagactctactgtacagtctggaggaagtcacacagcattgggagataggagttattcagagtcttcatctacatcttcctcggaaagcttgaattcatcagcaccacgtggagaacgttcgatcgctgggattagctacggtcaagtgcgtggcacagctattgaacaaaggacttccagcgaccacacagaccacacctacctgtcatctactttcaccaaaggagaacgggcgttactgtccattacagataacagttcatcctcagacattgtggagagctcaacttcttatattaaaatctcaaactcttcacattcagagtattcctccttttttcatgctcagactgagagaagtaacatctcatcctatgacggggaatatgctcagccttctactgagtcgccagttctgcatacatccaaccttccgtcctacacacccaccattaatatgccgaacacttcggttgttctggacactgatgctgagtttgttagtgactcctcctcctcctcttcctcctcctcctcttcttcttcttcagggcctcctttgcctctgccctctgtgtcacaatcccaccatttattttcatcaattttaccatcaaccagggcctctgtgcatctactaaagtctacctctgatgcatccacaccatggtcttcctcaccatcacctttaccagtatccttaacgacatctacatctgccccactttctgtctcacaaacaaccttgccacagtcatcttctacccctgtcctgcccagggcaagggagactcctgtgacttcatttcagacatcaacaatgacatcattcatgacaatgctccatagtagtcaaactgcagaccttaagagccagagcaccccacaccaagagaaagtcattacagaatcaaagtcaccaagcctggtgtctctgcccacagagtccaccaaagctgtaacaacaaactctcctttgcctccatccttaacagagtcctccacagagcaaacccttccagccacaagcaccaacttagcacaaatgtctccaactttcacaactaccattctgaagacctctcagcctcttatgaccactcctggcaccctgtcaagcacagcatctctggtcactggccctatagccgtacagactacagctggaaaacagctctcgctgacccatcctgaaatactagttcctcaaatctcaacagaaggtggcatcagcacagaaaggaaccgagtgattgtggatgctaccactggattgatccctttgaccagtgtacccacatcagcaaaagaaatgaccacaaagcttggcgttacagcagagtacagcccagcttcacgttccctcggaacatctccttctccccaaaccacagttgtttccacggctgaagacttggctcccaaatctgccacctttgctgttcagagcagcacacagtcaccaacaacagtgtcctcttcagcctcagtcaacagctgtgctgtgaacccttgtcttcacaatggcgaatgcgtcgcagacaacaccagccgtggctaccactgcaggtgcccgccttcctggcaaggggatgattgcagtgtggatgtgaatgagtgcctgtcgaacccctgcccatccacagccatgtgcaacaatactcagggatcctttatctgcaaatgcccggttgggtaccagttggaaaaagggatatgcaatttggttagaaccttcgtgacagagtttaaattaaagagaacttttcttaatacaactgtggaaaaacattcagacctacaagaagttgaaaatgagatcaccaaaacgttaaatatgtgtttttcagcgttacctagttacatccgatctacagttcacgcctctagggagtccaacgcggtggtgatctcactgcaaacaaccttttccctggcctccaatgtgacgctatttgacctggctgataggatgcagaaatgtgtcaactcctgcaagtcctctgctgaggtctgccagctcttgggatctcagaggcggatctttagagcgggcagcttgtgcaagcggaagagtcccgaatgtgacaaagacacctccatctgcactgacctggacggcgttgccctgtgccagtgcaagtcgggatactttcagttcaacaagatggaccactcctgccgagcatgtgaagatggatataggcttgaaaatgaaacctgcatgagttgcccatttggccttggtggtctcaactgtggaaacccctatcagcttatcactgtggtgatcgcagccgcgggaggtgggctcctgctcatcctaggcatcgcactgattgttacctgttgcagaaagaataaaaatgacataagcaaactcatcttcaaaagtggagatttccaaatgtccccgtatgctgaataccccaaaaatcctcgctcacaagaatggggccgagaagctattgaaatgcatgagaatggaagtaccaaaaacctcctccagatgacggatgtgtactactcgcctacaagtgtaaggaatccagaacttgaacgaaacggactctacccggcctacactggactgccaggatcacggcattcttgcattttccccggacagtataacccgtctttcatcagtgatgaaagcagaagaagagactacttttaagtccaggagagagagggactcattgctctgagccagtcacctgggacctctgctcagaggaccgcaccaggaggctgcgcccaggatttgtcgggagccacgctgagtggcaagcaggaagagggacaggcatgcggggcgtgaccacagtggaggagacaggtggatgtggaaccacaggctgctcattcagcacctttgttgttactgtgaacgtgaatgtgggccagtatcaagagagtctctctgagtgactgcaccatggcactggcaccagggcgactattagccagggcagaccactagacttcagtgcagggacctggttttcccttcgtttgcactttagtaaattgggtgggaggtttccttttggatctgttttgagactgttccagaaagaaggcttcctttcccgagacacttccataggcagcaatttggtgattcatttgcagcaaaatactggcttgttaattattttcctgcccagcgcctgcgtgctaaacaacagatgaggatgagcgtaccactgaagtctgaagatgtcgccattgaacggacagtgttttcatatgtttctaggttgtcttatgctacagtttccaagccagcccccacagtgaggaaatgtgtgaggcaccgcacacaactgcaatgtgttttttaagtcaaggtgacacatgtatttaagattttttttttaaatctctttgcagttaaatctcactttttcaaacaagcctggatcagggcaaaacaacttatatttggttttagctggaggctcagcaggcagattgcaggcaggggggcacttttcatccatgagggcccagcctggggcctgggactcgatcaccattgtggaggccagaggcagctgcgtatggaggagaaatgtcaaactgaacgcaggtttcaccactctaggaaagcagcttgttgagcccctgcagctggatgtggttagagggatgggctgaataggcaggttagatttcctgcatcaacagtgctttgggaagctgtgtggattcctgaggaagaacagggagccgagatggagccacacatgagtttgctcaccggctactgcagcactttgtacccagaatctcatgtccacaaaccccatgtaaactttcaaccactcaaagctgtttattcggctgaagaaataacttttttttctcacccagtcatttgtacctcttcatatggctatgtcgcaccctccagaaacgtggttatacttccagtcagtgtgggagaactgaagacttccggttggtcgaggaactgagggttgaccttcgggaaggaagttccactcatcttatttattatgcctgtgatgtgggtcctgccagggagacatccagtactcggtgtctttaattgccacctggggaactgtgtttattggccttctttggggcatcctggttttggatgaagtgaggggaatacagaggtaaaagaattgtctccaccctgaagcggggagtcccgcttcacatttctggaaatggtgcagccactggggacagttctgccccgggcatggttgtttcttcaaggtcctctaaatataatccctattcttacataatccttggccctgatggttttaagcaagaactcctgtgtcccatggtctccaccactcaccatcaccctgctgtagcaagagtcctagtcaggggaggtgcattttagtagttacattgcacttatccatgagataaataaaaggagaactgtttttatcagtggaggctaacctaaaatttcaaagtgtcgcctttttgaaatcttgggcctctctctctgtagaaccaatggccctttgtggctcacggcctcgcacctaactggagagttctgagctcctgcagctcacctgagcccacagactaggcttcttggctccttccgcagcatgcctgctcacccccagaacccgcagctgtgggaagagccatgtagggaggctattcccaggcatacacttccactgccttcagctgacgtcacagctgacaaatcatctcctctatcggagccagaagacttcagctccacaaaatgaagtgttctgtcctgaaaacattcttgggaagaatcccaacatcgagaaaacggtgtcctgtgagttccaacaatgcttcttgttcatgggtttcttccgtatggagtggattaagagtgttttattttgttgttctaactgagaaaaaaaggaggcacccacaaggttgaggtcacacagtctccacagtttccaggaggcgtttgggggtggggaaggcacctccagagcatgaggctctaaggggacatgagtaaagcatgtctgtgacccagtgaggaagggagaggccagctgcactcctgcacggggttcctagctgcagaagggtcccgcctaggccgaggggaaacacctgatagcagaagaggcctggatgcacacctggcacgccgaggctctccgcccagacacagtgctccatgtcagcccctgcacctggggtgtgtgattcacgtgcacagatgccacaatcctgcaccaatatcccacagatgggggaaggtgagaggaaggggcaagtgatgtgtaactgctcaagagatgcttaaacctccatagagaggagccgggcgcaggggcatctgtgtgtcccgtcacacactgcagcagggaagggtggctggctggctccctggcatcagtggtttggtttaagctccagagggtcttattgccattgtcttttcctctgccccttgagccagcctaaggccctggagtctgtttctttaggcggatgaactgacatgctcctaccatgaccaggctctgggcaaggctcctcacagtatccttgagaggtgggcatggaagtgcccatttctcaggtacagaaaccttcagagaggataaatagcttgccctgtagaagcaggactgaaacccttgtctgcctgactcccccagctactctgcccactgtagccccctgccttactgtcctggcacacccctcaccatcctgtataccttaaatatcaaagagggcaagagagaaagggctttaaagataagttatttttttaaggaaccttaatattatttttaagaagtaaccaaattagtgacgtgaaatgcaaaaaaaaaaaaaaaaaaatgctgactacccttttgaaaatgtgctttcagattgttttttatatgtaattcttagacacttgtcattaagaaaatagtggctggcttgtgctcagcaagaagcacactggcacgtggctttggtataggaagtggaaggcaaggacctgggtttctgacaagtgcagtcagacatacacatccatctgagagctgcttgccttgttcccgtggtaaggccatggctcccacatactggaagcatatttttgtgaactgttttcagaattgggaacatattcagtggaatgtcttaaacgctgacacatcttcctcctttgaggggaagtatattttcagaagcagctaagacatttagagccaaaattgctgataggtggttcagtcaagttggctgatggcatctgaggtcaaaaactaagatgtgacgattgagttcttaaagaggtaactcttaaagtgggcccaagggagaaggcagcatctttggactcctaggctggatggctacccaagaatatgccattgaaggatgacacctattcagatgtgaaagttcccagagcaggcacctttgggtcacccaccacgtgtggctttttggtgcctgcatgaaactgtgttgccccctggtgagatgcccgggtgtcctgtaagccgatttaactctgcctgaggaagaggagctgtccactccagttgcccttggctaagtttagcctaacacacagggttttgacccatagttctaaaatacacaaattttgagactacagcacttctttggaaagaggaagaatgcaaagttcagtatttcaatactttgtattttacttgaaattacccttagtagcatcttttttttcctgtctgaaagcttttgtgtggatgagaagggacatttcatttcctcccttaacaaagtgtcattctgaggttctcatgtgtgtttttggaaatagagatactggttttgtagagtttgcctttgggtatgttttctttttttcttaaatctccaaggaagagaactgactaaaatagtaggaacatgaaagtattaaatgccaattaatttgttgtagtaaagtatcttcattagcgttatactccatcatatctggtgtaaactgctcacagaaaaccctatgaaaccaaagggggaccattcaggtctaaaaagcgacaggtccgagactgggtctgtcacctgggcattttcaaagaggacattttgaagaatttgcatattcagatttttaaaatgcacttaacatacttcattacagatttcttgggtagggaggatgggataggccagggatgggatggagtcagttctgcctgggaaactaatccgaatcatttacctttctgtattaaccttggcctgtcctaaaaagagaacgactgtttcatcatgagttgctctgagttttgttaatgtttgtgttggtggattgacggttaaatgaagcatttagctggaatatgaactttgggagttttcatgttgtcctggatttctctttgtaaacctttaaaccttagcccctggttgattgtgttaaacccattatgagaatgttatttaaagttgtattataattgcaacctccactaattattcagtactgtagcagcaaagtattatttgtaagaatttggttatttttatacttatatccactctaagtctggcgttctagtcagtaaaatgatgcaataaaattaatatcattttca

SEQ ID NO: 205431 - DNA, 4146 bp, Artificial Sequence
  derived and/or modified sequence
atggccagcccccgggccagccgctggcccccacccctgctgctgctgctgctgcccctgctgctgctgcccccagctgcccctggcacccgggaccccccacccagccctgcccggcgggccctgagcctggcccccctggccggggccggcctggagctgcagctggagcggcggcctgagcgggagcccccacccaccccaccccgggagcggcggggccctgccaccccaggccccagctaccgggcccctgagcctggagctgccacccagaggggccccagcggccgggccccccggggcggcagcgcagatgctgcctggaagcactggccagagagcaacacagaggcccacgtggagaacatcaccttctaccagaaccaggaggacttcagcacagtgagcagcaaggagggcgtgatggtgcagaccagcggcaagagccacgccgccagtgatgcccctgagaacctgaccctgctggccgagacagcagatgcccggggccgcagcggcagcagcagcaggaccaacttcaccatcctgcctgtgggctacagcctggagatcgccacagccctgaccagccagagcggcaacctggccagcgagagcctgcacctgcccagcagcagcagcgagtttgatgaaagaattgctgccttccagaccaagagcggcacagccagcgagatgggcacagagcgggccatgggcctgtctgaggagtggacagtgcacagccaggaggccaccaccagcgcctggagccccagcttcctgcctgccctggagatgggagagctgaccacccccagcaggaagaggaacagcagcggccctgacctgtcctggctgcacttctacagaacagctgccagcagccccctgctggacctgagcagcagcagcgagagcacagagaagctgaacaacagcacaggcctgcagagcagctctgtgtcccagaccaagaccatgcacgtggccaccgtcttcacagatggcggccccaggaccctgcggagcctgactgtgtccctgggccctgtgtccaagacagagggcttccccaaggacagcagaattgccaccaccagcagctctgtgctgctgagccccagcgctgtggagagcagaagaaacagccgggtgacaggcaaccctggagatgaggagttcatcgagcccagcacagaaaatgaatttggcctgaccagcctgcgctggcagaatgacagccccacctttggagagcaccagctggccagcagcagcgaggtgcagaatggcagccccatgagccagacagaaacagtgagccgctctgtggcccccatgagaggaggagagatcacagcccactggctgctgaccaacagcaccaccagcgcagatgtgacaggcagcagcgccagctacccagagggcgtgaatgcctctgtgctgacccagttcagtgacagcacagtgcagagcggcggcagccacacagccctgggggacaggagctacagcgagagcagcagcaccagcagcagcgagagcctgaacagcagcgcccccagaggagagaggagcattgctggcatctcctatggccaggtgcggggcacagccatcgagcagaggaccagcagtgaccacacagaccacacctacctgagcagcaccttcaccaagggggagcgggccctgctgagcatcacagacaacagcagcagcagtgacatcgtggagagcagcaccagctacatcaagatcagcaacagcagccacagcgagtacagcagcttcttccacgcccagacagagaggagcaacatcagcagctatgatggagaatatgcccagcccagcacagagagccctgtgctgcacaccagcaacctgcccagctacacccccaccatcaacatgcccaacacctctgtggtgctggacacagatgctgagtttgtgtctgacagcagcagcagcagcagcagcagcagcagcagcagcagcagcggcccccccctgcccctgcccagcgtgtcccagagccaccacctgttcagcagcatcctgcccagcacccgggcctctgtgcacctgctgaagagcaccagtgatgccagcaccccctggagcagcagccccagccccctgcctgtgtccctgaccaccagcaccagcgcccccctgtctgtgtcccagaccaccctgccccagagcagcagcacccctgtgctgccccgggcccgggagacccctgtgaccagcttccagaccagcaccatgaccagcttcatgaccatgctgcacagcagccagacagctgacctgaagagccagagcaccccccaccaggagaaggtgatcacagagagcaagagccccagcctggtgtccctgcccacagagagcaccaaggctgtgaccaccaacagccccctgccccccagcctgacagagagcagcacagagcagaccctgcctgccaccagcaccaacctggcccagatgagccccaccttcaccaccaccatcctgaagaccagccagcccctgatgaccaccccaggcaccctgagcagcacagccagcctggtgacaggccccatcgctgtgcagaccacagctgggaagcagctgagcctgacccaccctgagatcctggtgccccagatcagcacagaaggaggcatcagcacagaaagaaacagagtgattgtggatgccaccaccggcctcatccccctgacctctgtgcccaccagcgccaaggagatgaccaccaagctgggcgtgacagctgagtacagccctgccagccgcagcctgggcaccagccccagcccccagaccaccgtggtgtccacagctgaggacctggcccccaagagcgccacctttgctgtgcagagcagcacccagagccccaccaccgtgagcagcagcgcctctgtgaacagctgtgctgtgaacccctgcctgcacaatggagaatgtgtggccgacaacaccagccggggctaccactgccgctgcccccccagctggcagggagatgactgcagcgtggatgtgaatgaatgtctgagcaacccctgccccagcacagccatgtgcaacaacacccagggcagcttcatctgcaagtgccctgtgggctaccagctggagaagggcatctgcaacctggtgaggacctttgtgacagagttcaagctgaagaggaccttcctgaacaccaccgtggagaagcacagcgacctgcaggaggtggagaatgagatcaccaagaccctgaacatgtgcttcagcgccctgcccagctacatccgcagcacagtgcacgccagccgggagagcaatgctgtggtgatcagcctgcagaccaccttcagcctggccagcaatgtgaccctgtttgacctggccgacaggatgcagaagtgtgtgaacagctgcaagagcagcgctgaggtgtgccagctgctgggcagccagaggcgcatcttccgggccggcagcctgtgcaagaggaagagcccagaatgtgacaaggacaccagcatctgcacagacctggatggagtggccctgtgccagtgcaagagcggctacttccagttcaacaagatggaccacagctgccgggcctgtgaagatggctaccgcctggagaatgagacctgcatgagctgccccttcggcctgggcggcctgaactgtggcaacccctaccagctgatcaccgtggtgattgctgctgctgggggcggcctgctgctgatcctgggcatcgccctgattgtgacctgctgcaggaagaacaagaatgacatcagcaagctgatcttcaagagcggggacttccagatgagcccctatgcagagtaccccaagaaccccaggagccaggagtggggccgggaggccatcgagatgcatgaaaatggcagcaccaagaacctgctgcagatgacagatgtgtactacagccccacctctgtgagaaatcctgagctggagagaaatggcctgtacccagcctacacaggcctgcccggcagccgccacagctgcatcttccctggccagtacaaccccagcttcatcagtgatgagagcagaagaagagactacttctag

SEQ ID NO: 205432 - DNA, 4146 bp, Artificial Sequence
  derived and/or modified sequence
atggccagcccccgggccagccggtggcccccccccctgctgctgttactcctcccattgcttctgcttcctcctgccgcccccggtacccgcgacccccccccttcgcccgcacgccgtgctctttctctcgcgccgctggccggcgcagggctcgaactgcaactcgagcggagacccgaacgagaacctccaccgactccacctcgggaaagacgtgggcctgcaactcctggcccttcctacagggctccagaacctggggccgcaacacaacgcggcccatcaggaagggcaccgcgcggaggctccgccgatgcagcatggaaacactggccggaatcaaataccgaagcacatgtagagaatatcacattttatcagaatcaggaagatttctccaccgtgagtagtaaagagggcgtgatggtacagacttctggcaagagtcatgccgcatccgacgctcccgaaaaccttaccctgctggccgagaccgcggacgcgaggggcagatccgggtcctcctctaggacaaactttaccatcctccccgtaggatacagtttggaaattgctactgctttgacttctcaaagcggaaacttagctagtgagagcctgcacctgcccagtagtagttccgaattcgatgagcgaattgcagcctttcagacgaagtccgggacagcctcagaaatgggcacagagagggctatgggcttgtccgaggaatggaccgtacactcccaggaggccactacaagtgcctggtccccaagcttcctgcctgccctagagatgggagaactgaccaccccatcgagaaagcgaaactcttctggacctgacctgagctggctgcacttctatagaactgccgccagcagtccattactggatctttcttccagctccgaatctacagagaaactgaacaatagcacaggtctgcagagcagcagcgtcagccagacaaaaaccatgcatgtggctaccgtcttcactgatggcgggccccgaaccctgaggtctctgacagtgagtcttgggcccgtgtccaaaaccgaagggttccctaaagactccagaattgccaccacatcctcatctgtgctcttgagccccagcgcggtggagtcgcggagaaactcccgcgtgacgggcaatccaggggatgaggagtttatcgagcccagcacagaaaatgagttcggccttaccagcttgagatggcaaaacgactcccccacttttggcgagcaccagctcgcatcctctagcgaggtgcaaaatggttctcccatgagccagactgaaaccgtctcccggagtgttgcccccatgcgtgggggagagatcacagcacactggcttctgactaattccaccacttccgccgatgtgactggctcctctgctagctatcctgaaggagtcaacgcttcagtactcacgcagttcagcgattccaccgtgcagtctggcggttcccatacggctcttggggataggagctactctgagtcttcctcaacatcaagctccgagagtctgaattcctccgccccccggggcgagcggtcgattgccggtatttcgtatgggcaggttcgaggcaccgccatagagcaaaggaccagcagtgaccacacagaccacacctacctgagcagtacgtttaccaaaggcgagagggctttgctatctatcaccgataattccagcagcagcgacatcgttgaatcctcgacgagttacattaagatttctaatagctcgcactctgagtactcttcgtttttccacgcacaaaccgaacgatccaacatatcctcttacgacggggaatatgcccagcccagcacggaatcacccgtcctgcacacgtccaatttgccctcatatacacccaccattaatatgcctaacacttccgtcgtcctagatacagatgcagaatttgtgtctgactcatccagttccagctccagttcaagcagcagcagttccagtggaccacccctgccacttccttctgtgtcccagagccatcatcttttctcaagtatcctaccatctactcgggcttcggtgcatctgctaaagtcaacatccgacgcatcgacgccttggtccagcagcccttctcctctgcccgttagcctcactactagtaccagcgctccactttctgtatcacagacaactctgccccagtcaagtagcacccctgttctcccacgggcaagggagactcctgtgacctctttccagacgagcacaatgacatctttcatgactatgcttcacagctcccagactgctgatctgaagtcccaaagtactcctcaccaggagaaggtgattactgagtcaaaaagtcctagtcttgtgtcgctccccaccgagagcaccaaagcagttaccactaatagcccattacccccaagccttacggagtcctctacggagcagaccctgcccgcaactagcactaatcttgcgcagatgagtcccacattcaccactactatcctaaaaacatctcagccattaatgacaaccccgggcactctgtctagtacagcaagtctggtcaccgggcctattgctgtccaaacaacggcgggcaagcagttaagcctcacgcacccagaaattttagtcccacaaatatccactgagggaggtatttcgacggagagaaatagagtcatcgtggatgccacaactggtcttatacccctgactagcgttcccacaagtgctaaagagatgacgactaaactcggagtcaccgcagagtattcgcccgcgagccgctctctgggcacgtcacctagtccacaaaccacggttgtgagtacggccgaagacctggcccccaagagcgccacttttgccgttcagtccagtacccagtcgcccacaacagtgtcgagcagcgcttccgtgaattcctgcgctgtaaacccttgtttgcacaacggtgaatgcgtagccgacaacaccagcagaggctatcattgtaggtgcccaccatcctggcagggcgatgactgttctgtggatgtcaatgagtgtttatccaacccctgtccctcgactgccatgtgtaataatacccagggctccttcatttgcaagtgcccagtcggataccaactggagaaggggatctgtaatctggttagaacgttcgtgaccgagttcaagctcaaaaggacctttctcaacaccaccgtggaaaagcacagcgacttgcaggaagtggaaaacgaaattaccaagacactcaacatgtgcttttccgcactcccctcttatatacgctccaccgtgcacgcttcaagggaaagcaatgccgttgtgataagtctgcaaactacgttcagcctcgcctctaatgtcaccctgttcgatcttgctgatcgaatgcagaaatgcgtgaattcttgcaaatcaagcgctgaagtgtgtcagctcctgggctctcagcgcaggatcttccgcgcaggatctttgtgtaaacgaaagtcacctgaatgtgacaaggacacctctatctgtacagaccttgatggtgtggccttatgtcaatgtaagtcgggttactttcagtttaataaaatggaccactcttgtagagcttgtgaagatgggtaccgactggaaaacgaaacttgtatgtcttgccctttcggtcttggcggcctcaattgtggcaatccctaccagctcattaccgtggtgattgcagccgcaggggggggcctgctccttatcctgggcattgctctgatagtgacatgttgtaggaagaacaagaatgacatctctaaactcatcttcaaatccggcgatttccaaatgtctccatacgctgagtatcccaagaacccaagaagccaggagtgggggagggaggcgatcgagatgcacgagaacggttccacaaaaaatcttcttcagatgactgatgtgtactacagcccaacttctgttcgtaaccctgagctggaacggaatggactgtatccagcctacactggattgcctggatcacgccattcttgcatcttccctggacagtataatcctagtttcattagcgatgagtctaggcgacgagactatttctag

SEQ ID NO: 205433 - DNA, 4146 bp, Artificial Sequence
  derived and/or modified sequence
atggcttctccccgtgcttcacgctggcctcccccactgctcctactgttgctgcctcttctgcttctcccgcctgctgcaccgggtacccgcgacccccctccttctcctgccaggcgcgctttatccctggccccactcgccggtgcaggtctcgagctccagctggagcgtcgccctgaaagagagccacctcctacccccccaagagagaggcgcggtcccgctaccccaggcccttcgtaccgagcccctgaacccggtgcggcaacccagcggggacccagcggtagggccccacgcggtggaagcgcggacgccgcatggaagcactggcctgagagtaacacagaggcacatgtagagaacatcacattctatcagaaccaggaggacttcagtaccgtctcgtctaaagagggggtaatggtgcagacgagtgggaaaagccatgcggcatccgatgcgcctgagaatttaacactcctggccgagaccgccgatgccaggggaagatcgggaagctcatctcggactaattttacaattctgccagtaggttactctctagaaatcgccactgctttgacatcccagtctggcaatcttgccagcgagagccttcacctgccgtcatcaagctcagagttcgacgaaaggattgcagcttttcagaccaagtctggcaccgcctcggagatgggcaccgagagggcgatgggactaagtgaagagtggaccgtgcacagccaagaagccacaacttccgcttggtccccctcttttttacccgcactagagatgggggaacttaccacaccatccaggaaacgcaattcgtccggtcccgatctgagctggctgcacttctatcggaccgctgcgtctagccctcttctggacctctccagcagcagcgagtctacggagaagctcaacaattcaaccggactccagtctagtagcgtttcacagacaaagaccatgcacgtggctaccgtctttaccgacgggggacctcgaactttgcggtcattgactgtctccctcggacctgtgtccaaaacagagggattccccaaagactccaggattgcaacaaccagctcttccgtgctccttagccccagcgccgtggaaagccgcaggaacagtcgagttaccgggaaccctggcgacgaagagtttatagagccaagcacagaaaacgaatttggactcacatcgctccggtggcagaacgactctcccacttttggagaacaccaactggcgtcatcctctgaggtccagaacggcagccccatgtcacagactgaaaccgtcagtaggagcgtggctcccatgcgtggtggcgaaatcacggcccattggctgctgacaaatagcacaacatcagctgatgtgaccggaagttcagcctcctaccccgagggggtgaatgcgagcgtcctcacccaattttcagactcaacagtgcagtcaggtgggtctcacacagcactgggcgatcgatcatacagtgaatctagctccacctcctcctcggaaagtctcaacagttccgccccacggggagagagaagcatcgccggaatcagttacggccaggtgcggggtactgcaatagagcagcggaccagctctgaccacaccgaccacacatacttgtcctcgaccttcaccaagggagagagggctctcctctcaattacggacaattcatcgtctagtgacatagtagagtcctcgacttcttatattaagatttccaattccagccactccgagtattcttcgtttttccatgcgcagactgaacgatcaaacattagctcttatgatggggagtacgctcaacccagcaccgagtcacctgtgctccatactagcaacctcccatcatatactccaaccataaacatgccaaatacatcagtggttttggacacagatgctgagttcgtgtctgactcctcatcctcttcgtcaagttcgtcctccagttcaagcagcggaccccctctccccctgcccagtgtgtcccagtctcaccacctgttctctagtattcttccttccactcgggcttcggttcacctgttgaagagcacctcagacgcttctaccccctggtcaagtagtccatccccgctgccagtgagcttgactactagtacatctgcgccactctccgtatcccaaacaaccctgccacaaagttcatccactccagttctgcctcgggctagggagaccccagtgacttctttccagaccagtacgatgacctcctttatgaccatgctgcacagcagccaaactgccgacctgaagagccagagcaccccccaccaggaaaaagttattacggaatccaagagtcccagcttagtttcactgcccacggaatccacaaaagcagtcactaccaacagtcccctacctccctcgctgaccgagagctccaccgaacagactttgcccgctacttctaccaacctggcccagatgtcaccgacttttactacaaccattctgaagacctctcagccactgatgaccacgcccggaactctctcttcaaccgccagtttggtgactggcccaatcgctgtgcagacaacagcaggtaagcagctctccctcacccacccggagatcctcgtcccacaaatctctacagagggcggtatcagtacagaaagaaacagagtgatagttgatgcaactacgggattgattcccttgacttccgtgcccacatcagctaaggagatgacaaccaaacttggcgtcacagccgagtacagccctgcaagccggtcactaggcacatccccgagcccacaaacaactgtggtgtccaccgccgaggacctggctcctaagtctgccacatttgccgtccagagttctacccaaagtcctacaactgtctccagctctgcttcagttaattcctgcgctgtcaacccttgtctccataacggtgagtgcgtggctgataatacctctagagggtatcactgcaggtgtccgcctagctggcaaggggacgactgcagtgtggatgtgaacgagtgtctgtctaacccttgtccgagcaccgccatgtgcaacaacacccagggctccttcatttgcaagtgtcccgtgggctaccagctcgaaaaaggcatttgcaatctcgtgcgcacctttgtcaccgagttcaaactgaagcggacttttctgaacacaaccgtggagaagcattctgatctacaagaggtggagaatgaaatcactaagacattgaatatgtgcttctccgcgcttcctagttacattcggtctaccgtgcatgcctcgcgggaatccaacgccgtggtgatctcactgcagacaacattctcactcgcatctaatgtgaccctgttcgacttggcggacagaatgcagaaatgtgttaacagctgcaagagcagtgctgaggtgtgccagctattgggatctcagaggaggattttcagggcaggaagtctgtgcaaaagaaaaagcccagaatgtgacaaggatacatccatttgcacggatttagacggcgtcgcactttgccagtgcaaatcaggatatttccagttcaataaaatggaccacagttgtcgcgcttgcgaagacgggtacagactagagaacgaaacttgcatgtcctgcccgtttggcttagggggactgaactgtgggaatccctatcagctaattacagtcgttattgctgcggctggcggaggcctgctcttaatcctcggcatcgctctaattgtgacatgctgtaggaaaaacaagaatgacatttccaagctgattttcaagagtggagacttccagatgtctccctacgctgaatatcctaaaaaccctcgcagccaggaatgggggcgagaggccattgaaatgcacgagaacggcagcaccaaaaatctgcttcagatgaccgacgtgtactattcacctactagcgttcgcaatccggagcttgagaggaacgggctgtacccggcttataccggtttgcctggatcaaggcactcttgcatctttccaggtcaatacaatccgagcttcatttccgatgagtccaggagacgggactatttctag

SEQ ID NO: 205434 - DNA, 4146 bp, Artificial Sequence
  derived and/or modified sequence
atggccagccccagagccagcagatggcccccccccctgctgctgctgctgctgcccctgctgctgctgccccccgccgcccccggcaccagagaccccccccccagccccgccagaagagccctgagcctggcccccctggccggcgccggcctggagctgcagctggagagaagacccgagagagagcccccccccaccccccccagagagagaagaggccccgccacccccggccccagctacagagcccccgagcccggcgccgccacccagagaggccccagcggcagagcccccagaggcggcagcgccgacgccgcctggaagcactggcccgagagcaacaccgaggcccacgtggagaacatcaccttctaccagaaccaggaggacttcagcaccgtgagcagcaaggagggcgtgatggtgcagaccagcggcaagagccacgccgccagcgacgcccccgagaacctgaccctgctggccgagaccgccgacgccagaggcagaagcggcagcagcagcagaaccaacttcaccatcctgcccgtgggctacagcctggagatcgccaccgccctgaccagccagagcggcaacctggccagcgagagcctgcacctgcccagcagcagcagcgagttcgacgagagaatcgccgccttccagaccaagagcggcaccgccagcgagatgggcaccgagagagccatgggcctgagcgaggagtggaccgtgcacagccaggaggccaccaccagcgcctggagccccagcttcctgcccgccctggagatgggcgagctgaccacccccagcagaaagagaaacagcagcggccccgacctgagctggctgcacttctacagaaccgccgccagcagccccctgctggacctgagcagcagcagcgagagcaccgagaagctgaacaacagcaccggcctgcagagcagcagcgtgagccagaccaagaccatgcacgtggccaccgtgttcaccgacggcggccccagaaccctgagaagcctgaccgtgagcctgggccccgtgagcaagaccgagggcttccccaaggacagcagaatcgccaccaccagcagcagcgtgctgctgagccccagcgccgtggagagcagaagaaacagcagagtgaccggcaaccccggcgacgaggagttcatcgagcccagcaccgagaacgagttcggcctgaccagcctgagatggcagaacgacagccccaccttcggcgagcaccagctggccagcagcagcgaggtgcagaacggcagccccatgagccagaccgagaccgtgagcagaagcgtggcccccatgagaggcggcgagatcaccgcccactggctgctgaccaacagcaccaccagcgccgacgtgaccggcagcagcgccagctaccccgagggcgtgaacgccagcgtgctgacccagttcagcgacagcaccgtgcagagcggcggcagccacaccgccctgggcgacagaagctacagcgagagcagcagcaccagcagcagcgagagcctgaacagcagcgcccccagaggcgagagaagcatcgccggcatcagctacggccaggtgagaggcaccgccatcgagcagagaaccagcagcgaccacaccgaccacacctacctgagcagcaccttcaccaagggcgagagagccctgctgagcatcaccgacaacagcagcagcagcgacatcgtggagagcagcaccagctacatcaagatcagcaacagcagccacagcgagtacagcagcttcttccacgcccagaccgagagaagcaacatcagcagctacgacggcgagtacgcccagcccagcaccgagagccccgtgctgcacaccagcaacctgcccagctacacccccaccatcaacatgcccaacaccagcgtggtgctggacaccgacgccgagttcgtgagcgacagcagcagcagcagcagcagcagcagcagcagcagcagcagcggcccccccctgcccctgcccagcgtgagccagagccaccacctgttcagcagcatcctgcccagcaccagagccagcgtgcacctgctgaagagcaccagcgacgccagcaccccctggagcagcagccccagccccctgcccgtgagcctgaccaccagcaccagcgcccccctgagcgtgagccagaccaccctgccccagagcagcagcacccccgtgctgcccagagccagagagacccccgtgaccagcttccagaccagcaccatgaccagcttcatgaccatgctgcacagcagccagaccgccgacctgaagagccagagcaccccccaccaggagaaggtgatcaccgagagcaagagccccagcctggtgagcctgcccaccgagagcaccaaggccgtgaccaccaacagccccctgccccccagcctgaccgagagcagcaccgagcagaccctgcccgccaccagcaccaacctggcccagatgagccccaccttcaccaccaccatcctgaagaccagccagcccctgatgaccacccccggcaccctgagcagcaccgccagcctggtgaccggccccatcgccgtgcagaccaccgccggcaagcagctgagcctgacccaccccgagatcctggtgccccagatcagcaccgagggcggcatcagcaccgagagaaacagagtgatcgtggacgccaccaccggcctgatccccctgaccagcgtgcccaccagcgccaaggagatgaccaccaagctgggcgtgaccgccgagtacagccccgccagcagaagcctgggcaccagccccagcccccagaccaccgtggtgagcaccgccgaggacctggcccccaagagcgccaccttcgccgtgcagagcagcacccagagccccaccaccgtgagcagcagcgccagcgtgaacagctgcgccgtgaacccctgcctgcacaacggcgagtgcgtggccgacaacaccagcagaggctaccactgcagatgcccccccagctggcagggcgacgactgcagcgtggacgtgaacgagtgcctgagcaacccctgccccagcaccgccatgtgcaacaacacccagggcagcttcatctgcaagtgccccgtgggctaccagctggagaagggcatctgcaacctggtgagaaccttcgtgaccgagttcaagctgaagagaaccttcctgaacaccaccgtggagaagcacagcgacctgcaggaggtggagaacgagatcaccaagaccctgaacatgtgcttcagcgccctgcccagctacatcagaagcaccgtgcacgccagcagagagagcaacgccgtggtgatcagcctgcagaccaccttcagcctggccagcaacgtgaccctgttcgacctggccgacagaatgcagaagtgcgtgaacagctgcaagagcagcgccgaggtgtgccagctgctgggcagccagagaagaatcttcagagccggcagcctgtgcaagagaaagagccccgagtgcgacaaggacaccagcatctgcaccgacctggacggcgtggccctgtgccagtgcaagagcggctacttccagttcaacaagatggaccacagctgcagagcctgcgaggacggctacagactggagaacgagacctgcatgagctgccccttcggcctgggcggcctgaactgcggcaacccctaccagctgatcaccgtggtgatcgccgccgccggcggcggcctgctgctgatcctgggcatcgccctgatcgtgacctgctgcagaaagaacaagaacgacatcagcaagctgatcttcaagagcggcgacttccagatgagcccctacgccgagtaccccaagaaccccagaagccaggagtggggcagagaggccatcgagatgcacgagaacggcagcaccaagaacctgctgcagatgaccgacgtgtactacagccccaccagcgtgagaaaccccgagctggagagaaacggcctgtaccccgcctacaccggcctgcccggcagcagacacagctgcatcttccccggccagtacaaccccagcttcatcagcgacgagagcagaagaagagactacttctag

SEQ ID NO: 205435 - protein, 789 aa, Artificial Sequence
  derived and/or modified sequence
METLLGGLLAFGMAFAVVDACPKYCVCQNLSESLGTLCPSKGLLFVPPDIDRRTVELRLGGNFIIHISRQDFANMTGLVDLTLSRNTISHIQPFSFLDLESLRSLHLDSNRLPSLGEDTLRGLVNLQHLIVNNNQLGGIADEAFEDFLLTLEDLDLSYNNLHGLPWDSVRRMVNLHQLSLDHNLLDHIAEGTFADLQKLARLDLTSNRLQKLPPDPIFARSQASALTATPFAPPLSFSFGGNPLHCNCELLWLRRLERDDDLETCGSPGGLKGRYFWHVREEEFVCEPPLITQHTHKLLVLEGQAATLKCKAIGDPSPLIHWVAPDDRLVGNSSRTAVYDNGTLDIFITTSQDSGAFTCIAANAAGEATAMVEVSIVQLPHLSNSTSRTAPPKSRLSDITGSSKTSRGGGGSGGGEPPKSPPERAVLVSEVTTTSALVKWSVSKSAPRVKMYQLQYNCSDDEVLIYRMIPASNKAFVVNNLVSGTGYDLCVLAMWDDTATTLTATNIVGCAQFFTKADYPQCQSMHSQILGGTMILVIGGIIVATLLVFIVILMVRYKVCNHEAPSKMAAAVSNVYSQTNGAQPPPPSSAPAGAPPQGPPKVVVRNELLDFTASLARASDSSSSSSLGSGEAAGLGRAPWRIPPSAPRPKPSLDRLMGAFASLDLKSQRKEELLDSRTPAGRGAGTSARGHHSDREPLLGPPAARARSLLPLPLEGKAKRSHSFDMGDFAAAAAGGVVPGGYSPPRKVSNIWTKRSLSVNGMLLPFEESDLVGARGTFGSSEWVMESTV

SEQ ID NO: 205436 - DNA, 2370 bp, Artificial Sequence
  derived and/or modified sequence
atggagacactgctgggcggcttgctcgcctttggtatggcttttgccgttgtggatgcctgcccaaagtactgcgtttgccagaacctctccgagtctcttggcaccctgtgcccatctaaagggctgttgtttgtccctccagacatagaccgtaggaccgtcgagctgaggctgggaggaaacttcatcatccacatttcacggcaggatttcgcaaatatgactggcctggttgacttgacactgagtcggaatacaatcagccacatccagccattctctttcctggacctagagagccttcggtccctgcatttagactccaatagactgccgagtctcggagaagacacactgcgggggctggtgaaccttcaacacctgattgtcaataataaccaattagggggcatcgccgatgaggcctttgaagacttcttacttacattagaagacctggacctgagttataataatcttcacggtctcccctgggacagcgtccgcaggatggtgaacctccaccagctgtctcttgaccacaacttgctggatcacattgctgaaggcacgttcgccgatcttcagaaactggcaaggttagacctgacctctaatcggctgcaaaaactccctccagatccaatctttgcaagaagtcaggcatccgcgctgacagcgacgcctttcgccccccccctgtcattttcttttggaggcaatcccctgcattgcaattgcgaactcctgtggcttaggaggctcgaacgagacgacgatcttgagacatgtggttcacccggcgggttgaaaggacgctacttttggcacgtgagggaggaggaatttgtgtgcgaaccacccctgatcactcagcacacacacaaactgctggtgctggagggtcaggctgccacactgaaatgcaaggcaatcggtgacccatccccgttaattcactgggtcgctcccgatgaccgcctggttggaaatagcagtcgaacagccgtgtatgacaatggcaccttggacatatttattaccacttcccaggactctggcgcgttcacatgtattgccgcgaatgccgcaggggaggctacagccatggtcgaggtttctattgtccagttaccgcatctctccaatagcacatcgaggactgctcctcccaagtcacgccttagcgacataacaggatcctccaagaccagcaggggaggtggggggagcggcgggggggagccgcctaagagtccacctgagcgggcagtccttgtatccgaggtgactactacttcagctttagtcaaatggagcgtgagcaagtctgctcccagagtaaaaatgtaccaactgcaatacaactgttccgacgacgaggtgctgatttataggatgatcccggccagcaataaggcatttgtggtaaacaaccttgttagtggaacaggatacgacctttgcgtcctcgccatgtgggacgacacggctaccactctgactgctactaatattgtaggttgcgcccagttttttaccaaggccgattatccccagtgccagagcatgcatagccagattctgggggggacaatgatactggttattggcggcattatcgtggccacattactggtattcatagttatacttatggtgcgctacaaggtctgcaaccatgaggctccctccaagatggctgcggcagtgtcaaacgtctactcccaaactaacggcgcccagcctcctccaccgtccagtgcccccgccggtgctcccccacagggcccgccaaaggtggtggtgcggaatgagctccttgacttcactgcatctctggctagagcttcagactcctcgtccagttcgtctttgggatctggtgaggctgctggcctggggagggccccgtggcgtatccctccatctgcccctaggccaaagccgtccctcgaccgactcatgggggctttcgcctccctcgaccttaagtcccagcggaaagaggagctgctggatagtaggacacctgctggcaggggagccgggacctccgcccgcggccatcattcagatagggagccgctgctggggccgcccgccgctcgggcccggagcttgctgccactacccttagaaggcaaggctaagcggtcccatagctttgacatgggggattttgccgcggccgcagcgggtggcgtagttcctggcgggtacagtcctccacgaaaggtctccaacatctggaccaagaggtccctcagcgtgaatggtatgctgctgccatttgaagagtcagacctagtgggggcaagaggcaccttcggaagcagtgagtgggtcatggaatcaactgtgtag

SEQ ID NO: 205437 - DNA, 2370 bp, Artificial Sequence
  derived and/or modified sequence
atggagaccctgctgggcggcctgctggccttcggcatggcctttgctgtggtggatgcctgccccaagtactgtgtgtgccagaacctgtctgagagcctgggcaccctgtgccccagcaagggcctgctgtttgtgcccccagacatcgacagaagaacagtggagctgcggctgggcggcaacttcatcatccacatcagccggcaggactttgccaacatgacaggcctggtggacctgaccctgagcaggaacaccatcagccacatccagcccttctccttcctggacctggagagcctgcggagcctgcacctggacagcaaccggctgcccagcctgggggaggacaccctgcggggcctggtgaacctgcagcacctgattgtgaacaacaaccagctgggcggcattgctgatgaggcctttgaggacttcctgctgaccctggaggacctggacctgagctacaacaacctgcacggcctgccctgggacagcgtgcggaggatggtgaacctgcaccagctgagcctggaccacaacctgctggaccacatcgccgagggcacctttgctgacctgcagaagctggcccggctggacctgaccagcaaccggctgcagaagctgcccccagaccccatctttgcccggagccaggccagcgccctgacagccaccccatttgccccacccctgtccttctcctttggaggcaaccccctgcactgcaactgtgagctgctgtggctgcggcggctggagagagatgatgacctggagacctgtggcagccctgggggcctgaagggccgctacttctggcacgtgcgggaggaggagtttgtgtgtgagcccccactcatcacccagcacacccacaagctgctggtgctggagggccaggccgccaccctgaagtgcaaggccatcggggaccccagccccctcatccactgggtggccccagatgaccggctggtgggcaacagcagcaggacagctgtgtatgacaatggcaccctggacatcttcatcaccaccagccaggacagcggggccttcacctgcatcgccgccaatgctgctggggaggccacagccatggtggaggtgtccatcgtgcagctgccccacctgagcaacagcaccagcaggacagccccacccaagagccggctgagtgacatcaccggcagcagcaagaccagccggggcggcggcggcagcggcggcggggagccccccaagagccccccagagagagctgtgctggtgtctgaggtgaccaccaccagcgccctggtgaagtggagcgtgtccaagagcgccccccgggtgaagatgtaccagctgcagtacaactgcagtgatgatgaggtgctgatctacaggatgatcccagccagcaacaaggcctttgtggtgaacaacctggtgtctggaacaggctatgacctgtgtgtgctggccatgtgggatgacacagccaccaccctgacagccaccaacatcgtgggctgtgcccagttcttcaccaaggctgactacccccagtgccagagcatgcacagccagatcctgggcggcaccatgatcctggtgattggaggcatcatcgtggccaccctgctggtgttcatcgtcatcctgatggtgcgctacaaggtgtgcaaccacgaggcccccagcaagatggctgctgctgtgtccaatgtgtacagccagaccaacggggcccagcccccaccacccagcagcgccccagctggggccccaccccagggcccccccaaggtggtggtgagaaatgagctgctggacttcaccgccagcctggcccgggccagtgacagcagcagcagcagcagcctgggcagcggggaggccgccggcctgggccgggccccctggagaattcctccttctgccccccggcccaagcccagcctggaccggctgatgggcgcctttgccagcctggacctgaagagccagaggaaggaggagctgctggacagcaggaccccagctggccgcggggccggcaccagcgcccggggccaccacagcgaccgggagcccctgctgggccccccagctgcccgggcccggagcctgctgcccctgcccctggagggcaaggccaagaggagccacagctttgacatgggagactttgctgctgctgctgctgggggcgtggtgcctgggggctacagcccccccaggaaggtgagcaacatctggaccaagaggagcctgtctgtgaatggcatgctgctgccctttgaggagagtgacctggtgggcgcccggggcaccttcggcagcagcgagtgggtgatggagagcacagtgtag

SEQ ID NO: 205438 - DNA, 2370 bp, Artificial Sequence
  derived and/or modified sequence
atggagaccctgctgggcggcctgctggccttcggcatggccttcgccgtggtagacgcttgtccaaagtattgcgtgtgtcagaacttaagcgaaagcttggggaccctgtgtccctcaaaagggttgctgttcgtccctcctgacattgatcgcagaacagtggaactgaggctgggaggaaatttcattatccatattagtcgacaagactttgccaatatgactgggttagttgacctgactctaagcagaaacactatatctcatatccagcccttttctttcctggacttggagtccttgagatcactccacctggactctaaccgtttaccaagtctgggagaagataccctgcggggactggtgaacctgcagcatctcatcgttaataacaaccaattaggggggatagcagacgaagcatttgaggactttttacttaccctcgaagatctggatctcagttataataacctgcatggccttccgtgggattctgttagacgaatggttaacttacaccaattgtccctggaccacaatctactagatcacatcgccgagggcaccttcgcagacctgcagaagctcgccagactcgatctgacttcaaatcggctccagaagctgcctccagatcccatctttgccaggtcacaagcctctgctctcaccgcaaccccctttgctccacccctatcattttctttcggggggaatccattacactgtaattgcgaactgctgtggttgaggagactggaacgcgacgacgacctggagacttgtgggtccccagggggactaaaaggtcgttatttttggcatgtcagagaggaggagtttgtgtgcgaaccgccccttataactcagcacacccacaaactgctggtgctcgaaggtcaggctgccacactgaaatgtaaagccattggggacccatccccgctgatccactgggtagcgcctgacgataggctggtgggaaactctagcaggacagccgtctatgataacgggactctggatatctttattaccaccagccaggatagtggcgccttcacatgtatcgccgccaatgctgccggagaagcgacagctatggtcgaggtgagcattgtccagttgccacatcttagcaattccacaagtcggaccgcccctcccaaaagtcgcctcagtgacattactggatcctctaaaacctcccgcggaggagggggcagtggcggcggcgaaccacccaaatctccaccagaaagagcagtgctcgtgagtgaggtgacgaccacaagcgccctggttaaatggagtgtgtctaagagcgcgcctcgggtgaagatgtatcagcttcagtacaattgctcagatgacgaggtactgatctaccggatgattcccgcctccaacaaagcctttgttgtgaacaacttagtgagtggaaccggatatgatctgtgtgtgctcgccatgtgggatgatacagctaccactttaaccgccaccaatattgtagggtgcgctcagttcttcactaaagctgattaccctcaatgccagagcatgcattcccagatactaggaggcacaatgatactcgtgatcgggggaatcatagttgccacacttcttgtcttcatcgtgatactgatggtcaggtacaaggtgtgcaaccacgaggcacctagcaagatggcagcagctgtgtccaatgtgtactcacaaacgaacggtgctcagcccccacctccctcttccgcacctgcaggcgctccccctcagggaccccctaaggtggtggttcggaacgagctcctggacttcaccgctagtctggcgcgtgcaagcgattctagttccagctctagtctgggttctggggaggccgccggtctgggcagggcaccttggcgaatccccccctctgcgccaagacctaagccctctctggaccggctcatgggagcttttgcaagtctcgatctgaaatcccaaaggaaggaagaattattggacagcagaactccggctgggagaggggctggcacttcagctcgcggacaccacagtgaccgagaaccgctcctcggccccccagccgcacgcgcacgctctctccttccattgccgctggaaggaaaggccaagcgctctcatagctttgacatgggagatttcgcagccgccgccgccggaggagtggtacccggcgggtattccccaccccggaaggtgtccaatatctggactaaacggagtcttagcgtaaacggtatgctccttccctttgaggaatctgatttggtgggcgcacgtgggacctttgggagctcagaatgggtcatggagagtacagtatag

SEQ ID NO: 205439 - DNA, 2370 bp, Artificial Sequence
  derived and/or modified sequence
atggagacacttttgggcggattgctagcttttggcatggccttcgccgtcgtggatgcgtgtcccaaatactgcgtgtgccagaacttgtccgagagcttagggaccctatgcccaagtaaaggtctactcttcgtcccccctgatattgaccggcgaaccgtggagttgagactgggagggaacttcataatccacatcagcaggcaggatttcgctaatatgacaggtctggttgacctgaccctgtccaggaataccataagccatattcaaccgttttccttcctagacctggagagcctgaggtcactgcaccttgacagtaatcggcttccttcccttggggaagatacactgcgagggctagtgaatttgcagcaccttatcgtaaataacaaccaattaggaggcattgctgacgaagccttcgaagattttctgcttaccttggaggaccttgacctgtcgtataataacctgcatggtctcccctgggactctgtgcgcagaatggtcaacttacaccaactatcgctggatcataatttactcgatcacatcgctgaagggactttcgcggatctccagaagttggcccgtctggacctaacgtcaaatagactgcagaagctcccaccagacccaatcttcgcacgatcccaggcttcggccctcaccgccacccctttcgcaccaccattatcttttagtttcggaggcaacccactccactgtaactgcgaactactatggctacggcgactggaacgcgatgatgaccttgagacatgtggcagcccaggaggactgaaggggagatacttctggcatgtacgcgaagaagagttcgtctgcgaacctcccctgattacccagcacacgcataagctcctcgtactggagggccaggccgcaacacttaagtgtaaagccataggtgatccttcacccctgatacactgggttgcccctgatgatcgcttggtagggaactcctctaggactgcagtctacgataatggcacgttagatatcttcataacgacctctcaagactcaggcgctttcacatgtatagcagctaacgccgctggcgaggcaacagccatggtggaagtgtcaatcgttcagctgcctcacctgtctaattccaccagcaggacagctccacctaaaagtcgactatcagacatcaccggcagttctaagacttcccgaggaggtggcggtagcggtggaggggaacctccgaagtcacccccagaacgcgctgtactagtgtctgaagtcaccacgacttctgcccttgtgaaatggagcgtgagcaaatcggcgccaagggtgaaaatgtatcagctacaatacaactgctccgacgatgaggtgttgatataccggatgattcctgcttcaaataaggctttcgtcgtaaataaccttgtgtcggggacaggctacgacctgtgcgttctcgctatgtgggatgacaccgcgaccactcttaccgctaccaacatcgtcggttgcgctcagtttttcacaaaagccgattaccctcagtgccagtctatgcattcacagatcctggggggaactatgattctggttatagggggtattattgtcgcaacattactcgttttcatcgtgatcctcatggtcaggtacaaagtgtgcaatcacgaggctccatctaagatggcagccgcagtgtctaatgtttattcgcagaccaatggagcccagccccctccaccatcttctgctcctgctggggctcccccacaggggcctccgaaggtggtggtgcgaaatgagttactggacttcacagccagtctggcacgcgctagcgactcaagtagctcgtcaagtctcgggagtggggaggccgcaggcctcggcagagcgccttggcggattccacctagcgcacctagacctaagccttcactggatcgcttgatgggcgcatttgcaagtctcgacctgaagagtcagcgcaaggaggaattgttggactctcgcacgcccgctgggagaggagccggaacctctgcccgagggcatcatagcgatcgagaacccctcttgggcccacctgccgcacgagctcggtccctgctccccctccctttggagggcaaggccaaacgaagccactccttcgatatgggcgacttcgcagctgcagctgcgggtggagttgtccctgggggttatagtcctcccaggaaggtcagcaatatctggaccaaacgaagcctgagcgtgaacggtatgctgttacctttcgaagagagtgacctggtgggggcacgtggaactttcggtagttccgagtgggtgatggaatctacagtatag

SEQ ID NO: 205440 - DNA, 2370 bp, Artificial Sequence
  derived and/or modified sequence
atggagaccctgctgggcggcctgctggccttcggcatggccttcgccgtggtggacgcctgccccaagtactgcgtgtgccagaacctgagcgagagcctgggcaccctgtgccccagcaagggcctgctgttcgtgccccccgacatcgacagaagaaccgtggagctgagactgggcggcaacttcatcatccacatcagcagacaggacttcgccaacatgaccggcctggtggacctgaccctgagcagaaacaccatcagccacatccagcccttcagcttcctggacctggagagcctgagaagcctgcacctggacagcaacagactgcccagcctgggcgaggacaccctgagaggcctggtgaacctgcagcacctgatcgtgaacaacaaccagctgggcggcatcgccgacgaggccttcgaggacttcctgctgaccctggaggacctggacctgagctacaacaacctgcacggcctgccctgggacagcgtgagaagaatggtgaacctgcaccagctgagcctggaccacaacctgctggaccacatcgccgagggcaccttcgccgacctgcagaagctggccagactggacctgaccagcaacagactgcagaagctgccccccgaccccatcttcgccagaagccaggccagcgccctgaccgccacccccttcgccccccccctgagcttcagcttcggcggcaaccccctgcactgcaactgcgagctgctgtggctgagaagactggagagagacgacgacctggagacctgcggcagccccggcggcctgaagggcagatacttctggcacgtgagagaggaggagttcgtgtgcgagccccccctgatcacccagcacacccacaagctgctggtgctggagggccaggccgccaccctgaagtgcaaggccatcggcgaccccagccccctgatccactgggtggcccccgacgacagactggtgggcaacagcagcagaaccgccgtgtacgacaacggcaccctggacatcttcatcaccaccagccaggacagcggcgccttcacctgcatcgccgccaacgccgccggcgaggccaccgccatggtggaggtgagcatcgtgcagctgccccacctgagcaacagcaccagcagaaccgccccccccaagagcagactgagcgacatcaccggcagcagcaagaccagcagaggcggcggcggcagcggcggcggcgagccccccaagagcccccccgagagagccgtgctggtgagcgaggtgaccaccaccagcgccctggtgaagtggagcgtgagcaagagcgcccccagagtgaagatgtaccagctgcagtacaactgcagcgacgacgaggtgctgatctacagaatgatccccgccagcaacaaggccttcgtggtgaacaacctggtgagcggcaccggctacgacctgtgcgtgctggccatgtgggacgacaccgccaccaccctgaccgccaccaacatcgtgggctgcgcccagttcttcaccaaggccgactacccccagtgccagagcatgcacagccagatcctgggcggcaccatgatcctggtgatcggcggcatcatcgtggccaccctgctggtgttcatcgtgatcctgatggtgagatacaaggtgtgcaaccacgaggcccccagcaagatggccgccgccgtgagcaacgtgtacagccagaccaacggcgcccagccccccccccccagcagcgcccccgccggcgcccccccccagggcccccccaaggtggtggtgagaaacgagctgctggacttcaccgccagcctggccagagccagcgacagcagcagcagcagcagcctgggcagcggcgaggccgccggcctgggcagagccccctggagaatcccccccagcgcccccagacccaagcccagcctggacagactgatgggcgccttcgccagcctggacctgaagagccagagaaaggaggagctgctggacagcagaacccccgccggcagaggcgccggcaccagcgccagaggccaccacagcgacagagagcccctgctgggcccccccgccgccagagccagaagcctgctgcccctgcccctggagggcaaggccaagagaagccacagcttcgacatgggcgacttcgccgccgccgccgccggcggcgtggtgcccggcggctacagcccccccagaaaggtgagcaacatctggaccaagagaagcctgagcgtgaacggcatgctgctgcccttcgaggagagcgacctggtgggcgccagaggcaccttcggcagcagcgagtgggtgatggagagcaccgtgtag

SEQ ID NO: 205441 - protein, 1771 aa, Artificial Sequence
  derived and/or modified sequence
MSVLISQSVINYVEEENIPALKALLEKCKDVDERNECGQTPLMIAAEQGNLEIVKELIKNGANCNLEDLDNWTALISASKEGHVHIVEELLKCGVNLEHRDMGGWTALMWACYKGRTDVVELLLSHGANPSVTGLYSVYPIIWAAGRGHADIVHLLLQNGAKVNCSDKYGTTPLVWAARKGHLECVKHLLAMGADVDQEGANSMTALIVAVKGGYTQSVKEILKRNPNVNLTDKDGNTALMIASKEGHTEIVQDLLDAGTYVNIPDRSGDTVLIGAVRGGHVEIVRALLQKYADIDIRGQDNKTALYWAVEKGNATMVRDILQCNPDTEICTKDGETPLIKATKMRNIEVVELLLDKGAKVSAVDKKGDTPLHIAIRGRSRKLAELLLRNPKDGRLLYRPNKAGETPYNIDCSHQKSILTQIFGARHLSPTETDGDMLGYDLYSSALADILSEPTMQPPICVGLYAQWGSGKSFLLKKLEDEMKTFAGQQIEPLFQFSWLIVFLTLLLCGGLGLLFAFTVHPNLGIAVSLSFLALLYIFFIVIYFGGRREGESWNWAWVLSTRLARHIGYLELLLKLMFVNPPELPEQTTKALPVRFLFTDYNRLSSVGGETSLAEMIATLSDACEREFGFLATRLFRVFKTEDTQGKKKWKKTCCLPSFVIFLFIIGCIISGITLLAIFRVDPKHLTVNAVLISIASVVGLAFVLNCRTWWQVLDSLLNSQRKRLHNAASKLHKLKSEGFMKVLKCEVELMARMAKTIDSFTQNQTRLVVIIDGLDACEQDKVLQMLDTVRVLFSKGPFIAIFASDPHIIIKAINQNLNSVLRDSNINGHDYMRNIVHLPVFLNSRGLSNARKFLVTSATNGDVPCSDTTGIQEDADRRVSQNSLGEMTKLGSKTALNRRDTYRRRQMQRTITRQMSFDLTKLLVTEDWFSDISPQTMRRLLNIVSVTGRLLRANQISFNWDRLASWINLTEQWPYRTSWLILYLEETEGIPDQMTLKTIYERISKNIPTTKDVEPLLEIDGDIRNFEVFLSSRTPVLVARDVKVFLPCTVNLDPKLREIIADVRAAREQISIGGLAYPPLPLHEGPPRAPSGYSQPPSVCSSTSFNGPFAGGVVSPQPHSSYYSGMTGPQHPFYNRPFFAPYLYTPRYYPGGSQHLISRPSVKTSLPRDQNNGLEVIKEDAAEGLSSPTDSSRGSGPAPGPVVLLNSLNVDAVCEKLKQIEGLDQSMLPQYCTTIKKANINGRVLAQCNIDELKKEMNMNFGDWHLFRSTVLEMRNAESHVVPEDPRFLSESSSGPAPHGEPARRASHNELPHTELSSQTPYTLNFSFEELNTLGLDEGAPRHSNLSWQSQTRRTPSLSSLNSQDSSIEISKLTDKVQAEYRDAYREYIAQMSQLEGGPGSTTISGRSSPHSTYYMGQSSSGGSIHSNLEQEKGKDSEPKPDDGRKSFLMKRGDVIDYSSSGVSTNDASPLDPITEEDEKSDQSGSKLLPGKKSSERSSLFQTDLKLKGSGLRYQKLPSDEDESGTEESDNTPLLKDDKDRKAEGKVERVPKSPEHSAEPIRTFIKAKEYLSDALLDKKDSSDSGVRSSESSPNHSLHNEVADDSQLEKANLIELEDDSHSGKRGIPHSLSGLQDPIIARMSICSEDKKSPSECSLIASSPEENWPACQKAYNLNRTPSTVTLNNNSAPANRANQNFDEMEGIRETSQVILRPSSSPNPTTIQNENLKSMTHKRSQRSSYTRLSKDPPELHAAASSESTGFGEERESIL

SEQ ID NO: 205442 - protein, 1031 aa, Artificial Sequence
  derived and/or modified sequence
MSVLISQSVINYVEEENIPALKALLEKCKDVDERNECGQTPLMIAAEQGNLEIVKELIKNGANCNLEDLDNWTALISASKEGHVHIVEELLKCGVNLEHRDMGGWTALMWACYKGRTDVVELLLSHGANPSVTGLQYSVYPIIWAAGRGHADIVHLLLQNGAKVNCSDKYGTTPLVWAARKGHLECVKHLLAMGADVDQEGANSMTALIVAVKGGYTQSVKEILKRNPNVNLTDKDGNTALMIASKEGHTEIVQDLLDAGTYVNIPDRSGDTVLIGAVRGGHVEIVRALLQKYADIDIRGQDNKTALYWAVEKGNATMVRDILQCNPDTEICTKDGETPLIKATKMRNIEVVELLLDKGAKVSAVDKKGDTPLHIAIRGRSRKLAELLLRNPKDGRLLYRPNKAGETPYNIDCSHQKSILTQIFGARHLSPTETDGDMLGYDLYSSALADILSEPTMQPPICVGLYAQWGSGKSFLLKKLEDEMKTFAGQQIEPLFQFSWLIVFLTLLLCGGLGLLFAFTVHPNLGIAVSLSFLALLYIFFIVIYFGGRREGESWNWAWVLSTRLARHIGYLELLLKLMFVNPPELPEQTTKALPVRFLFTDYNRLSSVGGETSLAEMIATLSDACEREFGFLATRLFRVFKTEDTQGKKKWKKTCCLPSFVIFLFIIGCIISGITLLAIFRVDPKHLTVNAVLISIASVVGLAFVLNCRTWWQVLDSLLNSQRKRLHNAASKLHKLKSEGFMKVLKCEVELMARMAKTIDSFTQNQTRLVVIIDGLDACEQDKVLQMLDTVRVLFSKGPFIAIFASDPHIIIKAINQNLNSVLRDSNINGHDYMRNIVHLPVFLNSRGLSNARKFLVTSATNGDVPCSDTTGIQEDADRRVSQNSLGEMTKLGSKTALNRRDTYRRRQMQRTITRQMSFDLTKLLVTEDWFSDISPQTMRRLLNIVSVTGRLLRANQISFNWDRLASWINLTEQWPYRTSWLILYLEETEGIPDQMTLKTIYERCCGADSCDRDRIGISKSVLVAMLMES

SEQ ID NO: 205443 - protein, 1672 aa, Artificial Sequence
  derived and/or modified sequence
MIAAEQGNLEIVKELIKNGANCNLEDLDNWTALISASKEGHVHIVEELLKCGVNLEHRDMGGWTALMWACYKGRTDVVELLLSHGANPSVTGLYSVYPIIWAAGRGHADIVHLLLQNGAKVNCSDKYGTTPLVWAARKGHLECVKHLLAMGADVDQEGANSMTALIVAVKGGYTQSVKEILKRNPNVNLTDKDGNTALMIASKEGHTEIVQDLLDAGTYVNIPDRSGDTVLIGAVRGGHVEIVRALLQKYADIDIRGQDNKTALYWAVEKGNATMVRDILQCNPDTEICTKDGETPLIKATKMRNIEVVELLLDKGAKVSAVDKKGDTPLHIAIRGRSRKLAELLLRNPKDGRLLYRPNKAGETPYNIDCSHQKSILTQIFGARHLSPTETDGDMLGYDLYSSALADILSEPTMQPPICVGLYAQWGSGKSFLLKKLEDEMKTFAGQQIEPLFQFSWLIVFLTLLLCGGLGLLFAFTVHPNLGIAVSLSFLALLYIFFIVIYFGGRREGESWNWAWVLSTRLARHIGYLELLLKLMFVNPPELPEQTTKALPVRFLFTDYNRLSSVGGETSLAEMIATLSDACEREFGFLATRLFRVFKTEDTQGKKKWKKTCCLPSFVIFLFIIGCIISGITLLAIFRVDPKHLTVNAVLISIASVVGLAFVLNCRTWWQVLDSLLNSQRKRLHNAASKLHKLKSEGFMKVLKCEVELMARMAKTIDSFTQNQTRLVVIIDGLDACEQDKVLQMLDTVRVLFSKGPFIAIFASDPHIIIKAINQNLNSVLRDSNINGHDYMRNIVHLPVFLNSRGLSNARKFLVTSATNGDVPCSDTTGIQEDADRRVSQNSLGEMTKLGSKTALNRRDTYRRRQMQRTITRQMSFDLTKLLVTEDWFSDISPQTMRRLLNIVSVTGRLLRANQISFNWDRLASWINLTEQWPYRTSWLILYLEETEGIPDQMTLKTIYERISKNIPTTKDVEPLLEIDGDIRNFEVFLSSRTPVLVARDVKVFLPCTVNLDPKLREIIADVRAAREQISIGGLAYPPLPLHEGPPRAPSGYSQPPSVCSSTSFNGPFAGGVVSPQPHSSYYSGMTGPQHPFYNRGSGPAPGPVVLLNSLNVDAVCEKLKQIEGLDQSMLPQYCTTIKKANINGRVLAQCNIDELKKEMNMNFGDWHLFRSTVLEMRNAESHVVPEDPRFLSESSSGPAPHGEPARRASHNELPHTELSSQTPYTLNFSFEELNTLGLDEGAPRHSNLSWQSQTRRTPSLSSLNSQDSSIEISKLTDKVQAEYRDAYREYIAQMSQLEGGPGSTTISGRSSPHSTYYMGQSSSGGSIHSNLEQEKGKDSEPKPDDGRKSFLMKRGDVIDYSSSGVSTNDASPLDPITEEDEKSDQSGSKLLPGKKSSERSSLFQTDLKLKGSGLRYQKLPSDEDESGTEESDNTPLLKDDKDRKAEGKVERVPKSPEHSAEPIRTFIKAKEYLSDALLDKKDSSDSGVRSSESSPNHSLHNEVADDSQLEKANLIELEDDSHSGKRGIPHSLSGLQDPIIARMSICSEDKKSPSECSLIASSPEENWPACQKAYNLNRTPSTVTLNNNSAPANRANQNFDEMEGIRETSQVILRPSSSPNPTTIQNENLKSMTHKRSQRSSYTRLSKDPPELHAAASSESTGFGEERESIL

SEQ ID NO: 205444 - protein, 1752 aa, Artificial Sequence
  derived and/or modified sequence
MSVLISQSVINYVEEENIPALKALLEKCKDVDERNECGQTPLMIAAEQGNLEIVKELIKNGANCNLEDLDNWTALISASKEGHVHIVEELLKCGVNLEHRDMGGWTALMWACYKGRTDVVELLLSHGANPSVTGLYSVYPIIWAAGRGHADIVHLLLQNGAKVNCSDKYGTTPLVWAARKGHLECVKHLLAMGADVDQEGANSMTALIVAVKGGYTQSVKEILKRNPNVNLTDKDGNTALMIASKEGHTEIVQDLLDAGTYVNIPDRSGDTVLIGAVRGGHVEIVRALLQKYADIDIRGQDNKTALYWAVEKGNATMVRDILQCNPDTEICTKDGETPLIKATKMRNIEVVELLLDKGAKVSAVDKKGDTPLHIAIRGRSRKLAELLLRNPKDGRLLYRPNKAGETPYNIDCSHQKSILTQIFGARHLSPTETDGDMLGYDLYSSALADILSEPTMQPPICVGLYAQWGSGKSFLLKKLEDEMKTFAGQQIEPLFQFSWLIVFLTLLLCGGLGLLFAFTVHPNLGIAVSLSFLALLYIFFIVIYFGGRREGESWNWAWVLSTRLARHIGYLELLLKLMFVNPPELPEQTTKALPVRFLFTDYNRLSSVGGETSLAEMIATLSDACEREFGFLATRLFRVFKTEDTQGKKKWKKTCCLPSFVIFLFIIGCIISGITLLAIFRVDPKHLTVNAVLISIASVVGLAFVLNCRTWWQVLDSLLNSQRKRLHNAASKLHKLKSEGFMKVLKCEVELMARMAKTIDSFTQNQTRLVVIIDGLDACEQDKVLQMLDTVRVLFSKGPFIAIFASDPHIIIKAINQNLNSVLRDSNINGHDYMRNIVHLPVFLNSRGLSNARKFLVTSATNGDVPCSDTTGIQEDADRRVSQNSLGEMTKLGSKTALNRRDTYRRRQMQRTITRQMSFDLTKLLVTEDWFSDISPQTMRRLLNIVSVTGRLLRANQISFNWDRLASWINLTEQWPYRTSWLILYLEETEGIPDQMTLKTIYERISKNIPTTKDVEPLLEIDGDIRNFEVFLSSRTPVLVARDVKVFLPCTVNLDPKLREIIADVRAAREQISIGGLAYPPLPLHEGPPRAPSGYSQPPSVCSSTSFNGPFAGGVVSPQPHSSYYSGMTGPQHPFYNRPFFAPYLYTPRYYPGGSQHLISRPSVKTSLPRDQNNGLGSGPAPGPVVLLNSLNVDAVCEKLKQIEGLDQSMLPQYCTTIKKANINGRVLAQCNIDELKKEMNMNFGDWHLFRSTVLEMRNAESHVVPEDPRFLSESSSGPAPHGEPARRASHNELPHTELSSQTPYTLNFSFEELNTLGLDEGAPRHSNLSWQSQTRRTPSLSSLNSQDSSIEISKLTDKVQAEYRDAYREYIAQMSQLEGGPGSTTISGRSSPHSTYYMGQSSSGGSIHSNLEQEKGKDSEPKPDDGRKSFLMKRGDVIDYSSSGVSTNDASPLDPITEEDEKSDQSGSKLLPGKKSSERSSLFQTDLKLKGSGLRYQKLPSDEDESGTEESDNTPLLKDDKDRKAEGKVERVPKSPEHSAEPIRTFIKAKEYLSDALLDKKDSSDSGVRSSESSPNHSLHNEVADDSQLEKANLIELEDDSHSGKRGIPHSLSGLQDPIIARMSICSEDKKSPSECSLIASSPEENWPACQKAYNLNRTPSTVTLNNNSAPANRANQNFDEMEGIRETSQVILRPSSSPNPTTIQNENLKSMTHKRSQRSSYTRLSKDPPELHAAASSESTGFGEERESIL

SEQ ID NO: 205445 - protein, 994 aa, Artificial Sequence
  derived and/or modified sequence
MVRDILQCNPDTEICTKDGETPLIKATKMRNIEVVELLLDKGAKVSAVDKKGDTPLHIAIRGRSRKLAELLLRNPKDGRLLYRPNKAGETPYNIDCSHQKSILTQIFGARHLSPTETDGDMLGYDLYSSALADILSEPTMQPPICVGLYAQWGSGKSFLLKKLEDEMKTFAGQQIEPLFQFSWLIVFLTLLLCGGLGLLFAFTVHPNLGIAVSLSFLALLYIFFIVIYFGGRREGESWNWAWVLSTRLARHIGYLELLLKLMFVNPPELPEQTTKALPVRFLFTDYNRLSSVGGETSLAEMIATLSDACEREFGFLATRLFRVFKTEDTQGKKKWKKTCCLPSFVIFLFIIGCIISGITLLAIFRVDPKHLTVNAVLISIASVVGLAFVLNCRTWWQVLDSLLNSQRKRLHNAASKLHKLKSEGFMKVLKCEVELMARMAKTIDSFTQNQTRLVVIIDGLDACEQDKVLQMLDTVRVLFSKGPFIAIFASDPHIIIKAINQNLNSVLRDSNINGHDYMRNIVHLPVFLNSRGLSNARKFLVTSATNGDVPCSDTTGIQEDADRRVSQNSLGEMTKLGSKTALNRRDTYRRRQMQRTITRQMSFDLTKLLVTEDWFSDISPQTMRRLLNIVSVTGRLLRANQISFNWDRLASWINLTEQWPYRTSWLILYLEETEGIPDQMTLKTIYERISKNIPTTKDVEPLLEIDGDIRNFEVFLSSRTPVLVARDVKVFLPCTVNLDPKLREIIADVRAAREQISIGGLAYPPLPLHEGPPRAPSGYSQPPSVCSSTSFNGPFAGGVVSPQPHSSYYSGMTGPQHPFYNRGSGPAPGPVVLLNSLNVDAVCEKLKQIEGLDQSMLPQYCTTIKKANINGRVLAQCNIDELKKEMNMNFGDWHLFRSTVLEMRNAESHVVPEDPRFLSESSSGPAPHGEPARRASHNELPHTELSSQTPYTLNFSFEELNTLGLDEGAPRHSNLSWQEENAGLEIDSSSEDPD

SEQ ID NO: 205446 - DNA, 5316 bp, Artificial Sequence
  derived and/or modified sequence
atgagcgtgctgatcagccagagcgtgatcaactacgtggaggaggagaacatccccgccctgaaggccctgctggagaagtgcaaggacgtggacgagagaaacgagtgcggccagacccccctgatgatcgccgccgagcagggcaacctggagatcgtgaaggagctgatcaagaacggcgccaactgcaacctggaggacctggacaactggaccgccctgatcagcgccagcaaggagggccacgtgcacatcgtggaggagctgctgaagtgcggcgtgaacctggagcacagagacatgggcggctggaccgccctgatgtgggcctgctacaagggcagaaccgacgtggtggagctgctgctgagccacggcgccaaccccagcgtgaccggcctgtacagcgtgtaccccatcatctgggccgccggcagaggccacgccgacatcgtgcacctgctgctgcagaacggcgccaaggtgaactgcagcgacaagtacggcaccacccccctggtgtgggccgccagaaagggccacctggagtgcgtgaagcacctgctggccatgggcgccgacgtggaccaggagggcgccaacagcatgaccgccctgatcgtggccgtgaagggcggctacacccagagcgtgaaggagatcctgaagagaaaccccaacgtgaacctgaccgacaaggacggcaacaccgccctgatgatcgccagcaaggagggccacaccgagatcgtgcaggacctgctggacgccggcacctacgtgaacatccccgacagaagcggcgacaccgtgctgatcggcgccgtgagaggcggccacgtggagatcgtgagagccctgctgcagaagtacgccgacatcgacatcagaggccaggacaacaagaccgccctgtactgggccgtggagaagggcaacgccaccatggtgagagacatcctgcagtgcaaccccgacaccgagatctgcaccaaggacggcgagacccccctgatcaaggccaccaagatgagaaacatcgaggtggtggagctgctgctggacaagggcgccaaggtgagcgccgtggacaagaagggcgacacccccctgcacatcgccatcagaggcagaagcagaaagctggccgagctgctgctgagaaaccccaaggacggcagactgctgtacagacccaacaaggccggcgagaccccctacaacatcgactgcagccaccagaagagcatcctgacccagatcttcggcgccagacacctgagccccaccgagaccgacggcgacatgctgggctacgacctgtacagcagcgccctggccgacatcctgagcgagcccaccatgcagccccccatctgcgtgggcctgtacgcccagtggggcagcggcaagagcttcctgctgaagaagctggaggacgagatgaagaccttcgccggccagcagatcgagcccctgttccagttcagctggctgatcgtgttcctgaccctgctgctgtgcggcggcctgggcctgctgttcgccttcaccgtgcaccccaacctgggcatcgccgtgagcctgagcttcctggccctgctgtacatcttcttcatcgtgatctacttcggcggcagaagagagggcgagagctggaactgggcctgggtgctgagcaccagactggccagacacatcggctacctggagctgctgctgaagctgatgttcgtgaacccccccgagctgcccgagcagaccaccaaggccctgcccgtgagattcctgttcaccgactacaacagactgagcagcgtgggcggcgagaccagcctggccgagatgatcgccaccctgagcgacgcctgcgagagagagttcggcttcctggccaccagactgttcagagtgttcaagaccgaggacacccagggcaagaagaagtggaagaagacctgctgcctgcccagcttcgtgatcttcctgttcatcatcggctgcatcatcagcggcatcaccctgctggccatcttcagagtggaccccaagcacctgaccgtgaacgccgtgctgatcagcatcgccagcgtggtgggcctggccttcgtgctgaactgcagaacctggtggcaggtgctggacagcctgctgaacagccagagaaagagactgcacaacgccgccagcaagctgcacaagctgaagagcgagggcttcatgaaggtgctgaagtgcgaggtggagctgatggccagaatggccaagaccatcgacagcttcacccagaaccagaccagactggtggtgatcatcgacggcctggacgcctgcgagcaggacaaggtgctgcagatgctggacaccgtgagagtgctgttcagcaagggccccttcatcgccatcttcgccagcgacccccacatcatcatcaaggccatcaaccagaacctgaacagcgtgctgagagacagcaacatcaacggccacgactacatgagaaacatcgtgcacctgcccgtgttcctgaacagcagaggcctgagcaacgccagaaagttcctggtgaccagcgccaccaacggcgacgtgccctgcagcgacaccaccggcatccaggaggacgccgacagaagagtgagccagaacagcctgggcgagatgaccaagctgggcagcaagaccgccctgaacagaagagacacctacagaagaagacagatgcagagaaccatcaccagacagatgagcttcgacctgaccaagctgctggtgaccgaggactggttcagcgacatcagcccccagaccatgagaagactgctgaacatcgtgagcgtgaccggcagactgctgagagccaaccagatcagcttcaactgggacagactggccagctggatcaacctgaccgagcagtggccctacagaaccagctggctgatcctgtacctggaggagaccgagggcatccccgaccagatgaccctgaagaccatctacgagagaatcagcaagaacatccccaccaccaaggacgtggagcccctgctggagatcgacggcgacatcagaaacttcgaggtgttcctgagcagcagaacccccgtgctggtggccagagacgtgaaggtgttcctgccctgcaccgtgaacctggaccccaagctgagagagatcatcgccgacgtgagagccgccagagagcagatcagcatcggcggcctggcctacccccccctgcccctgcacgagggcccccccagagcccccagcggctacagccagccccccagcgtgtgcagcagcaccagcttcaacggccccttcgccggcggcgtggtgagcccccagccccacagcagctactacagcggcatgaccggcccccagcaccccttctacaacagacccttcttcgccccctacctgtacacccccagatactaccccggcggcagccagcacctgatcagcagacccagcgtgaagaccagcctgcccagagaccagaacaacggcctggaggtgatcaaggaggacgccgccgagggcctgagcagccccaccgacagcagcagaggcagcggccccgcccccggccccgtggtgctgctgaacagcctgaacgtggacgccgtgtgcgagaagctgaagcagatcgagggcctggaccagagcatgctgccccagtactgcaccaccatcaagaaggccaacatcaacggcagagtgctggcccagtgcaacatcgacgagctgaagaaggagatgaacatgaacttcggcgactggcacctgttcagaagcaccgtgctggagatgagaaacgccgagagccacgtggtgcccgaggaccccagattcctgagcgagagcagcagcggccccgccccccacggcgagcccgccagaagagccagccacaacgagctgccccacaccgagctgagcagccagaccccctacaccctgaacttcagcttcgaggagctgaacaccctgggcctggacgagggcgcccccagacacagcaacctgagctggcagagccagaccagaagaacccccagcctgagcagcctgaacagccaggacagcagcatcgagatcagcaagctgaccgacaaggtgcaggccgagtacagagacgcctacagagagtacatcgcccagatgagccagctggagggcggccccggcagcaccaccatcagcggcagaagcagcccccacagcacctactacatgggccagagcagcagcggcggcagcatccacagcaacctggagcaggagaagggcaaggacagcgagcccaagcccgacgacggcagaaagagcttcctgatgaagagaggcgacgtgatcgactacagcagcagcggcgtgagcaccaacgacgccagccccctggaccccatcaccgaggaggacgagaagagcgaccagagcggcagcaagctgctgcccggcaagaagagcagcgagagaagcagcctgttccagaccgacctgaagctgaagggcagcggcctgagataccagaagctgcccagcgacgaggacgagagcggcaccgaggagagcgacaacacccccctgctgaaggacgacaaggacagaaaggccgagggcaaggtggagagagtgcccaagagccccgagcacagcgccgagcccatcagaaccttcatcaaggccaaggagtacctgagcgacgccctgctggacaagaaggacagcagcgacagcggcgtgagaagcagcgagagcagccccaaccacagcctgcacaacgaggtggccgacgacagccagctggagaaggccaacctgatcgagctggaggacgacagccacagcggcaagagaggcatcccccacagcctgagcggcctgcaggaccccatcatcgccagaatgagcatctgcagcgaggacaagaagagccccagcgagtgcagcctgatcgccagcagccccgaggagaactggcccgcctgccagaaggcctacaacctgaacagaacccccagcaccgtgaccctgaacaacaacagcgcccccgccaacagagccaaccagaacttcgacgagatggagggcatcagagagaccagccaggtgatcctgagacccagcagcagccccaaccccaccaccatccagaacgagaacctgaagagcatgacccacaagagaagccagagaagcagctacaccagactgagcaaggacccccccgagctgcacgccgccgccagcagcgagagcaccggcttcggcgaggagagagagagcatcctgtag

SEQ ID NO: 205447 - DNA, 3096 bp, Artificial Sequence
  derived and/or modified sequence
atgagcgtgctgatcagccagagcgtgatcaactacgtggaggaggagaacatccccgccctgaaggccctgctggagaagtgcaaggacgtggacgagagaaacgagtgcggccagacccccctgatgatcgccgccgagcagggcaacctggagatcgtgaaggagctgatcaagaacggcgccaactgcaacctggaggacctggacaactggaccgccctgatcagcgccagcaaggagggccacgtgcacatcgtggaggagctgctgaagtgcggcgtgaacctggagcacagagacatgggcggctggaccgccctgatgtgggcctgctacaagggcagaaccgacgtggtggagctgctgctgagccacggcgccaaccccagcgtgaccggcctgcagtacagcgtgtaccccatcatctgggccgccggcagaggccacgccgacatcgtgcacctgctgctgcagaacggcgccaaggtgaactgcagcgacaagtacggcaccacccccctggtgtgggccgccagaaagggccacctggagtgcgtgaagcacctgctggccatgggcgccgacgtggaccaggagggcgccaacagcatgaccgccctgatcgtggccgtgaagggcggctacacccagagcgtgaaggagatcctgaagagaaaccccaacgtgaacctgaccgacaaggacggcaacaccgccctgatgatcgccagcaaggagggccacaccgagatcgtgcaggacctgctggacgccggcacctacgtgaacatccccgacagaagcggcgacaccgtgctgatcggcgccgtgagaggcggccacgtggagatcgtgagagccctgctgcagaagtacgccgacatcgacatcagaggccaggacaacaagaccgccctgtactgggccgtggagaagggcaacgccaccatggtgagagacatcctgcagtgcaaccccgacaccgagatctgcaccaaggacggcgagacccccctgatcaaggccaccaagatgagaaacatcgaggtggtggagctgctgctggacaagggcgccaaggtgagcgccgtggacaagaagggcgacacccccctgcacatcgccatcagaggcagaagcagaaagctggccgagctgctgctgagaaaccccaaggacggcagactgctgtacagacccaacaaggccggcgagaccccctacaacatcgactgcagccaccagaagagcatcctgacccagatcttcggcgccagacacctgagccccaccgagaccgacggcgacatgctgggctacgacctgtacagcagcgccctggccgacatcctgagcgagcccaccatgcagccccccatctgcgtgggcctgtacgcccagtggggcagcggcaagagcttcctgctgaagaagctggaggacgagatgaagaccttcgccggccagcagatcgagcccctgttccagttcagctggctgatcgtgttcctgaccctgctgctgtgcggcggcctgggcctgctgttcgccttcaccgtgcaccccaacctgggcatcgccgtgagcctgagcttcctggccctgctgtacatcttcttcatcgtgatctacttcggcggcagaagagagggcgagagctggaactgggcctgggtgctgagcaccagactggccagacacatcggctacctggagctgctgctgaagctgatgttcgtgaacccccccgagctgcccgagcagaccaccaaggccctgcccgtgagattcctgttcaccgactacaacagactgagcagcgtgggcggcgagaccagcctggccgagatgatcgccaccctgagcgacgcctgcgagagagagttcggcttcctggccaccagactgttcagagtgttcaagaccgaggacacccagggcaagaagaagtggaagaagacctgctgcctgcccagcttcgtgatcttcctgttcatcatcggctgcatcatcagcggcatcaccctgctggccatcttcagagtggaccccaagcacctgaccgtgaacgccgtgctgatcagcatcgccagcgtggtgggcctggccttcgtgctgaactgcagaacctggtggcaggtgctggacagcctgctgaacagccagagaaagagactgcacaacgccgccagcaagctgcacaagctgaagagcgagggcttcatgaaggtgctgaagtgcgaggtggagctgatggccagaatggccaagaccatcgacagcttcacccagaaccagaccagactggtggtgatcatcgacggcctggacgcctgcgagcaggacaaggtgctgcagatgctggacaccgtgagagtgctgttcagcaagggccccttcatcgccatcttcgccagcgacccccacatcatcatcaaggccatcaaccagaacctgaacagcgtgctgagagacagcaacatcaacggccacgactacatgagaaacatcgtgcacctgcccgtgttcctgaacagcagaggcctgagcaacgccagaaagttcctggtgaccagcgccaccaacggcgacgtgccctgcagcgacaccaccggcatccaggaggacgccgacagaagagtgagccagaacagcctgggcgagatgaccaagctgggcagcaagaccgccctgaacagaagagacacctacagaagaagacagatgcagagaaccatcaccagacagatgagcttcgacctgaccaagctgctggtgaccgaggactggttcagcgacatcagcccccagaccatgagaagactgctgaacatcgtgagcgtgaccggcagactgctgagagccaaccagatcagcttcaactgggacagactggccagctggatcaacctgaccgagcagtggccctacagaaccagctggctgatcctgtacctggaggagaccgagggcatccccgaccagatgaccctgaagaccatctacgagagatgctgcggcgccgacagctgcgacagagacagaatcggcatcagcaagagcgtgctggtggccatgctgatggagagctag

SEQ ID NO: 205448 - DNA, 5019 bp, Artificial Sequence
  derived and/or modified sequence
atgatcgccgccgagcagggcaacctggagatcgtgaaggagctgatcaagaacggcgccaactgcaacctggaggacctggacaactggaccgccctgatcagcgccagcaaggagggccacgtgcacatcgtggaggagctgctgaagtgcggcgtgaacctggagcacagagacatgggcggctggaccgccctgatgtgggcctgctacaagggcagaaccgacgtggtggagctgctgctgagccacggcgccaaccccagcgtgaccggcctgtacagcgtgtaccccatcatctgggccgccggcagaggccacgccgacatcgtgcacctgctgctgcagaacggcgccaaggtgaactgcagcgacaagtacggcaccacccccctggtgtgggccgccagaaagggccacctggagtgcgtgaagcacctgctggccatgggcgccgacgtggaccaggagggcgccaacagcatgaccgccctgatcgtggccgtgaagggcggctacacccagagcgtgaaggagatcctgaagagaaaccccaacgtgaacctgaccgacaaggacggcaacaccgccctgatgatcgccagcaaggagggccacaccgagatcgtgcaggacctgctggacgccggcacctacgtgaacatccccgacagaagcggcgacaccgtgctgatcggcgccgtgagaggcggccacgtggagatcgtgagagccctgctgcagaagtacgccgacatcgacatcagaggccaggacaacaagaccgccctgtactgggccgtggagaagggcaacgccaccatggtgagagacatcctgcagtgcaaccccgacaccgagatctgcaccaaggacggcgagacccccctgatcaaggccaccaagatgagaaacatcgaggtggtggagctgctgctggacaagggcgccaaggtgagcgccgtggacaagaagggcgacacccccctgcacatcgccatcagaggcagaagcagaaagctggccgagctgctgctgagaaaccccaaggacggcagactgctgtacagacccaacaaggccggcgagaccccctacaacatcgactgcagccaccagaagagcatcctgacccagatcttcggcgccagacacctgagccccaccgagaccgacggcgacatgctgggctacgacctgtacagcagcgccctggccgacatcctgagcgagcccaccatgcagccccccatctgcgtgggcctgtacgcccagtggggcagcggcaagagcttcctgctgaagaagctggaggacgagatgaagaccttcgccggccagcagatcgagcccctgttccagttcagctggctgatcgtgttcctgaccctgctgctgtgcggcggcctgggcctgctgttcgccttcaccgtgcaccccaacctgggcatcgccgtgagcctgagcttcctggccctgctgtacatcttcttcatcgtgatctacttcggcggcagaagagagggcgagagctggaactgggcctgggtgctgagcaccagactggccagacacatcggctacctggagctgctgctgaagctgatgttcgtgaacccccccgagctgcccgagcagaccaccaaggccctgcccgtgagattcctgttcaccgactacaacagactgagcagcgtgggcggcgagaccagcctggccgagatgatcgccaccctgagcgacgcctgcgagagagagttcggcttcctggccaccagactgttcagagtgttcaagaccgaggacacccagggcaagaagaagtggaagaagacctgctgcctgcccagcttcgtgatcttcctgttcatcatcggctgcatcatcagcggcatcaccctgctggccatcttcagagtggaccccaagcacctgaccgtgaacgccgtgctgatcagcatcgccagcgtggtgggcctggccttcgtgctgaactgcagaacctggtggcaggtgctggacagcctgctgaacagccagagaaagagactgcacaacgccgccagcaagctgcacaagctgaagagcgagggcttcatgaaggtgctgaagtgcgaggtggagctgatggccagaatggccaagaccatcgacagcttcacccagaaccagaccagactggtggtgatcatcgacggcctggacgcctgcgagcaggacaaggtgctgcagatgctggacaccgtgagagtgctgttcagcaagggccccttcatcgccatcttcgccagcgacccccacatcatcatcaaggccatcaaccagaacctgaacagcgtgctgagagacagcaacatcaacggccacgactacatgagaaacatcgtgcacctgcccgtgttcctgaacagcagaggcctgagcaacgccagaaagttcctggtgaccagcgccaccaacggcgacgtgccctgcagcgacaccaccggcatccaggaggacgccgacagaagagtgagccagaacagcctgggcgagatgaccaagctgggcagcaagaccgccctgaacagaagagacacctacagaagaagacagatgcagagaaccatcaccagacagatgagcttcgacctgaccaagctgctggtgaccgaggactggttcagcgacatcagcccccagaccatgagaagactgctgaacatcgtgagcgtgaccggcagactgctgagagccaaccagatcagcttcaactgggacagactggccagctggatcaacctgaccgagcagtggccctacagaaccagctggctgatcctgtacctggaggagaccgagggcatccccgaccagatgaccctgaagaccatctacgagagaatcagcaagaacatccccaccaccaaggacgtggagcccctgctggagatcgacggcgacatcagaaacttcgaggtgttcctgagcagcagaacccccgtgctggtggccagagacgtgaaggtgttcctgccctgcaccgtgaacctggaccccaagctgagagagatcatcgccgacgtgagagccgccagagagcagatcagcatcggcggcctggcctacccccccctgcccctgcacgagggcccccccagagcccccagcggctacagccagccccccagcgtgtgcagcagcaccagcttcaacggccccttcgccggcggcgtggtgagcccccagccccacagcagctactacagcggcatgaccggcccccagcaccccttctacaacagaggcagcggccccgcccccggccccgtggtgctgctgaacagcctgaacgtggacgccgtgtgcgagaagctgaagcagatcgagggcctggaccagagcatgctgccccagtactgcaccaccatcaagaaggccaacatcaacggcagagtgctggcccagtgcaacatcgacgagctgaagaaggagatgaacatgaacttcggcgactggcacctgttcagaagcaccgtgctggagatgagaaacgccgagagccacgtggtgcccgaggaccccagattcctgagcgagagcagcagcggccccgccccccacggcgagcccgccagaagagccagccacaacgagctgccccacaccgagctgagcagccagaccccctacaccctgaacttcagcttcgaggagctgaacaccctgggcctggacgagggcgcccccagacacagcaacctgagctggcagagccagaccagaagaacccccagcctgagcagcctgaacagccaggacagcagcatcgagatcagcaagctgaccgacaaggtgcaggccgagtacagagacgcctacagagagtacatcgcccagatgagccagctggagggcggccccggcagcaccaccatcagcggcagaagcagcccccacagcacctactacatgggccagagcagcagcggcggcagcatccacagcaacctggagcaggagaagggcaaggacagcgagcccaagcccgacgacggcagaaagagcttcctgatgaagagaggcgacgtgatcgactacagcagcagcggcgtgagcaccaacgacgccagccccctggaccccatcaccgaggaggacgagaagagcgaccagagcggcagcaagctgctgcccggcaagaagagcagcgagagaagcagcctgttccagaccgacctgaagctgaagggcagcggcctgagataccagaagctgcccagcgacgaggacgagagcggcaccgaggagagcgacaacacccccctgctgaaggacgacaaggacagaaaggccgagggcaaggtggagagagtgcccaagagccccgagcacagcgccgagcccatcagaaccttcatcaaggccaaggagtacctgagcgacgccctgctggacaagaaggacagcagcgacagcggcgtgagaagcagcgagagcagccccaaccacagcctgcacaacgaggtggccgacgacagccagctggagaaggccaacctgatcgagctggaggacgacagccacagcggcaagagaggcatcccccacagcctgagcggcctgcaggaccccatcatcgccagaatgagcatctgcagcgaggacaagaagagccccagcgagtgcagcctgatcgccagcagccccgaggagaactggcccgcctgccagaaggcctacaacctgaacagaacccccagcaccgtgaccctgaacaacaacagcgcccccgccaacagagccaaccagaacttcgacgagatggagggcatcagagagaccagccaggtgatcctgagacccagcagcagccccaaccccaccaccatccagaacgagaacctgaagagcatgacccacaagagaagccagagaagcagctacaccagactgagcaaggacccccccgagctgcacgccgccgccagcagcgagagcaccggcttcggcgaggagagagagagcatcctgtag

SEQ ID NO: 205449 - DNA, 5259 bp, Artificial Sequence
  derived and/or modified sequence
atgagcgtgctgatcagccagagcgtgatcaactacgtggaggaggagaacatccccgccctgaaggccctgctggagaagtgcaaggacgtggacgagagaaacgagtgcggccagacccccctgatgatcgccgccgagcagggcaacctggagatcgtgaaggagctgatcaagaacggcgccaactgcaacctggaggacctggacaactggaccgccctgatcagcgccagcaaggagggccacgtgcacatcgtggaggagctgctgaagtgcggcgtgaacctggagcacagagacatgggcggctggaccgccctgatgtgggcctgctacaagggcagaaccgacgtggtggagctgctgctgagccacggcgccaaccccagcgtgaccggcctgtacagcgtgtaccccatcatctgggccgccggcagaggccacgccgacatcgtgcacctgctgctgcagaacggcgccaaggtgaactgcagcgacaagtacggcaccacccccctggtgtgggccgccagaaagggccacctggagtgcgtgaagcacctgctggccatgggcgccgacgtggaccaggagggcgccaacagcatgaccgccctgatcgtggccgtgaagggcggctacacccagagcgtgaaggagatcctgaagagaaaccccaacgtgaacctgaccgacaaggacggcaacaccgccctgatgatcgccagcaaggagggccacaccgagatcgtgcaggacctgctggacgccggcacctacgtgaacatccccgacagaagcggcgacaccgtgctgatcggcgccgtgagaggcggccacgtggagatcgtgagagccctgctgcagaagtacgccgacatcgacatcagaggccaggacaacaagaccgccctgtactgggccgtggagaagggcaacgccaccatggtgagagacatcctgcagtgcaaccccgacaccgagatctgcaccaaggacggcgagacccccctgatcaaggccaccaagatgagaaacatcgaggtggtggagctgctgctggacaagggcgccaaggtgagcgccgtggacaagaagggcgacacccccctgcacatcgccatcagaggcagaagcagaaagctggccgagctgctgctgagaaaccccaaggacggcagactgctgtacagacccaacaaggccggcgagaccccctacaacatcgactgcagccaccagaagagcatcctgacccagatcttcggcgccagacacctgagccccaccgagaccgacggcgacatgctgggctacgacctgtacagcagcgccctggccgacatcctgagcgagcccaccatgcagccccccatctgcgtgggcctgtacgcccagtggggcagcggcaagagcttcctgctgaagaagctggaggacgagatgaagaccttcgccggccagcagatcgagcccctgttccagttcagctggctgatcgtgttcctgaccctgctgctgtgcggcggcctgggcctgctgttcgccttcaccgtgcaccccaacctgggcatcgccgtgagcctgagcttcctggccctgctgtacatcttcttcatcgtgatctacttcggcggcagaagagagggcgagagctggaactgggcctgggtgctgagcaccagactggccagacacatcggctacctggagctgctgctgaagctgatgttcgtgaacccccccgagctgcccgagcagaccaccaaggccctgcccgtgagattcctgttcaccgactacaacagactgagcagcgtgggcggcgagaccagcctggccgagatgatcgccaccctgagcgacgcctgcgagagagagttcggcttcctggccaccagactgttcagagtgttcaagaccgaggacacccagggcaagaagaagtggaagaagacctgctgcctgcccagcttcgtgatcttcctgttcatcatcggctgcatcatcagcggcatcaccctgctggccatcttcagagtggaccccaagcacctgaccgtgaacgccgtgctgatcagcatcgccagcgtggtgggcctggccttcgtgctgaactgcagaacctggtggcaggtgctggacagcctgctgaacagccagagaaagagactgcacaacgccgccagcaagctgcacaagctgaagagcgagggcttcatgaaggtgctgaagtgcgaggtggagctgatggccagaatggccaagaccatcgacagcttcacccagaaccagaccagactggtggtgatcatcgacggcctggacgcctgcgagcaggacaaggtgctgcagatgctggacaccgtgagagtgctgttcagcaagggccccttcatcgccatcttcgccagcgacccccacatcatcatcaaggccatcaaccagaacctgaacagcgtgctgagagacagcaacatcaacggccacgactacatgagaaacatcgtgcacctgcccgtgttcctgaacagcagaggcctgagcaacgccagaaagttcctggtgaccagcgccaccaacggcgacgtgccctgcagcgacaccaccggcatccaggaggacgccgacagaagagtgagccagaacagcctgggcgagatgaccaagctgggcagcaagaccgccctgaacagaagagacacctacagaagaagacagatgcagagaaccatcaccagacagatgagcttcgacctgaccaagctgctggtgaccgaggactggttcagcgacatcagcccccagaccatgagaagactgctgaacatcgtgagcgtgaccggcagactgctgagagccaaccagatcagcttcaactgggacagactggccagctggatcaacctgaccgagcagtggccctacagaaccagctggctgatcctgtacctggaggagaccgagggcatccccgaccagatgaccctgaagaccatctacgagagaatcagcaagaacatccccaccaccaaggacgtggagcccctgctggagatcgacggcgacatcagaaacttcgaggtgttcctgagcagcagaacccccgtgctggtggccagagacgtgaaggtgttcctgccctgcaccgtgaacctggaccccaagctgagagagatcatcgccgacgtgagagccgccagagagcagatcagcatcggcggcctggcctacccccccctgcccctgcacgagggcccccccagagcccccagcggctacagccagccccccagcgtgtgcagcagcaccagcttcaacggccccttcgccggcggcgtggtgagcccccagccccacagcagctactacagcggcatgaccggcccccagcaccccttctacaacagacccttcttcgccccctacctgtacacccccagatactaccccggcggcagccagcacctgatcagcagacccagcgtgaagaccagcctgcccagagaccagaacaacggcctgggcagcggccccgcccccggccccgtggtgctgctgaacagcctgaacgtggacgccgtgtgcgagaagctgaagcagatcgagggcctggaccagagcatgctgccccagtactgcaccaccatcaagaaggccaacatcaacggcagagtgctggcccagtgcaacatcgacgagctgaagaaggagatgaacatgaacttcggcgactggcacctgttcagaagcaccgtgctggagatgagaaacgccgagagccacgtggtgcccgaggaccccagattcctgagcgagagcagcagcggccccgccccccacggcgagcccgccagaagagccagccacaacgagctgccccacaccgagctgagcagccagaccccctacaccctgaacttcagcttcgaggagctgaacaccctgggcctggacgagggcgcccccagacacagcaacctgagctggcagagccagaccagaagaacccccagcctgagcagcctgaacagccaggacagcagcatcgagatcagcaagctgaccgacaaggtgcaggccgagtacagagacgcctacagagagtacatcgcccagatgagccagctggagggcggccccggcagcaccaccatcagcggcagaagcagcccccacagcacctactacatgggccagagcagcagcggcggcagcatccacagcaacctggagcaggagaagggcaaggacagcgagcccaagcccgacgacggcagaaagagcttcctgatgaagagaggcgacgtgatcgactacagcagcagcggcgtgagcaccaacgacgccagccccctggaccccatcaccgaggaggacgagaagagcgaccagagcggcagcaagctgctgcccggcaagaagagcagcgagagaagcagcctgttccagaccgacctgaagctgaagggcagcggcctgagataccagaagctgcccagcgacgaggacgagagcggcaccgaggagagcgacaacacccccctgctgaaggacgacaaggacagaaaggccgagggcaaggtggagagagtgcccaagagccccgagcacagcgccgagcccatcagaaccttcatcaaggccaaggagtacctgagcgacgccctgctggacaagaaggacagcagcgacagcggcgtgagaagcagcgagagcagccccaaccacagcctgcacaacgaggtggccgacgacagccagctggagaaggccaacctgatcgagctggaggacgacagccacagcggcaagagaggcatcccccacagcctgagcggcctgcaggaccccatcatcgccagaatgagcatctgcagcgaggacaagaagagccccagcgagtgcagcctgatcgccagcagccccgaggagaactggcccgcctgccagaaggcctacaacctgaacagaacccccagcaccgtgaccctgaacaacaacagcgcccccgccaacagagccaaccagaacttcgacgagatggagggcatcagagagaccagccaggtgatcctgagacccagcagcagccccaaccccaccaccatccagaacgagaacctgaagagcatgacccacaagagaagccagagaagcagctacaccagactgagcaaggacccccccgagctgcacgccgccgccagcagcgagagcaccggcttcggcgaggagagagagagcatcctgtag

SEQ ID NO: 205450 - DNA, 2985 bp, Artificial Sequence
  derived and/or modified sequence
atggtgagagacatcctgcagtgcaaccccgacaccgagatctgcaccaaggacggcgagacccccctgatcaaggccaccaagatgagaaacatcgaggtggtggagctgctgctggacaagggcgccaaggtgagcgccgtggacaagaagggcgacacccccctgcacatcgccatcagaggcagaagcagaaagctggccgagctgctgctgagaaaccccaaggacggcagactgctgtacagacccaacaaggccggcgagaccccctacaacatcgactgcagccaccagaagagcatcctgacccagatcttcggcgccagacacctgagccccaccgagaccgacggcgacatgctgggctacgacctgtacagcagcgccctggccgacatcctgagcgagcccaccatgcagccccccatctgcgtgggcctgtacgcccagtggggcagcggcaagagcttcctgctgaagaagctggaggacgagatgaagaccttcgccggccagcagatcgagcccctgttccagttcagctggctgatcgtgttcctgaccctgctgctgtgcggcggcctgggcctgctgttcgccttcaccgtgcaccccaacctgggcatcgccgtgagcctgagcttcctggccctgctgtacatcttcttcatcgtgatctacttcggcggcagaagagagggcgagagctggaactgggcctgggtgctgagcaccagactggccagacacatcggctacctggagctgctgctgaagctgatgttcgtgaacccccccgagctgcccgagcagaccaccaaggccctgcccgtgagattcctgttcaccgactacaacagactgagcagcgtgggcggcgagaccagcctggccgagatgatcgccaccctgagcgacgcctgcgagagagagttcggcttcctggccaccagactgttcagagtgttcaagaccgaggacacccagggcaagaagaagtggaagaagacctgctgcctgcccagcttcgtgatcttcctgttcatcatcggctgcatcatcagcggcatcaccctgctggccatcttcagagtggaccccaagcacctgaccgtgaacgccgtgctgatcagcatcgccagcgtggtgggcctggccttcgtgctgaactgcagaacctggtggcaggtgctggacagcctgctgaacagccagagaaagagactgcacaacgccgccagcaagctgcacaagctgaagagcgagggcttcatgaaggtgctgaagtgcgaggtggagctgatggccagaatggccaagaccatcgacagcttcacccagaaccagaccagactggtggtgatcatcgacggcctggacgcctgcgagcaggacaaggtgctgcagatgctggacaccgtgagagtgctgttcagcaagggccccttcatcgccatcttcgccagcgacccccacatcatcatcaaggccatcaaccagaacctgaacagcgtgctgagagacagcaacatcaacggccacgactacatgagaaacatcgtgcacctgcccgtgttcctgaacagcagaggcctgagcaacgccagaaagttcctggtgaccagcgccaccaacggcgacgtgccctgcagcgacaccaccggcatccaggaggacgccgacagaagagtgagccagaacagcctgggcgagatgaccaagctgggcagcaagaccgccctgaacagaagagacacctacagaagaagacagatgcagagaaccatcaccagacagatgagcttcgacctgaccaagctgctggtgaccgaggactggttcagcgacatcagcccccagaccatgagaagactgctgaacatcgtgagcgtgaccggcagactgctgagagccaaccagatcagcttcaactgggacagactggccagctggatcaacctgaccgagcagtggccctacagaaccagctggctgatcctgtacctggaggagaccgagggcatccccgaccagatgaccctgaagaccatctacgagagaatcagcaagaacatccccaccaccaaggacgtggagcccctgctggagatcgacggcgacatcagaaacttcgaggtgttcctgagcagcagaacccccgtgctggtggccagagacgtgaaggtgttcctgccctgcaccgtgaacctggaccccaagctgagagagatcatcgccgacgtgagagccgccagagagcagatcagcatcggcggcctggcctacccccccctgcccctgcacgagggcccccccagagcccccagcggctacagccagccccccagcgtgtgcagcagcaccagcttcaacggccccttcgccggcggcgtggtgagcccccagccccacagcagctactacagcggcatgaccggcccccagcaccccttctacaacagaggcagcggccccgcccccggccccgtggtgctgctgaacagcctgaacgtggacgccgtgtgcgagaagctgaagcagatcgagggcctggaccagagcatgctgccccagtactgcaccaccatcaagaaggccaacatcaacggcagagtgctggcccagtgcaacatcgacgagctgaagaaggagatgaacatgaacttcggcgactggcacctgttcagaagcaccgtgctggagatgagaaacgccgagagccacgtggtgcccgaggaccccagattcctgagcgagagcagcagcggccccgccccccacggcgagcccgccagaagagccagccacaacgagctgccccacaccgagctgagcagccagaccccctacaccctgaacttcagcttcgaggagctgaacaccctgggcctggacgagggcgcccccagacacagcaacctgagctggcaggaggagaacgccggcctggagatcgacagcagcagcgaggaccccgactag

SEQ ID NO: 205451 - DNA, 5316 bp, Artificial Sequence
  derived and/or modified sequence
atgagcgtgcttatctcacagtcagttattaactacgtggaggaagagaatatcccagctctgaaagctttgctggagaagtgcaaagatgttgatgaacgtaatgaatgcggtcagacacccctgatgattgctgccgaacaaggcaatcttgaaatcgtaaaagagctaattaaaaatggggccaactgcaacttagaagacttggacaactggactgctctgatatcagccagcaaggaggggcatgtgcacattgtggaagagttgttgaagtgcggcgtcaatttagaacacagagatatggggggatggacggcccttatgtgggcatgctacaaaggccggaccgacgtggttgagttacttctgagtcacggggcaaatccctccgttactggactttactcagtgtatccgatcatctgggcagccgggcggggccacgccgacattgtccacctgttactgcagaatggtgcgaaggtaaattgctccgacaagtatggcacgaccccactagtctgggccgctcgcaaagggcatctggaatgcgtcaaacacttgctggctatgggagcggacgtggaccaggagggggctaacagtatgaccgccttgattgtggcggtgaaaggaggatacacccagagcgtcaaggagattctgaaaagaaacccaaacgttaacttgactgacaaagacggaaacaccgctctcatgattgccagcaaggagggtcacactgagattgtgcaggatctgctggacgccggcacctatgtgaacatcccagaccgaagtggcgacaccgttctcatcggtgccgtgagaggcgggcacgtggaaatcgtgagagccctgctgcagaagtacgcggacattgacatccgtggacaggacaacaaaacagcactatattgggcggtggagaagggtaacgccacaatggtcagggacatcctgcagtgcaatcctgatacggagatttgcactaaggacggagagactccactgatcaaagctaccaagatgcgcaacatcgaagtcgtcgagctgctcctggacaaaggtgcaaaagtctctgctgtcgacaagaagggcgacactcctctgcacatcgcaatccgagggcggtcccgtaaactagctgagctgctcctccgaaatccgaaggatggccgtcttctgtacaggcccaataaggcaggagagactccctacaacattgactgtagccatcagaagtctatcctgacacagatttttggcgccaggcatctttcgcccacagaaactgacggggacatgttggggtatgacctttattcttccgcactggcagacattctatccgaacccacgatgcaaccacccatctgtgtaggcttatatgcccagtggggcagtggcaaatccttcttattgaaaaagcttgaggacgagatgaaaactttcgctggtcagcaaatcgaaccactttttcagttctcctggctaatcgtatttttaactctgttactttgcggaggccttgggctcctgtttgctttcaccgtgcaccccaacctgggaattgccgtgagtctctccttcctcgccctcttatatattttcttcattgtcatctacttcggcggcagacgtgagggtgaaagttggaattgggcgtgggtgctgtctacccgactagcacgccacatcggatacctggaactccttctgaagttaatgttcgtcaacccccctgagcttccagaacagactaccaaagccctgccagtccggtttctgtttaccgactataatcgtctgagcagtgtgggtggcgaaacttccctcgccgagatgattgcgacactctctgatgcgtgtgaacgggaatttggattcctagccacccgcctgttccgtgtttttaaaacagaagacacacagggcaagaaaaagtggaagaaaacctgctgtctgcccagttttgtgattttcttgtttataatcgggtgcatcattagcgggataactctacttgctatattcagggtggatcctaagcatctgactgtcaatgcggttttaatatccatcgcctcggtcgttggcctggcgtttgtgctcaactgccgcacctggtggcaagtgctcgactccctgctcaactcccaaaggaagcgcctgcacaacgcagcctccaagttgcacaagttaaaaagtgagggcttcatgaaagtcttaaagtgcgaagtggagcttatggccaggatggccaagactatcgattctttcactcaaaatcaaacccggttagtggtgatcatcgacgggctggatgcttgcgagcaggacaaggtcttgcagatgttagataccgtgagagtgctcttcagcaaaggaccatttattgcaatcttcgccagcgatcctcatatcatcattaaggccattaaccagaatcttaattccgtactccgggatagcaatataaacggtcatgactacatgcgaaatattgttcatctccccgtgtttctgaacagccggggcctgagcaacgctcgcaaattcctggtgacatctgctactaacggcgacgtcccatgcagcgataccaccgggatccaggaggatgccgatcgcagggtctcccagaattcgcttggcgaaatgaccaaactgggctctaaaactgcgttgaaccgccgagatacttatcggcggagacagatgcagcggacaatcaccagacagatgtccttcgatctaaccaagttactggtaacagaagattggttttctgatatatcccctcagacgatgagacgattgcttaacattgtttcagtgaccggtagactgctgcgagctaatcagataagctttaactgggatcgcctcgcttcttggatcaatctaacagagcaatggccctatagaacatcctggctcattttgtatttggaagagacagagggtatccccgatcagatgacactgaagactatctatgaaagaatctccaaaaatatccctactacaaaggacgttgaaccgcttttagagattgacggcgatatccgcaacttcgaggtgttcctctcatcgaggaccccagtgttggttgcacgagatgtaaaagtcttcttgccttgcaccgttaatctggaccctaagttacgtgaaataatcgcggacgtaagggcagccagggaacagatttccatcggaggactggcgtacccacctctaccgctccatgaagggccacctcgggcaccttctggctattctcaaccaccatccgtgtgcagttccacaagttttaatggccctttcgctggaggagtggtatctcctcaacctcactcaagctactatagcggtatgacggggccccaacaccccttctacaatcgcccgttttttgcaccgtacctgtacacccccaggtattacccaggaggttcacagcacttaatttctcggccatctgtgaaaacatcgttacctagagaccagaacaacgggcttgaagtcattaaagaggacgctgccgagggcttgtccagccccaccgattcctcaaggggctccggtcccgcacctgggccagtggttctgttaaattcactcaacgtggatgccgtttgtgaaaagttgaagcaaattgaaggcctcgatcaaagcatgctgccacaatattgcactacaataaagaaggccaacatcaacggacgagtattagcgcagtgtaatattgacgaactcaaaaaggagatgaatatgaattttggagactggcacctcttccgctctaccgttcttgagatgaggaatgccgagagtcatgtcgtccccgaggaccctcgttttctgagtgagtccagctcaggacccgccccacacggtgaacccgcaaggcgcgcaagccataatgagctgccacacaccgagctgtccagtcagactccatatacactaaatttctcctttgaggaactgaatacattgggcttagatgaaggggctcctcgacattctaatctgtcttggcaatctcaaacccgccggacaccctccctgagttctcttaactcccaggatagcagcattgagatctcaaaacttacggacaaggtgcaggcagagtaccgggacgcgtaccgcgagtacatcgctcaaatgagtcagcttgaaggaggacctgggtctaccaccatatccggccggagcagtccacactcgacatattacatgggccagtcctcatccggtggatccatccacagcaatcttgagcaggagaaaggcaaagactccgaacctaaacccgatgatggccgaaagagtttcttgatgaaaaggggagatgtgattgattattcatcttcaggagtgtccaccaatgatgcgtctccgctcgatcctataactgaggaggatgagaagagcgatcagagcgggtccaagctgctgcctgggaagaaaagctctgagaggtcctctctattccagacagacctaaagctgaagggaagtggactacgctaccagaaacttccgtctgacgaggatgaatccggaactgaggagagcgacaacacccctctgctgaaggacgataaagatcgcaaagctgagggaaaggtggaaagagtgccaaagtcccccgagcactctgctgagccaattagaacgttcataaaggccaaggaatatctcagtgacgcgttgttggataaaaaggactctagcgatagtggggtgcggagcagcgaaagtagccccaatcattctctccacaatgaagtcgccgatgacagtcaactagaaaaggcaaacctcatagagctagaggacgatagccacagcggcaaacgcggcattccccattctttatctggtctccaggatcctatcatcgccagaatgtcgatctgttcagaggacaaaaagagtccatctgaatgctcccttattgcgagcagccccgaggaaaattggcccgcctgccagaaagcgtacaacttgaaccgcactcctagcaccgtgacgctgaataataactcagctcctgccaatagggctaatcagaattttgatgagatggaaggaatccgggaaacttcacaggttatcctcaggcctagctccagcccaaatccgacgacgatccaaaacgagaatcttaagtccatgacgcataaaagaagccagcgaagcagctacaccagactctctaaagatccaccagagctacatgccgctgcctcaagtgagagtaccggcttcggtgaggaacgggagtccatcctctag

SEQ ID NO: 205452 - DNA, 3096 bp, Artificial Sequence
  derived and/or modified sequence
atgtctgtccttatatcacagagcgtgattaactatgttgaggaagaaaacatccctgccctgaaggccttgctagaaaagtgcaaggacgtcgacgagcgcaacgaatgcggccagacgccactcatgatcgctgccgaacaaggtaatctcgagattgttaaggagctgatcaaaaatggggcaaactgtaatttggaagacctcgacaactggaccgctctcatctcagcctcaaaagaaggacacgtccacatcgttgaggagcttttgaagtgtggggtcaatttagagcatcgtgacatgggagggtggactgccttaatgtgggcttgttacaaggggaggacggatgtagtcgagctgctcctgtctcatggggcaaatcctagcgttaccggcctacaatatagcgtgtaccctattatttgggcggctggccgagggcacgcagacattgtgcatctactcctgcagaacggcgccaaggttaactgttccgataaatacggtacgacaccccttgtctgggcagccaggaaggggcatctggaatgcgtgaagcacttgctcgccatgggagccgacgtcgaccaggagggcgctaacagcatgaccgcactcattgtggcagtgaagggaggttacactcaatccgtcaaggagatcttaaaaagaaaccccaatgtgaatctcaccgacaaagatggtaatacagctctgatgatcgcctctaaggaaggacacaccgagatcgtacaggatctcctggatgcgggcacctacgtaaacatccccgacagatcaggggatacagtcctgataggcgcagttcggggaggacatgttgagatcgtgcgggccctgctgcagaagtacgcggacattgacattcggggtcaggacaataaaacagccctatactgggccgtggagaaagggaatgctacaatggtgagggatatcttgcagtgtaatcctgataccgagatatgtactaaggatggggaaaccccactgataaaagcaacaaaaatgagaaacatcgaagtagttgaactcctccttgataaaggagcgaaagtctccgccgttgataaaaagggagacactcctcttcacatagctatacgaggtcggtccagaaagctagccgagctgttgctaagaaatcctaaagatggcagactcctgtaccggccgaacaaagcgggagagaccccctataacattgactgttcccaccaaaaaagtatacttacccagatcttcggagcccgtcacctgagtcctactgaaaccgacggcgacatgttgggctacgatttgtatagttctgccttggcggacatcctgtccgaacctaccatgcagccacccatctgtgtgggattgtatgcccagtggggaagcggcaagagtttcctgctcaagaaattggaagacgaaatgaagaccttcgctggtcagcagatagaacctctttttcagttttcttggctgatcgtttttttaactctgttgttgtgcggagggctcggattgttatttgcctttaccgtccacccaaatttaggcattgcggttagcctgagtttcctagcgctgttatacatctttttcatcgtgatctacttcggggggcgccgcgaaggcgaatcttggaactgggcatgggttctcagcacaagactggcacggcacattggctaccttgagctgcttctgaagctgatgtttgtcaatccaccggaactccccgaacagaccaccaaggcgcttccggtccggttcctgttcacagattataataggctgtcaagtgtgggtggagagacttccctagccgagatgattgccaccctgtccgatgcatgtgagagggaatttggctttctggcaacaagactatttcgagtctttaagaccgaggacacccaggggaagaagaaatggaaaaagacttgctgccttcctagcttcgtgatcttcctgtttattatcggttgtatcattagcggtatcactctgctggcaatctttagagtcgacccgaaacaccttactgttaacgccgtgctgatcagcattgcttccgtggtggggttggcgtttgtattgaattgtaggacatggtggcaggtcctggacagtttgctgaacagtcaacgtaagaggttacataatgcggcctcgaagcttcataagcttaagtctgaaggatttatgaaagtcttgaaatgcgaggtcgaactaatggcccgcatggctaagactatcgattctttcacccaaaaccagacacgactggttgtgattatcgacgggctcgacgcctgtgagcaagacaaagtgctgcagatgttggatacagttcgtgtactgttcagcaagggtccgttcatcgccatatttgcttccgaccctcatatcatcataaaggctatcaatcagaacctcaactcggtcctgagggactccaatatcaacggtcacgactacatgagaaacattgttcacctccctgtattcctgaattcacgtggcctgagtaatgcccgtaaattcctcgttacatctgccaccaatggggatgtgccctgttcagacaccactggcattcaggaggacgccgataggagagtgtcacagaacagtttaggagagatgaccaagctgggtagtaagaccgcactaaatcgccgggacacctaccgaagaaggcaaatgcaacgaactatcactcgacagatgagcttcgatctgactaagcttctggtgacagaggactggtttagcgatatctccccccagaccatgcgtcgattgctcaacattgttagcgtaacgggccggctgctgcgagccaatcagatctccttcaactgggatagactggcttcttggataaacctgaccgaacagtggccatataggacaagctggctgatcctgtatttggaagagaccgagggtatacctgaccagatgactctaaaaacaatttacgagcgctgctgtggagctgatagttgcgaccgggaccggattgggatcagcaaatccgtcctcgtggccatgctaatggagagttag

SEQ ID NO: 205453 - DNA, 5019 bp, Artificial Sequence
  derived and/or modified sequence
atgatcgctgctgaacaaggaaacctcgaaattgttaaagaactgattaaaaatggagccaactgtaaccttgaggacttagataattggactgcactgatctccgcaagtaaagagggccacgtccatattgtggaagagttacttaaatgtggcgtcaatctggagcaccgggatatggggggctggaccgcgctcatgtgggcttgttacaaaggtcgtactgatgtcgtagaactgctgctttcacacggcgccaacccgtctgtgaccggattgtacagtgtgtaccctatcatctgggccgccggtcggggtcatgcggacatagtgcacctgctgctgcaaaacggagccaaggtgaactgtagcgataaatatggtactactcccctagtctgggctgcgcgaaaagggcatctcgagtgtgtaaagcatctccttgccatgggcgccgacgtagaccaggaaggggcaaactcgatgaccgcactgatcgttgccgttaagggggggtatactcagagcgtgaaagaaatccttaagcgaaatccgaacgtaaatctgacagacaaagacgggaatacagctctgatgatcgcctccaaggaaggccatacagagatcgtccaggatcttttggatgctggcacctacgtgaacatcccggacaggtctggagatacagtgttaatcggagccgttcgcggcgggcacgtagagatcgtccgggcgctcttacagaaatacgctgatatcgatattcgaggccaggataacaagacagcactatactgggcggtcgaaaaaggcaacgctactatggtgcgggacattcttcagtgcaatcctgacacggagatatgtacgaaggacggcgaaacacctctgatcaaagccactaagatgagaaacattgaagtcgtggaactactgctcgacaagggcgcgaaggtgtctgcagtcgacaaaaagggggacacacccttacacatcgccattcgaggcaggtcaaggaaacttgccgaactgcttctcagaaaccctaaggatggaaggctgttgtacaggcctaacaaggccggtgagactccttacaacatcgactgtagtcatcagaaatctatccttacacagatctttggggccagacacctgtctccaaccgaaaccgatggggacatgctcggctacgacctatacagttccgctctggctgatatcctatccgagcccacaatgcagcctcctatttgtgtgggactgtacgctcagtggggctctggaaaatcctttctgttgaaaaaactcgaggatgaaatgaagaccttcgctgggcaacagatcgagcctctgtttcagtttagctggttgatcgtcttcttaacactgctcctgtgtggcggcctgggcctgttatttgcgtttacagttcatccgaacctgggcatcgctgtaagcctgtcttttctcgcattgctctacatcttcttcatagtgatttacttcggaggacgtcgggagggcgagagctggaactgggcatgggttctgtctacccgcctggctagacacattgggtacctggaactattgctgaagctcatgttcgtaaacccccctgaactgcctgagcaaacaacaaaggcgctccccgtgcgattcctcttcacagactacaatcggctttcttctgtcggcggtgagacttccctggcagaaatgattgccaccctgtctgacgcttgcgaacgggagttcggttttctcgccacaagactgtttagagtgtttaagacagaagacacccaggggaagaagaagtggaaaaagacctgctgcctaccatccttcgtcattttcttgttcatcatagggtgtattatttctggtattacactgctggccattttccgcgtggatcccaagcatctcacggtcaacgccgtactcatctcaattgccagtgtggtggggctcgccttcgtcctcaactgtagaacctggtggcaggttctggatagtctcctgaatagccagagaaagcgcctgcacaatgccgcctctaaactgcataagctaaaatctgagggctttatgaaagttctgaagtgcgaagtggaattaatggcgagaatggccaaaaccattgactcgttcactcagaaccagacaagactcgtagttatcatagacgggctggatgcctgcgagcaagataaggtcctgcagatgttagacaccgtccgggtcctgttctcaaaggggcccttcattgccattttcgcgtccgacccccatatcattattaaggccattaaccaaaacctgaattccgtgctgagagattcaaatattaacggccacgactacatgagaaatatcgtgcacttgccagtgttcctgaactcacgcggactcagcaatgctcgcaagtttctggttaccagcgccaccaatggtgacgtgccttgctcggacacgactggcattcaggaagatgccgatagacgggtcagtcaaaactcgctcggcgagatgaccaagctcggttctaagactgcactcaatagaagggacacatatcgaaggcgtcaaatgcagcggactataacaagacagatgagcttcgacctcacaaagctgttggtgaccgaagactggttttccgacattagccctcagactatgcggagactgctgaacattgtgagcgtgaccggaaggctgctccgcgctaatcaaattagtttcaattgggaccgcctggcttcttggatcaacctgacggagcagtggccttaccgaacttcctggctaattctgtatttggaagaaactgaaggaattcctgatcaaatgactctcaaaactatctacgagcggatcagcaagaacattccgaccaccaaggacgtggagcctctgctcgaaatagacggcgatatcaggaattttgaagtgtttttatcttcacggacgcctgtattggtggcacgggatgtgaaggtattcttgccatgcaccgtcaatctcgatcccaaattgcgtgagatcatcgccgatgtgcgagcagcgcgggagcaaataagcattggggggctggcataccccccattgcccctccatgagggtcccccgagagcccccagtggttactcccagcctccgtctgtttgcagctcaacatcctttaacggcccctttgccggcggtgtggttagccctcagccgcactcctcatactactccggaatgaccggcccccagcacccgttttacaacagaggatctgggccggcccccggccctgttgttctattgaactccttgaatgtcgatgcagtttgcgagaaattgaaacagatcgagggattggaccagagtatgctccctcagtactgcactacaataaaaaaggcgaatatcaacggacgggtcctggcgcaatgcaacattgatgagttgaaaaaggagatgaatatgaattttggggattggcacctctttagaagcacagttctagaaatgcggaatgctgaatcccatgtagtgccagaagatcctagattcctgtctgagtctagttccgggcctgcaccacacggcgagcctgcgcggagggcttctcacaacgagttgccccacacagagctgtcgtctcagacaccatacacactcaacttttcatttgaagaactcaatacattaggactcgacgaaggcgccccccggcattctaacctaagctggcagagtcagacccgccgcacacccagcttgtccagccttaattcacaagattcgtctattgagatatccaagcttaccgataaagtccaggcagagtacagggacgcctaccgcgagtacatcgcccagatgtcacagctggagggcggccccggtagtactaccatctcaggtcgcagttctcctcactctacctactacatgggtcagagctcatctggaggatctatccatagcaacttagagcaagagaagggcaaggactccgaacccaaaccagatgacggtaggaaaagctttctgatgaaacggggcgacgttattgactattcctcttccggggtttcaacaaacgacgcctctcctctggaccccatcaccgaggaagatgagaaaagtgaccagtccggctcaaaactcttgcctgggaagaaatcttctgagaggagctccctgttccagactgacctaaagttgaagggctccgggctccgttatcagaaactgccatccgacgaggacgaaagcgggacggaagagtcagacaatacgccactgctgaaagatgacaaggacaggaaagcggaagggaaagtagaaagagtgcccaagtctccggagcatagcgcagaaccaattcggacatttattaaggcaaaggaatatctgagcgacgccctcttggataagaaagacagctcagactccggggtccgcagttcagagtcatctcccaatcattccctgcataacgaagtggcagacgactcacagttagagaaggcaaatctgatcgaactggaggatgattcccattccgggaaacgagggatccctcattcgctatctgggctccaggacccaataattgccaggatgagcatttgctctgaggacaagaagtcaccttcagaatgctccttgatcgctagttcaccagaggagaactggcccgcttgtcaaaaagcctacaatctcaacagaactccatcaaccgtgaccctaaacaacaactcagcgcctgctaacagagcgaatcagaattttgatgaaatggagggtattcgcgaaacatctcaagtaatattacgcccgtcgagttcccctaaccctacaacgatacaaaatgagaacctcaaaagtatgacccacaaacggagccaacgctcatcctatactcgactgtcgaaagatccccccgagttgcatgccgccgctagttctgagagcacaggttttggagaagagcgggagtccattctctag

SEQ ID NO: 205454 - DNA, 5259 bp, Artificial Sequence
  derived and/or modified sequence
atgtccgtgctgatctctcagtccgtgatcaattacgttgaggaggagaatatcccagccctcaaggctctgttagagaaatgtaaagacgtagacgagcgaaacgagtgtggccagacacctctcatgatagcagcagaacagggtaacctggaaatcgtcaaggaactcatcaagaacggagctaattgtaatttagaggatctcgacaactggacggctctgatttcagcctctaaggagggacatgtccacatcgtagaggagctgctcaaatgtggggttaatttagagcacagagacatgggcggctggaccgccctgatgtgggcgtgctataagggccgtactgacgtggttgaattgctgctcagtcacggggccaatccatctgtcacaggactgtatagtgtatatcctattatctgggcggcaggaagaggtcacgccgatattgtgcacctgttactgcagaacggagctaaggtcaattgctctgataagtatggaactacgcctctagtatgggcggcaagaaaggggcatctagagtgcgtgaaacacttacttgccatgggggcagacgtggatcaagaaggggccaattcgatgactgcgcttatcgtcgccgtcaagggaggctacacacagtcagtgaaggaaatactgaaaagaaacccaaatgtgaaccttactgataaggacggcaatacagccctgatgattgcatccaaggaaggtcacactgaaatcgttcaggacctcttagacgcaggaacatatgtgaacatcccagaccgatcgggtgacacagtactcattggcgcagtgagggggggtcacgtcgagatcgtccgtgccctgctgcaaaagtatgccgatattgatataagaggacaggacaacaaaaccgccctttattgggcggtcgagaaggggaatgccacaatggtgagagacatcctacagtgtaatccagatactgagatttgcactaaggatggagaaacacctttaatcaaagccaccaaaatgcgcaacattgaggtggtcgagcttcttctagacaaaggcgccaaggtgtcagctgtggataagaagggagacactccactgcatatagctatcagagggcgttcaagaaagctggccgaattactcctcagaaatccaaaggacggccgcctgctgtataggcctaacaaagccggtgaaaccccttacaacatcgactgcagtcaccaaaagtccatcctaactcagattttcggggccaggcatctgagcccgactgagaccgatggcgacatgctgggatatgatctttactcctcagccttggccgacatactcagcgagcctactatgcagcccccgatctgtgtggggctatacgcacagtgggggagcggcaagtcctttctactgaagaaattggaggatgagatgaaaacattcgccggacagcaaatagagcctttgttccaattctcatggctgattgtgttcctgaccctgctgctttgcggaggcctgggacttcttttcgcttttaccgtccaccctaacctgggcattgccgtgtccttgtcatttcttgccttgctgtacatcttcttcattgttatctacttcggaggacgtcgagaaggcgagagctggaattgggcctgggtgcttagtacacgcctggctcgccacataggctaccttgaactactgttgaaactgatgttcgtcaacccgccagaactgcccgaacagacaacaaaggccctccctgtgaggttcctgttcactgactataaccgactatccagcgtggggggggagacctctctggcagagatgatcgccaccttgtctgatgcatgcgagcgcgagttcggctttctcgccaccagactctttagagtgttcaaaactgaggatactcaggggaagaaaaaatggaagaagacgtgctgcctcccctcgtttgtgatctttctgttcatcatagggtgcattatctctgggattaccttactggcgatctttagagtggatcccaagcacctgaccgtgaatgcggtactgataagtattgcatcagttgttggacttgctttcgttctgaactgtcgtacttggtggcaagttctggactcgttgctgaattcccagcgcaagaggcttcacaatgccgccagcaagctgcacaagctaaagagcgaaggatttatgaaggttttaaagtgtgaagtcgagctgatggctcgcatggccaagactatcgactcctttactcaaaaccagacaagactggtcgttataatagatgggctggacgcatgcgagcaggataaagtcctacagatgttggatactgtgagggttttgttttcaaagggtccatttatcgccatatttgcaagtgacccgcacatcattataaaagctattaaccagaatctcaattccgtgttgagggactctaacattaacggacacgactatatgagaaatattgtgcacctcccagttttcttgaacagcagaggcctctccaatgccagaaaattcctggtgaccagcgccacaaacggtgacgtgccgtgttccgatactactggcatacaggaagacgccgacaggcgggtgtctcagaattcactaggcgagatgaccaaactggggtctaagacagccctgaatcgaagagacacgtaccgccgtaggcagatgcaaagaaccattaccagacaaatgtcatttgacttaaccaagctccttgttacagaagattggttttctgacatcagccctcaaactatgcgcaggttgctcaacattgtatccgtgactggccgacttctgagagcaaaccagataagtttcaattgggaccgcctcgcttcttggattaatctgaccgagcaatggccttacaggaccagttggcttatactctatctggaggagaccgagggcatcccagaccagatgaccctgaagacgatctacgaaaggataagcaaaaatatcccgacaaccaaggatgttgagccactcctggaaatagatggtgacatcaggaattttgaagtctttttaagcagccgaacacctgtgctcgttgctagagatgtaaaagtcttcctgccatgcacagtgaaccttgatccgaaactgcgggaaatcatagctgatgtgcgggccgctcgtgaacagataagcatcggggggctggcctacccgcccttgcctctgcatgaaggtcctccccgggctccatctgggtactcacagcccccatccgtgtgctcctcaacgtcttttaacgggccctttgcagggggggtggtttctcctcagccacactccagctactatagtggcatgacaggccctcaacaccctttctacaacagaccattcttcgcaccctacctttataccccccgctattatcctgggggttctcaacatctgattagcagaccatctgtgaagacttcactccctcgggaccagaacaacggtctgggaagcggtcccgcaccaggacctgtcgttttactgaattccctgaacgttgacgctgtctgcgagaagctcaaacagatcgaaggcctggatcagagtatgctgccccagtattgcacaacaataaagaaggccaacattaacgggagggttctggcacagtgcaacattgatgaactgaagaaagaaatgaatatgaattttggggattggcacctcttccggagtactgtcttggagatgcgcaacgcagaatcacatgtggtccctgaagaccctagatttctctccgagagttccagtgggcccgctccacatggggaacctgccagacgtgccagccataatgagctgccccatactgagttgagctctcagactccctacaccttaaacttctctttcgaggagttgaatacactgggcttggacgagggagcaccgaggcactctaatcttagttggcagtcacagacccgccgcactccctcgttgagctccctgaacagccaggatagcagcattgaaatttccaaactgaccgataaagtgcaggccgagtaccgcgacgcatatagagaatacatagcacagatgtcacagctagaggggggaccagggagcaccacgatttctggccggtctagcccacacagcacctactatatgggccagtcttccagcggcggatcaattcatagtaatttagaacaggagaaggggaaggacagcgagcccaagcccgatgacggaaggaaaagctttctaatgaagcgcggtgacgttattgattattcctcctctggcgtttccacgaatgacgcaagccctctggatcctattaccgaggaagatgagaagtctgatcaatccgggagcaaactgcttcccggcaaaaagtccagtgaaagatcctccctgtttcaaaccgaccttaaattgaaaggctctggactccggtatcaaaagctgcccagtgacgaggatgagtctgggaccgaggaatctgataatacccccctgctgaaagatgacaaagatcgcaaggctgaagggaaagtggagagagtgcctaaatcaccagagcactctgccgaacccattagaacgttcattaaagcaaaggaatacttgtctgatgctctgctcgacaagaaggacagctcagatagcggtgtccggagttccgagagcagcccaaatcactctctccataatgaagtggcagacgacagtcaattggaaaaggctaacctgattgaacttgaggacgattctcactccgggaaaagaggaatcccgcattccctttccggacttcaggaccccatcattgctcggatgtcaatctgttcagaagataagaaatccccaagtgagtgctctttgatcgcgtcttcccccgaggagaattggcccgcatgtcaaaaagcctataatctaaatcgcacaccttctaccgtgaccttgaacaacaactcagcacccgcaaaccgggcgaaccagaatttcgatgagatggagggcatcagagagacgagccaggtgattctgcgcccttcatccagtccgaaccccacaactatccagaatgagaatctcaagagtatgacccacaagcgttctcagagatcttcctacacgcgactgtctaaggacccccccgagctccacgctgcagccagttcggaaagcacaggattcggtgaagagagggaatcaatactgtag

SEQ ID NO: 205455 - DNA, 5259 bp, Artificial Sequence
  derived and/or modified sequence
atgtctgtcctgatcagccagagcgtcattaactacgtggaggaagagaacatccctgcactgaaggcccttctagaaaagtgtaaggacgtcgatgagcgcaatgaatgtggccagacaccgttgatgatcgctgccgaacaaggtaacctggaaatagtcaaggaactgataaaaaatggcgccaactgcaacctcgaggacttagacaactggacagctttgattagtgcaagcaaagagggacatgtccacattgtggaggagctccttaagtgtggtgtgaatcttgagcatcgcgacatgggagggtggacagcacttatgtgggcttgttacaaaggcaggacagatgtggtggaactgctactgtctcatggcgcaaacccatctgtgaccggtctctactctgtgtacccaattatatgggccgcagggagaggccatgctgacatcgtgcatttactgctgcagaacggtgctaaagtgaattgctcagataaatacggcacaactcccctagtctgggcggcccgaaaaggtcacttagagtgtgtgaaacatttattggccatgggagctgacgtagaccaggagggcgctaattctatgactgcactgattgttgccgtgaagggggggtatactcagtctgtgaaagagattcttaagcgcaatccaaatgtgaacctgaccgataaggatggtaatacggccctgatgatcgcatctaaggagggtcacacagagatcgtgcaggatttgcttgacgcaggtacctatgtgaatatacctgaccgctccggcgataccgttctgattggtgccgttaggggagggcatgttgaaatcgtccgtgcactgctgcagaaatacgccgacattgacatcagaggacaggacaataagactgccctatactgggccgttgagaagggaaatgctaccatggttcgagacattctgcaatgcaatcctgacaccgagatctgtacgaaagacggggagacacctctgatcaaagcgacaaaaatgcgcaatattgaggtcgtcgaattgctgttggataagggtgcaaaagtttctgccgtcgataagaagggagacacacccctccatattgcgatccgaggccgttctagaaaacttgctgaacttctgctaaggaatccaaaagatggtcggctcctgtacaggcctaataaagcgggggagacgccatacaacatagattgtagccatcaaaagagtatcctcacccagatttttggcgcaaggcacctgagcccaacggaaaccgatggtgatatgctcgggtacgacctgtattcgtcagctctggcggatatcttatccgagcccacaatgcagccacccatttgcgtaggactctacgcacagtgggggtctggcaagtcttttctgctcaagaaacttgaagatgagatgaaaacctttgctggacagcagattgagcccctgtttcaattttcatggctgattgttttcctgaccctcctgttatgcggaggactagggctgctgttcgcttttacggttcatcccaatctcggcatcgccgtgagcctctcattcctggcgctgctgtatatctttttcatcgtgatttactttggagggcggagggaaggggagtcctggaactgggcctgggttctttccacccggttagcacgccatattggctacctggaactcctgctgaaattaatgttcgtgaacccccccgaattgccagaacagactacaaaagctctcccggtgaggtttctctttacggattacaacagactgtcatctgtcggcggtgagaccagcctggcagagatgatagccacccttagcgatgcctgtgaacgcgagtttggcttcctggctactcgtcttttcagggtgtttaaaacagaggacactcaaggcaagaaaaaatggaaaaaaacatgctgtctgcccagttttgtcatattcctatttatcatcggctgcataatttccggcatcactctcttggctatatttagagtcgaccccaaacacctgactgtcaacgccgtgcttattagtattgccagcgtcgtggggctggcctttgtcctaaattgtcgtacgtggtggcaagttctggactctctcttgaacagccagcgcaagagactgcacaacgccgcaagcaaactgcataagttaaagtccgaagggtttatgaaggtgctgaaatgtgaggttgagctcatggctaggatggcaaaaaccatcgactcatttacccaaaaccagacaaggctcgtagtgataatcgacggtttggatgcctgcgaacaagataaagtgctgcagatgttggacaccgtaagagtgctattctctaagggacccttcattgcgatctttgcctccgacccacacattattattaaggccataaaccaaaatctgaattccgtgctccgagattctaatatcaatggtcatgattacatgcgcaacatcgtgcaccttcccgtgtttctgaactccagaggcctgagtaacgctagaaaattcttagtgacatccgccactaacggagatgtgccctgcagtgatacgaccggtatccaggaggatgccgacaggcgtgtgtcccagaactccttgggcgagatgactaagctgggcagtaaaaccgcactgaacagacgcgatacttaccggcgaaggcaaatgcagaggaccattactcgacagatgtccttcgatttgacgaaacttctagtcaccgaggattggttcagcgacatctcaccccaaacgatgcggcgactgttgaacattgttagcgtgaccggcagactgcttcgtgctaaccagattagcttcaattgggatcgcctagccagctggattaacttgacggagcagtggccctatcggacatcttggctgatcctatatctggaagagaccgagggaatacctgaccagatgacactgaagaccatctatgagcggatttctaaaaatatccctaccaccaaagatgtggaaccactgttagaaatcgatggagatatacgcaatttcgaagtgtttctctcatctcgcactccagttctggtggcccgcgacgtgaaagtgtttcttccatgtactgtgaatctcgaccctaaactgcgcgagattattgccgatgttcgggccgcacgggagcaaatatccatcggtggcctcgcatatccacccttgccactccacgaaggccctcctcgcgccccgtcaggctacagccaaccgcctagtgtgtgctctagcacctcatttaacgggccatttgctggcggcgttgtgtccccgcagccccacagcagttactatagcggcatgaccggccctcagcatcctttctacaaccgccccttcttcgcaccgtatctctataccccaagatattacccaggggggtcacagcacttaatttctaggccatccgttaaaacaagcctgcccagggatcagaacaatggcttaggaagtggcccagccccaggccccgtggtgttgctcaattcactcaatgtcgatgcagtttgtgagaagctgaagcagattgaggggctggatcagagcatgctgcctcagtattgcaccactatcaagaaggcaaacattaacgggagagtcttggctcaatgtaacatcgatgaactcaaaaaagagatgaatatgaacttcggagactggcatctgtttcgctccacggtcctggagatgcgtaatgcggagagccacgtggttcccgaggacccaaggttcttgagcgagagctctagcgggcccgccccccacggtgaaccagcccgaagagcctcccacaatgagctccctcacacagaactttcatcacagaccccatacactctgaacttctcgtttgaagagttgaatactttggggcttgacgaaggcgccccgaggcactctaacctgtcctggcagagccagactaggagaactccaagtctgtccagcctcaattcccaagacagtagtattgaaatatccaaactcacagacaaagtgcaagccgagtacagagacgcatatagggaatacatcgcacagatgagccagttagaaggcgggcctggctccaccacaatatcgggacggtcaagtccccactccacctactatatgggtcaaagctcttccggaggcagtattcactcaaatcttgaacaggaaaaggggaaggactccgagccgaagcctgatgatggaaggaagtcattcttaatgaagcgcggggatgtgatcgactacagctcttctggggtgtcaactaatgacgcttcgccactggatcccatcactgaggaggacgagaaatctgatcaatcgggatcgaagttgctgccagggaagaaatcatccgaaagaagtagtttgtttcagacggatctaaaactgaaggggagcggtttgaggtatcagaagttgccctccgatgaagatgaaagcggaactgaggagagcgacaatacaccgttgctgaaggatgacaaagataggaaggcagaagggaaggtcgaacgcgtgccgaagagccccgaacattcagcggagccaattcgcacatttattaaagctaaagagtacctttccgacgctctgctggataagaaggacagcagcgatagcggcgtgaggagtagcgaatcctccccaaatcactctctccacaacgaggttgccgacgattcccagttggagaaagcaaacctcatcgaattagaggacgactctcactctggcaaaagaggaataccacattccctgagcggcctccaggaccccattatcgccagaatgtcaatctgttcagaggacaaaaagtctccaagtgagtgctcactcattgctagctcgcctgaggaaaattggccagcctgtcaaaaagcttacaacctcaatcggaccccatcgacagtgacactcaacaacaactctgcaccagcaaatagggctaatcagaactttgacgagatggagggcatccgggaaacatcccaggtgatactgaggccatcctcctcacccaacccgacgactatacagaacgaaaatctgaaatcaatgacccacaagcgatcccaacgttcaagttatactagattgtccaaagacccgcccgaattgcatgcagcagcatccagcgagtccaccggtttcggcgaagaaagagaatctattctgtag

SEQ ID NO: 205456 - DNA, 2985 bp, Artificial Sequence
  derived and/or modified sequence
atggtgcgggatatcctgcaatgcaatccagacaccgaaatttgcacgaaggacggggaaaccccattaattaaagcaacgaaaatgcgcaacattgaagtggtggaattactcctggataagggcgcgaaggtttcggcagtggataagaagggggacactcctctccacatcgcgatccgaggtaggtcacgaaaactggctgagttactgctcaggaacccaaaggacggccgactcctgtatagaccaaacaaagccggagagacaccttataatatcgactgttctcatcagaaatcaattctgacacagatttttggcgcacggcatctcagccccacagagacggacggggacatgctgggttacgacctttactcttccgcgctcgctgacattctgtctgaacccaccatgcagccccccatctgcgtcgggctctatgcacagtggggatcaggcaaaagtttcctgctgaaaaagctagaggacgagatgaagactttcgctgggcagcaaatcgagccgctgttccagttttcttggttgattgttttcttaacgttgctcctttgtggggggcttggactactgttcgcattcaccgtccatccaaatctaggcatcgctgtttccttatcatttttggcactgctgtatatcttctttatcgttatctattttggcgggcgccgcgagggagagagctggaattgggcctgggttcttagcacaaggttagctcgtcacattgggtatttagaactgctcctgaagctgatgtttgtcaatccccccgaactcccggagcagacgacaaaggcacttcctgtgaggtttctttttaccgattacaaccgcctctcttccgtagggggggaaaccagccttgccgagatgatcgccacactcagcgatgcctgtgaacgcgagttcggattcctggccacacggctcttccgagtgttcaaaaccgaggatacccagggaaaaaaaaagtggaagaagacatgttgcctgccatcctttgtaatattcctattcattattgggtgtattattagtggaattacgctcctcgcaatattccgagtggatccgaagcatctgacagtgaacgctgttttgattagcatcgctagcgtggtggggttagcctttgtgcttaattgccggacgtggtggcaggtgctggactccttacttaactcccagagaaagcgcttgcacaatgctgccagtaagctacacaaactaaagagcgaggggttcatgaaggtgcttaagtgtgaggttgagctgatggcacggatggccaagacgattgattcctttacgcagaaccagacccgcttagtggtaataattgacggattggatgcgtgtgaacaggataaggtcttacagatgctagacaccgtgcgggtcttattcagcaagggaccattcatagccatcttcgcatcagatccccacatcataatcaaggcaattaatcagaatctcaattccgttctgagggacagcaacattaatggacatgattacatgcgaaacatcgttcatcttcctgtgttcctgaacagccgcggtctgagtaacgctagaaaattcctggtgacctctgcaacgaacggtgacgttccatgctctgacacaactgggatacaggaagatgccgataggcgcgtctctcagaattcattaggagagatgactaagctcggatcgaagaccgccttgaatcggcgagacacttaccgccgccgccagatgcagagaaccatcactcgacagatgagctttgacttaactaagctcctcgtaacggaggactggtttagcgatatttcacctcaaaccatgcgaagattgctgaacattgtgagcgtgactggacgcttgcttagagctaatcagatcagtttcaactgggataggctggccagttggatcaacttgacagagcaatggccctatcgcactagttggctcattctctatctagaagaaactgaagggataccagaccagatgactctgaaaactatctatgaaaggatttcaaagaacatcccaactactaaagacgtagaaccacttttggaaattgacggggatatacggaactttgaggtgttcctctcatctcgcacaccagtactggtggctcgtgacgtgaaggttttccttccttgcacagtgaacttagaccccaaactgcgcgagatcattgccgacgtcagggcggccagggagcagatcagtattggcggcctggcctacccacccctacctctgcacgagggtcctccccgagccccgtctgggtactctcagccgccttctgtgtgcagctccacttcgttcaacgggccctttgccggaggagtcgttagccctcagccccactctagctactactcaggcatgacaggcccgcagcaccccttctataatagggggtcaggtccagctcccgggcccgtggtccttcttaattcactgaacgttgatgctgtgtgcgagaaactgaagcagatcgaggggctggaccagagtatgctgccacaatactgtactactatcaagaaggcgaatataaacgggagggtactggcacaatgcaatatcgatgaactcaagaaggagatgaacatgaatttcggagactggcacctgttccgttctaccgtactggagatgaggaacgccgagagtcatgtggtgcccgaagatcccaggttcctgagcgagagttcaagcggtcccgcaccacacggtgaaccagcccggagagcatcccacaacgagttgccccacactgaactcagttctcaaactccatacacactgaatttcagcttcgaagaactgaacactctgggtctagacgagggcgccccacggcactctaacctaagctggcaggaagagaatgctggcctagagatcgattcttccagtgaagatcccgactag

SEQ ID NO: 205457 - DNA, 7361 bp, Artificial Sequence
  derived and/or modified sequence
acgtgatctgtcagttcgcggagagggaagaatatggccgccgggtgtggtgagggcgacgcgcttgcagtcgccgtctcttgcttccccgtcctctgacatcgcctgcagccgagcgggcccgttccgccggagctgaggaccaggtattcaaataaagttaattgcagctttctgtgaaaatgtcagttttgatatcacagagcgtcataaattatgtagaggaagaaaacattcctgctctgaaagctcttcttgaaaaatgcaaagatgtagatgagagaaatgagtgtggccagactccactgatgatagctgccgaacaaggcaatctggaaatagtgaaggaattaattaagaatggagctaactgcaatctggaagatttggataattggacagcacttatatctgcatcgaaagaagggcatgtgcacatcgtagaggaactactgaaatgtggggttaacttggagcaccgtgatatgggaggatggacagctcttatgtgggcatgttacaaaggccgtactgacgtagtagagttgcttctttctcatggtgccaatccaagtgtcactggtctgtacagtgtttacccaatcatttgggcagcagggagaggccatgcagatatagttcatcttttactgcaaaatggtgctaaagtcaactgctctgataagtatggaaccacccctttagtttgggctgcacgaaagggtcatttggaatgtgtgaaacatttattggccatgggagctgatgtggatcaagaaggagctaattcaatgactgcacttattgtggcagtgaaaggaggttacacacagtcagtaaaagaaattttgaagaggaatccaaatgtaaacttaacagataaagatggaaatacagctttgatgattgcatcaaaggagggacatacggagattgtgcaggatctgctcgacgctggaacatatgtgaacatacctgacaggagtggggatactgtgttgattggcgctgtcagaggtggtcatgttgaaattgttcgagcgcttctccaaaaatatgctgatatagacattagaggacaggataataaaactgctttgtattgggctgttgagaaaggaaatgcaacaatggtgagagatatcttacagtgcaatcctgacactgaaatatgcacaaaggatggtgaaacgccacttataaaggctaccaagatgagaaacattgaagtggtggagctgctgctagataaaggtgctaaagtgtctgctgtagataagaaaggagatactcccttgcatattgctattcgtggaaggagccggaaactggcagaactgcttttaagaaatcccaaagatgggcgattactttataggcccaacaaagcaggcgagactccttataatattgactgtagccatcagaagagtattttaactcaaatatttggagccagacacttgtctcctactgaaacagacggtgacatgcttggatatgatttatatagcagtgccctggcagatattctcagtgagcctaccatgcagccacccatttgtgtggggttatatgcacagtggggaagtgggaaatctttcttactcaagaaactagaagacgaaatgaaaaccttcgccggacaacagattgagcctctctttcagttctcatggctcatagtgtttcttaccctgctactttgtggagggcttggtttattgtttgccttcacggtccacccaaatcttggaatagcagtgtcactgagcttcttggctctcttatatatattctttattgtcatttactttggtggacgaagagaaggagagagttggaattgggcctgggtcctcagcactagattggcaagacatattggatatttggaactcctccttaaattgatgtttgtgaatccacctgagttgccagagcagactactaaagctttacctgtgaggtttttgtttacagattacaatagactgtccagtgtaggtggagaaacttctctggctgaaatgattgcaaccctctcggatgcttgtgaaagagagtttggctttttggcaaccaggctttttcgagtattcaagactgaagatactcagggtaaaaagaaatggaaaaaaacatgttgtctcccatcttttgtcatcttcctttttatcattggctgcattatatctggaattactcttctggctatatttagagttgacccaaagcatctgactgtaaatgctgtcctcatatcaatcgcatctgtagtgggattggcctttgtgttgaactgtcgtacatggtggcaagtgctggactcgctcctgaattcccaaagaaaacgcctccataatgcagcctccaaactgcacaaattgaaaagtgaaggattcatgaaagttcttaaatgtgaagtggaattgatggccaggatggcaaaaaccattgacagcttcactcagaatcagacaaggctggtggtcatcatcgatggattagatgcctgtgagcaggacaaagtccttcagatgctggacactgtccgagttctgttttcaaaaggcccgttcattgccatttttgcaagtgatccacatattatcataaaggcaattaaccagaacctcaatagtgtgcttcgggattcaaatataaatggccatgactacatgcgcaacatagtccacttgcctgtgttccttaatagtcgtggactaagcaatgcaagaaaatttctcgtaacttcagcaacaaatggagacgttccatgctcagatactacagggatacaggaagatgctgacagaagagtttcacagaacagccttggggagatgacaaaacttggtagcaagacagccctcaatagacgggacacttaccgaagaaggcagatgcagaggaccatcactcgccagatgtcctttgatcttacaaaactgctggttaccgaggactggttcagtgacatcagtccccagaccatgagaagattacttaatattgtttctgtgacaggacgattactgagagccaatcagattagtttcaactgggacaggcttgctagctggatcaaccttactgagcagtggccataccggacttcatggctcatattatatttggaagagactgaaggtattccagatcaaatgacattaaaaaccatctacgaaagaatatcaaagaatattccaacaactaaggatgttgagccacttcttgaaattgatggagatataagaaattttgaagtgtttttgtcttcaaggaccccagttcttgtggctcgagatgtaaaagtctttttgccatgcactgtaaacctagatcccaaactacgggaaattattgcagatgttcgtgctgccagagagcagatcagtattggaggactggcgtaccccccgctccctctacatgagggtcctcctagggcgccatcagggtacagccagcccccatccgtgtgctcttccacgtccttcaatgggcccttcgcaggtggagtggtgtcaccacagcctcacagcagctattacagcggcatgacgggccctcagcatcccttctacaacaggccattctttgccccatacctttacacgccaaggtattaccctggcggctcccaacatctcatctcacgtccatcagtaaaaacgagtttgcccagagatcagaacaatggcctagaagttatcaaggaggatgctgctgaggggctttcttcacccacagactcctcgagggggtcaggcccagccccaggcccagtggtattactgaattcactgaatgtggatgcagtatgtgagaagctgaaacaaatagaagggctggaccagagtatgctgcctcagtattgtaccacgatcaaaaaggcaaacataaatggccgtgtgttagctcagtgtaacattgatgagctgaagaaagagatgaatatgaattttggagactggcaccttttcagaagcacagtactagaaatgagaaacgcagaaagccacgtggtccctgaagacccacgtttcctcagtgagagcagcagtggcccagccccgcacggtgagcctgctcgccgcgcttcccacaacgagctgcctcacaccgagctctccagccagacgccctacacactcaacttcagcttcgaagagctgaacacgcttggcctggatgaaggtgcccctcgtcacagtaatctaagttggcagtcacaaactcgcagaaccccaagtctttcgagtctcaattcccaggattccagtattgaaatttcaaagcttactgataaggtgcaggccgagtatagagatgcctatagagaatacattgctcagatgtcccagttagaagggggccccgggtctacaaccattagtggcagatcttctccacatagcacatattacatgggtcagagttcatcagggggctctattcattcaaacctagagcaagaaaaggggaaggatagtgaaccaaagcccgatgatgggaggaagtcctttctaatgaagaggggagatgttatcgattattcatcatcaggggtttccaccaacgatgcttcccccctggatcctatcactgaagaagatgaaaaatcagatcagtcaggcagtaagcttctcccaggcaagaaatcttccgaaaggtcaagcctcttccagacagatttgaagcttaagggaagtgggctgcgctatcaaaaactcccaagtgacgaggatgaatctggcacagaagaatcagataacactccactgctcaaagatgacaaagacagaaaagccgaagggaaagtagagagagtgccgaagtctccagaacacagtgctgagccgatcagaaccttcattaaagccaaagagtatttatcggatgcgctccttgacaaaaaggattcatcggattcaggagtgagatccagtgaaagttctcccaatcactctctgcacaatgaagtggcggatgactcccagcttgaaaaggcaaatctcatagagctggaagatgacagtcacagcggaaagcggggaatcccacatagcctgagtggcctgcaagatccaattatagctcggatgtccatttgttcagaagacaagaaaagcccttccgaatgcagcttgatagccagcagccctgaagaaaactggcctgcatgccagaaagcctacaacctgaaccgaactcccagcaccgtgactctgaacaacaatagtgctccagccaacagagccaatcaaaatttcgatgagatggagggaattagggagacttctcaagtcattttgaggcctagttccagtcccaacccaaccactattcagaatgagaatctaaaaagcatgacacataagcgaagccaacgttcaagttacacaaggctctccaaagatcctccggagctccatgcagcagcctcttctgagagcacaggctttggagaagaaagagaaagcattctttgagaaaaacaagcaaaggagaagagtgttactgtacctttatgacagaattgtcctggattttgactccatccacgcccatcacctttctacattttgctgacagataactaaccgatgatgaggccgaggtaaaagagacatctgcagtgtgacagaagggagcatgagaagcatggctcaccagccagcctctgtggtctttgtaattagaagcttcagaactcactaatactactgtacctttcattggcgcattaccccataaaactttttgagacgaggtgagatctgagtataaagataggtcagaagtattttaaagggcttaatgtgccaaaaagaaaaaaagctagagaccctttttgcaaacatttggtgaccacacatttgagggaagacgtggcgttaggtgaagcagaagcaaaccctgctcttaggggctcacctaggtgagtgcacagcctgtgacgctacagggagaggctgagtaaaccgagatccagcgttctgtatggcaggggtattgcttatcacagaggttctgaagagtaggaagtacataatgaagagggctttaaaaattgccaacaaagtgagtcaccagggctggcagtagtgtgacggggctgtcctgagctgttaggagagtagatgcggggagggctggtgacctccgtgggtttatatgtcggaaactcttctctccaaatcccaggcctggcttccagcaccatccagctgtgcccaagaagccaccctggtctgttctccaactcttttaaatggtgcccaacttttctaagtgagcttagcaatgagaagaaaaaaaaacatgaattctttttctggaaaatcagggagacatgggtaataataggtactaataaatatttatagatgagtgaatgaggaaataattacatcaaaaaggtcagtgacaattgataaatgacaaggaaatatttaattaggtaaaactaaatcattgctctctatactaggatagactttatctacttcatctgttcctaagtcagcatgttagttctggggaaggatcataagaaaggaaatactttttaaaaaaaaatttggaaacatgtaacaaagcaagggtaaaatatatatatatatctatataagtgctgtgactgtaaaagtgtactttccattaattattagccgagttaagagaatggtcacattgaagtactgtgtggactagaaatgtaccctgtcatcatgcaatgaaatattgttatcgttttaacatagctcatttatgtagaatgaattctggtggtttaccccaagtcacagttaggacggtagatggtgagatcgcagatgcgctattatctagattcagtgttacattttcgatgtttatcactcagtgggtttttattaatatgctgattaagttatttactgggccagtcattgtgctaaatagttgctcttttgtgtttcattgccttgatgtttgagtgtaatctagcattttaatacagtgtttattttgcatgatctttaacaaatgttttaagcaattttaaaaaggcaggatgttattgacattatacactgaagtcttaacattttaacatttatagtgcttatttgcaaaattgtataattaggaattatttcagagacaatgttttctttttcaggtgagtagttgccgcgtaatatcattggagtacattctttatactgtttgtgaaattaatactagcatattaagtgtacaaatagatttagaaaacaataaaaaattgcatgctattctgactcatgaatttttattcactatgatgattcacattttgattaaaaataaaagtagtttgtgtgttt

SEQ ID NO: 205458 - DNA, 3765 bp, Artificial Sequence
  derived and/or modified sequence
ggaagaatatggccgccgggtgtggtgagggcgacgcgcttgcagtcgccgtctcttgcttccccgtcctctgacatcgcctgcagccgagcgggcccgttccgccggagctgaggaccaggtattcaaataaagttaattgcagctttctgtgaaaatgtcagttttgatatcacagagcgtcataaattatgtagaggaagaaaacattcctgctctgaaagctcttcttgaaaaatgcaaagatgtagatgagagaaatgagtgtggccagactccactgatgatagctgccgaacaaggcaatctggaaatagtgaaggaattaattaagaatggagctaactgcaatctggaagatttggataattggacagcacttatatctgcatcgaaagaagggcatgtgcacatcgtagaggaactactgaaatgtggggttaacttggagcaccgtgatatgggaggatggacagctcttatgtgggcatgttacaaaggccgtactgacgtagtagagttgcttctttctcatggtgccaatccaagtgtcactggtctgcagtacagtgtttacccaatcatttgggcagcagggagaggccatgcagatatagttcatcttttactgcaaaatggtgctaaagtcaactgctctgataagtatggaaccacccctttagtttgggctgcacgaaagggtcatttggaatgtgtgaaacatttattggccatgggagctgatgtggatcaagaaggagctaattcaatgactgcacttattgtggcagtgaaaggaggttacacacagtcagtaaaagaaattttgaagaggaatccaaatgtaaacttaacagataaagatggaaatacagctttgatgattgcatcaaaggagggacatacggagattgtgcaggatctgctcgacgctggaacatatgtgaacatacctgacaggagtggggatactgtgttgattggcgctgtcagaggtggtcatgttgaaattgttcgagcgcttctccaaaaatatgctgatatagacattagaggacaggataataaaactgctttgtattgggctgttgagaaaggaaatgcaacaatggtgagagatatcttacagtgcaatcctgacactgaaatatgcacaaaggatggtgaaacgccacttataaaggctaccaagatgagaaacattgaagtggtggagctgctgctagataaaggtgctaaagtgtctgctgtagataagaaaggagatactcccttgcatattgctattcgtggaaggagccggaaactggcagaactgcttttaagaaatcccaaagatgggcgattactttataggcccaacaaagcaggcgagactccttataatattgactgtagccatcagaagagtattttaactcaaatatttggagccagacacttgtctcctactgaaacagacggtgacatgcttggatatgatttatatagcagtgccctggcagatattctcagtgagcctaccatgcagccacccatttgtgtggggttatatgcacagtggggaagtgggaaatctttcttactcaagaaactagaagacgaaatgaaaaccttcgccggacaacagattgagcctctctttcagttctcatggctcatagtgtttcttaccctgctactttgtggagggcttggtttattgtttgccttcacggtccacccaaatcttggaatagcagtgtcactgagcttcttggctctcttatatatattctttattgtcatttactttggtggacgaagagaaggagagagttggaattgggcctgggtcctcagcactagattggcaagacatattggatatttggaactcctccttaaattgatgtttgtgaatccacctgagttgccagagcagactactaaagctttacctgtgaggtttttgtttacagattacaatagactgtccagtgtaggtggagaaacttctctggctgaaatgattgcaaccctctcggatgcttgtgaaagagagtttggctttttggcaaccaggctttttcgagtattcaagactgaagatactcagggtaaaaagaaatggaaaaaaacatgttgtctcccatcttttgtcatcttcctttttatcattggctgcattatatctggaattactcttctggctatatttagagttgacccaaagcatctgactgtaaatgctgtcctcatatcaatcgcatctgtagtgggattggcctttgtgttgaactgtcgtacatggtggcaagtgctggactcgctcctgaattcccaaagaaaacgcctccataatgcagcctccaaactgcacaaattgaaaagtgaaggattcatgaaagttcttaaatgtgaagtggaattgatggccaggatggcaaaaaccattgacagcttcactcagaatcagacaaggctggtggtcatcatcgatggattagatgcctgtgagcaggacaaagtccttcagatgctggacactgtccgagttctgttttcaaaaggcccgttcattgccatttttgcaagtgatccacatattatcataaaggcaattaaccagaacctcaatagtgtgcttcgggattcaaatataaatggccatgactacatgcgcaacatagtccacttgcctgtgttccttaatagtcgtggactaagcaatgcaagaaaatttctcgtaacttcagcaacaaatggagacgttccatgctcagatactacagggatacaggaagatgctgacagaagagtttcacagaacagccttggggagatgacaaaacttggtagcaagacagccctcaatagacgggacacttaccgaagaaggcagatgcagaggaccatcactcgccagatgtcctttgatcttacaaaactgctggttaccgaggactggttcagtgacatcagtccccagaccatgagaagattacttaatattgtttctgtgacaggacgattactgagagccaatcagattagtttcaactgggacaggcttgctagctggatcaaccttactgagcagtggccataccggacttcatggctcatattatatttggaagagactgaaggtattccagatcaaatgacattaaaaaccatctacgaaagatgctgtggagcagacagttgtgaccgagaccgaattggcatttccaagtcagtgttagttgccatgttgatggagagctgagaaaagccattttaatggcatttgcaaataagcaggacatggaacaggccatgactccctcagagatgcacattcacttgggttatctgcctcgaaggactgaaaatggcaaatattcaaaacttcagcaaccagaggtactggccttcatgagacaacggaatgggtagttgaaacattaaagagcaaacaacagtacagtcacttctgctcctctgaaatgaagacggcctcacatatccctttggaaacaatcaagtgtgcttctcatgactaaaggttaaagctgtaagactgttggcatttactgaactgactgtgacattagtaataaatataaaaaatagatatttagttgaaagggtaattcatcttgattgagccaattgtgttctatgttgtaggacatgctgcttccctgctttcttaatgttaagtacacattccatttgtatgggatttttattcaaatagtcctattaaagtatgcacttttgttgggaaaaaacaaa

SEQ ID NO: 205459 - DNA, 7190 bp, Artificial Sequence
  derived and/or modified sequence
acgtgatctgtcagttcgcggagagggaagaatatggccgccgggtgtggtgagggcgacgcgcttgcagtcgccgtctcttgcttccccgtcctctgacatcgcctgcagccgagcgggcccgttccgccggagctgaggaccaggtattcaaataaagttaattgcagctttctgtgaaaatgtcagttttgatatcacagagcgtcataaattatgtagaggaagaaaacattcctgctctgaaagctcttcttgaaaaatgcaaagatgtagatgagagaaatgagtgtggccagactccactgatgatagctgccgaacaaggcaatctggaaatagtgaaggaattaattaagaatggagctaactgcaatctggaagatttggataattggacagcacttatatctgcatcgaaagaagggcatgtgcacatcgtagaggaactactgaaatgtggggttaacttggagcaccgtgatatgggaggatggacagctcttatgtgggcatgttacaaaggccgtactgacgtagtagagttgcttctttctcatggtgccaatccaagtgtcactggtctgtacagtgtttacccaatcatttgggcagcagggagaggccatgcagatatagttcatcttttactgcaaaatggtgctaaagtcaactgctctgataagtatggaaccacccctttagtttgggctgcacgaaagggtcatttggaatgtgtgaaacatttattggccatgggagctgatgtggatcaagaaggagctaattcaatgactgcacttattgtggcagtgaaaggaggttacacacagtcagtaaaagaaattttgaagaggaatccaaatgtaaacttaacagataaagatggaaatacagctttgatgattgcatcaaaggagggacatacggagattgtgcaggatctgctcgacgctggaacatatgtgaacatacctgacaggagtggggatactgtgttgattggcgctgtcagaggtggtcatgttgaaattgttcgagcgcttctccaaaaatatgctgatatagacattagaggacaggataataaaactgctttgtattgggctgttgagaaaggaaatgcaacaatggtgagagatatcttacagtgcaatcctgacactgaaatatgcacaaaggatggtgaaacgccacttataaaggctaccaagatgagaaacattgaagtggtggagctgctgctagataaaggtgctaaagtgtctgctgtagataagaaaggagatactcccttgcatattgctattcgtggaaggagccggaaactggcagaactgcttttaagaaatcccaaagatgggcgattactttataggcccaacaaagcaggcgagactccttataatattgactgtagccatcagaagagtattttaactcaaatatttggagccagacacttgtctcctactgaaacagacggtgacatgcttggatatgatttatatagcagtgccctggcagatattctcagtgagcctaccatgcagccacccatttgtgtggggttatatgcacagtggggaagtgggaaatctttcttactcaagaaactagaagacgaaatgaaaaccttcgccggacaacagattgagcctctctttcagttctcatggctcatagtgtttcttaccctgctactttgtggagggcttggtttattgtttgccttcacggtccacccaaatcttggaatagcagtgtcactgagcttcttggctctcttatatatattctttattgtcatttactttggtggacgaagagaaggagagagttggaattgggcctgggtcctcagcactagattggcaagacatattggatatttggaactcctccttaaattgatgtttgtgaatccacctgagttgccagagcagactactaaagctttacctgtgaggtttttgtttacagattacaatagactgtccagtgtaggtggagaaacttctctggctgaaatgattgcaaccctctcggatgcttgtgaaagagagtttggctttttggcaaccaggctttttcgagtattcaagactgaagatactcagggtaaaaagaaatggaaaaaaacatgttgtctcccatcttttgtcatcttcctttttatcattggctgcattatatctggaattactcttctggctatatttagagttgacccaaagcatctgactgtaaatgctgtcctcatatcaatcgcatctgtagtgggattggcctttgtgttgaactgtcgtacatggtggcaagtgctggactcgctcctgaattcccaaagaaaacgcctccataatgcagcctccaaactgcacaaattgaaaagtgaaggattcatgaaagttcttaaatgtgaagtggaattgatggccaggatggcaaaaaccattgacagcttcactcagaatcagacaaggctggtggtcatcatcgatggattagatgcctgtgagcaggacaaagtccttcagatgctggacactgtccgagttctgttttcaaaaggcccgttcattgccatttttgcaagtgatccacatattatcataaaggcaattaaccagaacctcaatagtgtgcttcgggattcaaatataaatggccatgactacatgcgcaacatagtccacttgcctgtgttccttaatagtcgtggactaagcaatgcaagaaaatttctcgtaacttcagcaacaaatggagacgttccatgctcagatactacagggatacaggaagatgctgacagaagagtttcacagaacagccttggggagatgacaaaacttggtagcaagacagccctcaatagacgggacacttaccgaagaaggcagatgcagaggaccatcactcgccagatgtcctttgatcttacaaaactgctggttaccgaggactggttcagtgacatcagtccccagaccatgagaagattacttaatattgtttctgtgacaggacgattactgagagccaatcagattagtttcaactgggacaggcttgctagctggatcaaccttactgagcagtggccataccggacttcatggctcatattatatttggaagagactgaaggtattccagatcaaatgacattaaaaaccatctacgaaagaatatcaaagaatattccaacaactaaggatgttgagccacttcttgaaattgatggagatataagaaattttgaagtgtttttgtcttcaaggaccccagttcttgtggctcgagatgtaaaagtctttttgccatgcactgtaaacctagatcccaaactacgggaaattattgcagatgttcgtgctgccagagagcagatcagtattggaggactggcgtaccccccgctccctctacatgagggtcctcctagggcgccatcagggtacagccagcccccatccgtgtgctcttccacgtccttcaatgggcccttcgcaggtggagtggtgtcaccacagcctcacagcagctattacagcggcatgacgggccctcagcatcccttctacaacagggggtcaggcccagccccaggcccagtggtattactgaattcactgaatgtggatgcagtatgtgagaagctgaaacaaatagaagggctggaccagagtatgctgcctcagtattgtaccacgatcaaaaaggcaaacataaatggccgtgtgttagctcagtgtaacattgatgagctgaagaaagagatgaatatgaattttggagactggcaccttttcagaagcacagtactagaaatgagaaacgcagaaagccacgtggtccctgaagacccacgtttcctcagtgagagcagcagtggcccagccccgcacggtgagcctgctcgccgcgcttcccacaacgagctgcctcacaccgagctctccagccagacgccctacacactcaacttcagcttcgaagagctgaacacgcttggcctggatgaaggtgcccctcgtcacagtaatctaagttggcagtcacaaactcgcagaaccccaagtctttcgagtctcaattcccaggattccagtattgaaatttcaaagcttactgataaggtgcaggccgagtatagagatgcctatagagaatacattgctcagatgtcccagttagaagggggccccgggtctacaaccattagtggcagatcttctccacatagcacatattacatgggtcagagttcatcagggggctctattcattcaaacctagagcaagaaaaggggaaggatagtgaaccaaagcccgatgatgggaggaagtcctttctaatgaagaggggagatgttatcgattattcatcatcaggggtttccaccaacgatgcttcccccctggatcctatcactgaagaagatgaaaaatcagatcagtcaggcagtaagcttctcccaggcaagaaatcttccgaaaggtcaagcctcttccagacagatttgaagcttaagggaagtgggctgcgctatcaaaaactcccaagtgacgaggatgaatctggcacagaagaatcagataacactccactgctcaaagatgacaaagacagaaaagccgaagggaaagtagagagagtgccgaagtctccagaacacagtgctgagccgatcagaaccttcattaaagccaaagagtatttatcggatgcgctccttgacaaaaaggattcatcggattcaggagtgagatccagtgaaagttctcccaatcactctctgcacaatgaagtggcggatgactcccagcttgaaaaggcaaatctcatagagctggaagatgacagtcacagcggaaagcggggaatcccacatagcctgagtggcctgcaagatccaattatagctcggatgtccatttgttcagaagacaagaaaagcccttccgaatgcagcttgatagccagcagccctgaagaaaactggcctgcatgccagaaagcctacaacctgaaccgaactcccagcaccgtgactctgaacaacaatagtgctccagccaacagagccaatcaaaatttcgatgagatggagggaattagggagacttctcaagtcattttgaggcctagttccagtcccaacccaaccactattcagaatgagaatctaaaaagcatgacacataagcgaagccaacgttcaagttacacaaggctctccaaagatcctccggagctccatgcagcagcctcttctgagagcacaggctttggagaagaaagagaaagcattctttgagaaaaacaagcaaaggagaagagtgttactgtacctttatgacagaattgtcctggattttgactccatccacgcccatcacctttctacattttgctgacagataactaaccgatgatgaggccgaggtaaaagagacatctgcagtgtgacagaagggagcatgagaagcatggctcaccagccagcctctgtggtctttgtaattagaagcttcagaactcactaatactactgtacctttcattggcgcattaccccataaaactttttgagacgaggtgagatctgagtataaagataggtcagaagtattttaaagggcttaatgtgccaaaaagaaaaaaagctagagaccctttttgcaaacatttggtgaccacacatttgagggaagacgtggcgttaggtgaagcagaagcaaaccctgctcttaggggctcacctaggtgagtgcacagcctgtgacgctacagggagaggctgagtaaaccgagatccagcgttctgtatggcaggggtattgcttatcacagaggttctgaagagtaggaagtacataatgaagagggctttaaaaattgccaacaaagtgagtcaccagggctggcagtagtgtgacggggctgtcctgagctgttaggagagtagatgcggggagggctggtgacctccgtgggtttatatgtcggaaactcttctctccaaatcccaggcctggcttccagcaccatccagctgtgcccaagaagccaccctggtctgttctccaactcttttaaatggtgcccaacttttctaagtgagcttagcaatgagaagaaaaaaaaacatgaattctttttctggaaaatcagggagacatgggtaataataggtactaataaatatttatagatgagtgaatgaggaaataattacatcaaaaaggtcagtgacaattgataaatgacaaggaaatatttaattaggtaaaactaaatcattgctctctatactaggatagactttatctacttcatctgttcctaagtcagcatgttagttctggggaaggatcataagaaaggaaatactttttaaaaaaaaatttggaaacatgtaacaaagcaagggtaaaatatatatatatatctatataagtgctgtgactgtaaaagtgtactttccattaattattagccgagttaagagaatggtcacattgaagtactgtgtggactagaaatgtaccctgtcatcatgcaatgaaatattgttatcgttttaacatagctcatttatgtagaatgaattctggtggtttaccccaagtcacagttaggacggtagatggtgagatcgcagatgcgctattatctagattcagtgttacattttcgatgtttatcactcagtgggtttttattaatatgctgattaagttatttactgggccagtcattgtgctaaatagttgctcttttgtgtttcattgccttgatgtttgagtgtaatctagcattttaatacagtgtttattttgcatgatctttaacaaatgttttaagcaattttaaaaaggcaggatgttattgacattatacactgaagtcttaacattttaacatttatagtgcttatttgcaaaattgtataattaggaattatttcagagacaatgttttctttttcaggtgagtagttgccgcgtaatatcattggagtacattctttatactgtttgtgaaattaatactagcatattaagtgtacaaatagatttagaaaacaataaaaaattgcatgctattctgactcatgaatttttattcactatgatgattcacattttgattaaaaataaaagtagtttgtgtgttt

SEQ ID NO: 205460 - DNA, 7304 bp, Artificial Sequence
  derived and/or modified sequence
acgtgatctgtcagttcgcggagagggaagaatatggccgccgggtgtggtgagggcgacgcgcttgcagtcgccgtctcttgcttccccgtcctctgacatcgcctgcagccgagcgggcccgttccgccggagctgaggaccaggtattcaaataaagttaattgcagctttctgtgaaaatgtcagttttgatatcacagagcgtcataaattatgtagaggaagaaaacattcctgctctgaaagctcttcttgaaaaatgcaaagatgtagatgagagaaatgagtgtggccagactccactgatgatagctgccgaacaaggcaatctggaaatagtgaaggaattaattaagaatggagctaactgcaatctggaagatttggataattggacagcacttatatctgcatcgaaagaagggcatgtgcacatcgtagaggaactactgaaatgtggggttaacttggagcaccgtgatatgggaggatggacagctcttatgtgggcatgttacaaaggccgtactgacgtagtagagttgcttctttctcatggtgccaatccaagtgtcactggtctgtacagtgtttacccaatcatttgggcagcagggagaggccatgcagatatagttcatcttttactgcaaaatggtgctaaagtcaactgctctgataagtatggaaccacccctttagtttgggctgcacgaaagggtcatttggaatgtgtgaaacatttattggccatgggagctgatgtggatcaagaaggagctaattcaatgactgcacttattgtggcagtgaaaggaggttacacacagtcagtaaaagaaattttgaagaggaatccaaatgtaaacttaacagataaagatggaaatacagctttgatgattgcatcaaaggagggacatacggagattgtgcaggatctgctcgacgctggaacatatgtgaacatacctgacaggagtggggatactgtgttgattggcgctgtcagaggtggtcatgttgaaattgttcgagcgcttctccaaaaatatgctgatatagacattagaggacaggataataaaactgctttgtattgggctgttgagaaaggaaatgcaacaatggtgagagatatcttacagtgcaatcctgacactgaaatatgcacaaaggatggtgaaacgccacttataaaggctaccaagatgagaaacattgaagtggtggagctgctgctagataaaggtgctaaagtgtctgctgtagataagaaaggagatactcccttgcatattgctattcgtggaaggagccggaaactggcagaactgcttttaagaaatcccaaagatgggcgattactttataggcccaacaaagcaggcgagactccttataatattgactgtagccatcagaagagtattttaactcaaatatttggagccagacacttgtctcctactgaaacagacggtgacatgcttggatatgatttatatagcagtgccctggcagatattctcagtgagcctaccatgcagccacccatttgtgtggggttatatgcacagtggggaagtgggaaatctttcttactcaagaaactagaagacgaaatgaaaaccttcgccggacaacagattgagcctctctttcagttctcatggctcatagtgtttcttaccctgctactttgtggagggcttggtttattgtttgccttcacggtccacccaaatcttggaatagcagtgtcactgagcttcttggctctcttatatatattctttattgtcatttactttggtggacgaagagaaggagagagttggaattgggcctgggtcctcagcactagattggcaagacatattggatatttggaactcctccttaaattgatgtttgtgaatccacctgagttgccagagcagactactaaagctttacctgtgaggtttttgtttacagattacaatagactgtccagtgtaggtggagaaacttctctggctgaaatgattgcaaccctctcggatgcttgtgaaagagagtttggctttttggcaaccaggctttttcgagtattcaagactgaagatactcagggtaaaaagaaatggaaaaaaacatgttgtctcccatcttttgtcatcttcctttttatcattggctgcattatatctggaattactcttctggctatatttagagttgacccaaagcatctgactgtaaatgctgtcctcatatcaatcgcatctgtagtgggattggcctttgtgttgaactgtcgtacatggtggcaagtgctggactcgctcctgaattcccaaagaaaacgcctccataatgcagcctccaaactgcacaaattgaaaagtgaaggattcatgaaagttcttaaatgtgaagtggaattgatggccaggatggcaaaaaccattgacagcttcactcagaatcagacaaggctggtggtcatcatcgatggattagatgcctgtgagcaggacaaagtccttcagatgctggacactgtccgagttctgttttcaaaaggcccgttcattgccatttttgcaagtgatccacatattatcataaaggcaattaaccagaacctcaatagtgtgcttcgggattcaaatataaatggccatgactacatgcgcaacatagtccacttgcctgtgttccttaatagtcgtggactaagcaatgcaagaaaatttctcgtaacttcagcaacaaatggagacgttccatgctcagatactacagggatacaggaagatgctgacagaagagtttcacagaacagccttggggagatgacaaaacttggtagcaagacagccctcaatagacgggacacttaccgaagaaggcagatgcagaggaccatcactcgccagatgtcctttgatcttacaaaactgctggttaccgaggactggttcagtgacatcagtccccagaccatgagaagattacttaatattgtttctgtgacaggacgattactgagagccaatcagattagtttcaactgggacaggcttgctagctggatcaaccttactgagcagtggccataccggacttcatggctcatattatatttggaagagactgaaggtattccagatcaaatgacattaaaaaccatctacgaaagaatatcaaagaatattccaacaactaaggatgttgagccacttcttgaaattgatggagatataagaaattttgaagtgtttttgtcttcaaggaccccagttcttgtggctcgagatgtaaaagtctttttgccatgcactgtaaacctagatcccaaactacgggaaattattgcagatgttcgtgctgccagagagcagatcagtattggaggactggcgtaccccccgctccctctacatgagggtcctcctagggcgccatcagggtacagccagcccccatccgtgtgctcttccacgtccttcaatgggcccttcgcaggtggagtggtgtcaccacagcctcacagcagctattacagcggcatgacgggccctcagcatcccttctacaacaggccattctttgccccatacctttacacgccaaggtattaccctggcggctcccaacatctcatctcacgtccatcagtaaaaacgagtttgcccagagatcagaacaatggcctagggtcaggcccagccccaggcccagtggtattactgaattcactgaatgtggatgcagtatgtgagaagctgaaacaaatagaagggctggaccagagtatgctgcctcagtattgtaccacgatcaaaaaggcaaacataaatggccgtgtgttagctcagtgtaacattgatgagctgaagaaagagatgaatatgaattttggagactggcaccttttcagaagcacagtactagaaatgagaaacgcagaaagccacgtggtccctgaagacccacgtttcctcagtgagagcagcagtggcccagccccgcacggtgagcctgctcgccgcgcttcccacaacgagctgcctcacaccgagctctccagccagacgccctacacactcaacttcagcttcgaagagctgaacacgcttggcctggatgaaggtgcccctcgtcacagtaatctaagttggcagtcacaaactcgcagaaccccaagtctttcgagtctcaattcccaggattccagtattgaaatttcaaagcttactgataaggtgcaggccgagtatagagatgcctatagagaatacattgctcagatgtcccagttagaagggggccccgggtctacaaccattagtggcagatcttctccacatagcacatattacatgggtcagagttcatcagggggctctattcattcaaacctagagcaagaaaaggggaaggatagtgaaccaaagcccgatgatgggaggaagtcctttctaatgaagaggggagatgttatcgattattcatcatcaggggtttccaccaacgatgcttcccccctggatcctatcactgaagaagatgaaaaatcagatcagtcaggcagtaagcttctcccaggcaagaaatcttccgaaaggtcaagcctcttccagacagatttgaagcttaagggaagtgggctgcgctatcaaaaactcccaagtgacgaggatgaatctggcacagaagaatcagataacactccactgctcaaagatgacaaagacagaaaagccgaagggaaagtagagagagtgccgaagtctccagaacacagtgctgagccgatcagaaccttcattaaagccaaagagtatttatcggatgcgctccttgacaaaaaggattcatcggattcaggagtgagatccagtgaaagttctcccaatcactctctgcacaatgaagtggcggatgactcccagcttgaaaaggcaaatctcatagagctggaagatgacagtcacagcggaaagcggggaatcccacatagcctgagtggcctgcaagatccaattatagctcggatgtccatttgttcagaagacaagaaaagcccttccgaatgcagcttgatagccagcagccctgaagaaaactggcctgcatgccagaaagcctacaacctgaaccgaactcccagcaccgtgactctgaacaacaatagtgctccagccaacagagccaatcaaaatttcgatgagatggagggaattagggagacttctcaagtcattttgaggcctagttccagtcccaacccaaccactattcagaatgagaatctaaaaagcatgacacataagcgaagccaacgttcaagttacacaaggctctccaaagatcctccggagctccatgcagcagcctcttctgagagcacaggctttggagaagaaagagaaagcattctttgagaaaaacaagcaaaggagaagagtgttactgtacctttatgacagaattgtcctggattttgactccatccacgcccatcacctttctacattttgctgacagataactaaccgatgatgaggccgaggtaaaagagacatctgcagtgtgacagaagggagcatgagaagcatggctcaccagccagcctctgtggtctttgtaattagaagcttcagaactcactaatactactgtacctttcattggcgcattaccccataaaactttttgagacgaggtgagatctgagtataaagataggtcagaagtattttaaagggcttaatgtgccaaaaagaaaaaaagctagagaccctttttgcaaacatttggtgaccacacatttgagggaagacgtggcgttaggtgaagcagaagcaaaccctgctcttaggggctcacctaggtgagtgcacagcctgtgacgctacagggagaggctgagtaaaccgagatccagcgttctgtatggcaggggtattgcttatcacagaggttctgaagagtaggaagtacataatgaagagggctttaaaaattgccaacaaagtgagtcaccagggctggcagtagtgtgacggggctgtcctgagctgttaggagagtagatgcggggagggctggtgacctccgtgggtttatatgtcggaaactcttctctccaaatcccaggcctggcttccagcaccatccagctgtgcccaagaagccaccctggtctgttctccaactcttttaaatggtgcccaacttttctaagtgagcttagcaatgagaagaaaaaaaaacatgaattctttttctggaaaatcagggagacatgggtaataataggtactaataaatatttatagatgagtgaatgaggaaataattacatcaaaaaggtcagtgacaattgataaatgacaaggaaatatttaattaggtaaaactaaatcattgctctctatactaggatagactttatctacttcatctgttcctaagtcagcatgttagttctggggaaggatcataagaaaggaaatactttttaaaaaaaaatttggaaacatgtaacaaagcaagggtaaaatatatatatatatctatataagtgctgtgactgtaaaagtgtactttccattaattattagccgagttaagagaatggtcacattgaagtactgtgtggactagaaatgtaccctgtcatcatgcaatgaaatattgttatcgttttaacatagctcatttatgtagaatgaattctggtggtttaccccaagtcacagttaggacggtagatggtgagatcgcagatgcgctattatctagattcagtgttacattttcgatgtttatcactcagtgggtttttattaatatgctgattaagttatttactgggccagtcattgtgctaaatagttgctcttttgtgtttcattgccttgatgtttgagtgtaatctagcattttaatacagtgtttattttgcatgatctttaacaaatgttttaagcaattttaaaaaggcaggatgttattgacattatacactgaagtcttaacattttaacatttatagtgcttatttgcaaaattgtataattaggaattatttcagagacaatgttttctttttcaggtgagtagttgccgcgtaatatcattggagtacattctttatactgtttgtgaaattaatactagcatattaagtgtacaaatagatttagaaaacaataaaaaattgcatgctattctgactcatgaatttttattcactatgatgattcacattttgattaaaaataaaagtagtttgtgtgttt

SEQ ID NO: 205461 - DNA, 7248 bp, Artificial Sequence
  derived and/or modified sequence
agggcacgtgatctgtcagttcgcggagagggaagaatatggccgccgggtgtggtgagggcgacgcgcttgcagtcgccgtctcttgcttccccgtcctctgacatcgcctgcagccgagcgggcccgttccgccggagctgaggaccaggttgggagaccgtattcaaataaagttaattgcagctttctgtgaaaatgtcagttttgatatcacagagcgtcataaattatgtagaggaagaaaacattcctgctctgaaagctcttcttgaaaaatgcaaagatgtagatgagagaaatgagtgtggccagactccactgatgatagctgccgaacaaggcaatctggaaatagtgaaggaattaattaagaatggagctaactgcaatctggaagatttggataattggacagcacttatatctgcatcgaaagaagggcatgtgcacatcgtagaggaactactgaaatgtggggttaacttggagcaccgtgatatgggaggatggacagctcttatgtgggcatgttacaaaggccgtactgacgtagtagagttgcttctttctcatggtgccaatccaagtgtcactggtctgtacagtgtttacccaatcatttgggcagcagggagaggccatgcagatatagttcatcttttactgcaaaatggtgctaaagtcaactgctctgataagtatggaaccacccctttagtttgggctgcacgaaagggtcatttggaatgtgtgaaacatttattggccatgggagctgatgtggatcaagaaggagctaattcaatgactgcacttattgtggcagtgaaaggaggttacacacagtcagtaaaagaaattttgaagaggaatccaaatgtaaacttaacagataaagatggaaatacagctttgatgattgcatcaaaggagggacatacggagattgtgcaggatctgctcgacgctggaacatatgtgaacatacctgacaggagtggggatactgtgttgattggcgctgtcagaggtggtcatgttgaaattgttcgagcgcttctccaaaaatatgctgatatagacattagaggacaggataataaaactgctttgtattgggctgttgagaaaggaaatgcaacaatggtgagagatatcttacagtgcaatcctgacactgaaatatgcacaaaggatggtgaaacgccacttataaaggctaccaagatgagaaacattgaagtggtggagctgctgctagataaaggtgctaaagtgtctgctgtagataagaaaggagatactcccttgcatattgctattcgtggaaggagccggaaactggcagaactgcttttaagaaatcccaaagatgggcgattactttataggcccaacaaagcaggcgagactccttataatattgactgtagccatcagaagagtattttaactcaaatatttggagccagacacttgtctcctactgaaacagacggtgacatgcttggatatgatttatatagcagtgccctggcagatattctcagtgagcctaccatgcagccacccatttgtgtggggttatatgcacagtggggaagtgggaaatctttcttactcaagaaactagaagacgaaatgaaaaccttcgccggacaacagattgagcctctctttcagttctcatggctcatagtgtttcttaccctgctactttgtggagggcttggtttattgtttgccttcacggtccacccaaatcttggaatagcagtgtcactgagcttcttggctctcttatatatattctttattgtcatttactttggtggacgaagagaaggagagagttggaattgggcctgggtcctcagcactagattggcaagacatattggatatttggaactcctccttaaattgatgtttgtgaatccacctgagttgccagagcagactactaaagctttacctgtgaggtttttgtttacagattacaatagactgtccagtgtaggtggagaaacttctctggctgaaatgattgcaaccctctcggatgcttgtgaaagagagtttggctttttggcaaccaggctttttcgagtattcaagactgaagatactcagggtaaaaagaaatggaaaaaaacatgttgtctcccatcttttgtcatcttcctttttatcattggctgcattatatctggaattactcttctggctatatttagagttgacccaaagcatctgactgtaaatgctgtcctcatatcaatcgcatctgtagtgggattggcctttgtgttgaactgtcgtacatggtggcaagtgctggactcgctcctgaattcccaaagaaaacgcctccataatgcagcctccaaactgcacaaattgaaaagtgaaggattcatgaaagttcttaaatgtgaagtggaattgatggccaggatggcaaaaaccattgacagcttcactcagaatcagacaaggctggtggtcatcatcgatggattagatgcctgtgagcaggacaaagtccttcagatgctggacactgtccgagttctgttttcaaaaggcccgttcattgccatttttgcaagtgatccacatattatcataaaggcaattaaccagaacctcaatagtgtgcttcgggattcaaatataaatggccatgactacatgcgcaacatagtccacttgcctgtgttccttaatagtcgtggactaagcaatgcaagaaaatttctcgtaacttcagcaacaaatggagacgttccatgctcagatactacagggatacaggaagatgctgacagaagagtttcacagaacagccttggggagatgacaaaacttggtagcaagacagccctcaatagacgggacacttaccgaagaaggcagatgcagaggaccatcactcgccagatgtcctttgatcttacaaaactgctggttaccgaggactggttcagtgacatcagtccccagaccatgagaagattacttaatattgtttctgtgacaggacgattactgagagccaatcagattagtttcaactgggacaggcttgctagctggatcaaccttactgagcagtggccataccggacttcatggctcatattatatttggaagagactgaaggtattccagatcaaatgacattaaaaaccatctacgaaagaatatcaaagaatattccaacaactaaggatgttgagccacttcttgaaattgatggagatataagaaattttgaagtgtttttgtcttcaaggaccccagttcttgtggctcgagatgtaaaagtctttttgccatgcactgtaaacctagatcccaaactacgggaaattattgcagatgttcgtgctgccagagagcagatcagtattggaggactggcgtaccccccgctccctctacatgagggtcctcctagggcgccatcagggtacagccagcccccatccgtgtgctcttccacgtccttcaatgggcccttcgcaggtggagtggtgtcaccacagcctcacagcagctattacagcggcatgacgggccctcagcatcccttctacaacaggccattctttgccccatacctttacacgccaaggtattaccctggcggctcccaacatctcatctcacgtccatcagtaaaaacgagtttgcccagagatcagaacaatggcctagggtcaggcccagccccaggcccagtggtattactgaattcactgaatgtggatgcagtatgtgagaagctgaaacaaatagaagggctggaccagagtatgctgcctcagtattgtaccacgatcaaaaaggcaaacataaatggccgtgtgttagctcagtgtaacattgatgagctgaagaaagagatgaatatgaattttggagactggcaccttttcagaagcacagtactagaaatgagaaacgcagaaagccacgtggtccctgaagacccacgtttcctcagtgagagcagcagtggcccagccccgcacggtgagcctgctcgccgcgcttcccacaacgagctgcctcacaccgagctctccagccagacgccctacacactcaacttcagcttcgaagagctgaacacgcttggcctggatgaaggtgcccctcgtcacagtaatctaagttggcagtcacaaactcgcagaaccccaagtctttcgagtctcaattcccaggattccagtattgaaatttcaaagcttactgataaggtgcaggccgagtatagagatgcctatagagaatacattgctcagatgtcccagttagaagggggccccgggtctacaaccattagtggcagatcttctccacatagcacatattacatgggtcagagttcatcagggggctctattcattcaaacctagagcaagaaaaggggaaggatagtgaaccaaagcccgatgatgggaggaagtcctttctaatgaagaggggagatgttatcgattattcatcatcaggggtttccaccaacgatgcttcccccctggatcctatcactgaagaagatgaaaaatcagatcagtcaggcagtaagcttctcccaggcaagaaatcttccgaaaggtcaagcctcttccagacagatttgaagcttaagggaagtgggctgcgctatcaaaaactcccaagtgacgaggatgaatctggcacagaagaatcagataacactccactgctcaaagatgacaaagacagaaaagccgaagggaaagtagagagagtgccgaagtctccagaacacagtgctgagccgatcagaaccttcattaaagccaaagagtatttatcggatgcgctccttgacaaaaaggattcatcggattcaggagtgagatccagtgaaagttctcccaatcactctctgcacaatgaagtggcggatgactcccagcttgaaaaggcaaatctcatagagctggaagatgacagtcacagcggaaagcggggaatcccacatagcctgagtggcctgcaagatccaattatagctcggatgtccatttgttcagaagacaagaaaagcccttccgaatgcagcttgatagccagcagccctgaagaaaactggcctgcatgccagaaagcctacaacctgaaccgaactcccagcaccgtgactctgaacaacaatagtgctccagccaacagagccaatcaaaatttcgatgagatggagggaattagggagacttctcaagtcattttgaggcctagttccagtcccaacccaaccactattcagaatgagaatctaaaaagcatgacacataagcgaagccaacgttcaagttacacaaggctctccaaagatcctccggagctccatgcagcagcctcttctgagagcacaggctttggagaagaaagagaaagcattctttgagaaaaacaagcaaaggagaagagtgttactgtacctttatgacagaattgtcctggattttgactccatccacgcccatcacctttctacattttgctgacagataactaaccgatgatgaggccgaggtaaaagagacatctgcagtgtgacagaagggagcatgagaagcatggctcaccagccagcctctgtggtctttgtaattagaagcttcagaactcactaatactactgtacctttcattggcgcattaccccataaaactttttgagacgaggtgagatctgagtataaagataggtcagaagtattttaaagggcttaatgtgccaaaaagaaaaaaagctagagaccctttttgcaaacatttggtgaccacacatttgagggaagacgtggcgttaggtgaagcagaagcaaaccctgctcttaggggctcacctaggtgagtgcacagcctgtgacgctacagggagaggctgagtaaaccgagatccagcgttctgtatggcaggggtattgcttatcacagaggttctgaagagtaggaagtacataatgaagagggctttaaaaattgccaacaaagtgagtcaccagggctggcagtagtgtgacggggctgtcctgagctgttaggagagtagatgcggggagggctggtgacctccgtgggtttatatgtcggaaactcttctctccaaatcccaggcctggcttccagcaccatccagctgtgcccaagaagccaccctggtctgttctccaactcttttaaatggtgcccaacttttctaagtgagcttagcaatgagaagaaaaaaaaacatgaattctttttctggaaaatcagggagacatgggtaataataggtactaataaatatttatagatgagtgaatgaggaaataattacatcaaaaaggtcagtgacaattgataaatgacaaggaaatatttaattaggtaaaactaaatcattgctctctatactaggatagactttatctacttcatctgttcctaagtcagcatgttagttctggggaaggatcataagaaaggaaatactttttaaaaaaaaatttggaaacatgtaacaaagcaagggtaaaatatatatatatatctatataagtgctgtgactgtaaaagtgtactttccattaattattagccgagttaagagaatggtcacattgaagtactgtgtggactagaaatgtaccctgtcatcatgcaatgaaatattgttatcgttttaacatagctcatttatgtagaatgaattctggtggtttaccccaagtcacagttaggacggtagatggtgagatcgcagatgcgctattatctagattcagtgttacattttcgatgtttatcactcagtgggtttttattaatatgctgattaagttatttactgggccagtcattgtgctaaatagttgctcttttgtgtttcattgccttgatgtttgagtgtaatctagcattttaatacagtgtttattttgcatgatctttaacaaatgttttaagcaattttaaaaaggcaggatgttattgacattatacactgaagtcttaacattttaacatttatagtgcttatttgcaaaattgtataattaggaattatttcagagacaatgttttctttttcaggtgagtagttgccgcgtaatatcattggagtacattctttatactgtttgtgaaattaatactagcatattaagtgtacaaatagatttagaaaacaataaaaaattgcatgcta

SEQ ID NO: 205462 - DNA, 3465 bp, Artificial Sequence
  derived and/or modified sequence
agaatatggccgccgggtgtggtgagggcgacgcgcttgcagtcgccgtctcttgcttccccgtcctctgacatcgcctgcagccgagcgggcccgttccgccggagctgaggaccagtatggaaccacccctttagtttgggctgcacgaaagggtcatttggaatgtgtgaaacatttattggccatgggagctgatgtggatcaagaaggagctaattcaatgactgcacttattgtggcaggatctgctcgacgctggaacatatgtgaacatacctgacaggagtggggatactgtgttgattggcgctgtcagaggtggtcatgttgaaattgttcgagcgcttctccaaaaatatgctgatatagacattagaggacaggataataaaactgctttgtattgggctgttgagaaaggaaatgcaacaatggtgagagatatcttacagtgcaatcctgacactgaaatatgcacaaaggatggtgaaacgccacttataaaggctaccaagatgagaaacattgaagtggtggagctgctgctagataaaggtgctaaagtgtctgctgtagataagaaaggagatactcccttgcatattgctattcgtggaaggagccggaaactggcagaactgcttttaagaaatcccaaagatgggcgattactttataggcccaacaaagcaggcgagactccttataatattgactgtagccatcagaagagtattttaactcaaatatttggagccagacacttgtctcctactgaaacagacggtgacatgcttggatatgatttatatagcagtgccctggcagatattctcagtgagcctaccatgcagccacccatttgtgtggggttatatgcacagtggggaagtgggaaatctttcttactcaagaaactagaagacgaaatgaaaaccttcgccggacaacagattgagcctctctttcagttctcatggctcatagtgtttcttaccctgctactttgtggagggcttggtttattgtttgccttcacggtccacccaaatcttggaatagcagtgtcactgagcttcttggctctcttatatatattctttattgtcatttactttggtggacgaagagaaggagagagttggaattgggcctgggtcctcagcactagattggcaagacatattggatatttggaactcctccttaaattgatgtttgtgaatccacctgagttgccagagcagactactaaagctttacctgtgaggtttttgtttacagattacaatagactgtccagtgtaggtggagaaacttctctggctgaaatgattgcaaccctctcggatgcttgtgaaagagagtttggctttttggcaaccaggctttttcgagtattcaagactgaagatactcagggtaaaaagaaatggaaaaaaacatgttgtctcccatcttttgtcatcttcctttttatcattggctgcattatatctggaattactcttctggctatatttagagttgacccaaagcatctgactgtaaatgctgtcctcatatcaatcgcatctgtagtgggattggcctttgtgttgaactgtcgtacatggtggcaagtgctggactcgctcctgaattcccaaagaaaacgcctccataatgcagcctccaaactgcacaaattgaaaagtgaaggattcatgaaagttcttaaatgtgaagtggaattgatggccaggatggcaaaaaccattgacagcttcactcagaatcagacaaggctggtggtcatcatcgatggattagatgcctgtgagcaggacaaagtccttcagatgctggacactgtccgagttctgttttcaaaaggcccgttcattgccatttttgcaagtgatccacatattatcataaaggcaattaaccagaacctcaatagtgtgcttcgggattcaaatataaatggccatgactacatgcgcaacatagtccacttgcctgtgttccttaatagtcgtggactaagcaatgcaagaaaatttctcgtaacttcagcaacaaatggagacgttccatgctcagatactacagggatacaggaagatgctgacagaagagtttcacagaacagccttggggagatgacaaaacttggtagcaagacagccctcaatagacgggacacttaccgaagaaggcagatgcagaggaccatcactcgccagatgtcctttgatcttacaaaactgctggttaccgaggactggttcagtgacatcagtccccagaccatgagaagattacttaatattgtttctgtgacaggacgattactgagagccaatcagattagtttcaactgggacaggcttgctagctggatcaaccttactgagcagtggccataccggacttcatggctcatattatatttggaagagactgaaggtattccagatcaaatgacattaaaaaccatctacgaaagaatatcaaagaatattccaacaactaaggatgttgagccacttcttgaaattgatggagatataagaaattttgaagtgtttttgtcttcaaggaccccagttcttgtggctcgagatgtaaaagtctttttgccatgcactgtaaacctagatcccaaactacgggaaattattgcagatgttcgtgctgccagagagcagatcagtattggaggactggcgtaccccccgctccctctacatgagggtcctcctagggcgccatcagggtacagccagcccccatccgtgtgctcttccacgtccttcaatgggcccttcgcaggtggagtggtgtcaccacagcctcacagcagctattacagcggcatgacgggccctcagcatcccttctacaacagggggtcaggcccagccccaggcccagtggtattactgaattcactgaatgtggatgcagtatgtgagaagctgaaacaaatagaagggctggaccagagtatgctgcctcagtattgtaccacgatcaaaaaggcaaacataaatggccgtgtgttagctcagtgtaacattgatgagctgaagaaagagatgaatatgaattttggagactggcaccttttcagaagcacagtactagaaatgagaaacgcagaaagccacgtggtccctgaagacccacgtttcctcagtgagagcagcagtggcccagccccgcacggtgagcctgctcgccgcgcttcccacaacgagctgcctcacaccgagctctccagccagacgccctacacactcaacttcagcttcgaagagctgaacacgcttggcctggatgaaggtgcccctcgtcacagtaatctaagttggcaggaagaaaatgctggccttgagatagatagctcttcagaggatccagattaaactaagttcgagtcacttctcacagttgacttcctcaccaaataat

SEQ ID NO: 205463 - DNA, 5316 bp, Artificial Sequence
  derived and/or modified sequence
atgtctgtgctgatcagccagagcgtcatcaactacgtggaggaggagaacatcccagccctgaaggccctgctggagaagtgcaaggatgtggatgaaagaaatgaatgtggccagacccccctgatgattgctgctgagcagggcaacctggagatcgtgaaggagctgatcaagaatggagccaactgcaacctggaggacctggacaactggacagccctgatcagcgccagcaaggagggccacgtgcacatcgtggaggagctgctgaagtgtggggtgaacctggagcaccgggacatgggcggctggacagccctgatgtgggcctgctacaagggccgcacagatgtggtggagctgctgctgagccacggggccaaccccagcgtgacaggcctgtacagcgtgtaccccatcatctgggccgccggccggggccacgccgacatcgtgcacctgctgctgcagaatggagccaaggtgaactgcagcgacaagtatggcaccacccccctggtgtgggccgccaggaagggccacctggagtgtgtgaagcacctgctggccatgggcgcagatgtggaccaggagggcgccaacagcatgacagccctgattgtggccgtgaagggcggctacacccagagcgtgaaggagatcctgaagaggaaccccaacgtgaacctgacagacaaggatggcaacacagccctgatgattgccagcaaggagggccacacagaaattgtgcaggacctgctggatgctggcacctacgtgaacatcccagacagaagtggggacacagtgctgattggagctgtgcggggcggccacgtggagatcgtgcgggccctgctgcagaagtatgctgacatcgacatccggggccaggacaacaagacagccctgtactgggccgtggagaagggaaatgccaccatggtgcgggacatcctgcagtgcaacccagacacagagatctgcaccaaggatggagagacccccctcatcaaggccaccaagatgaggaacatcgaggtggtggagctgctgctggacaagggggccaaggtgtctgctgtggacaagaagggggacacccccctgcacatcgccatccggggccgcagcaggaagctggccgagctgctgctgaggaaccccaaggatggccgcctgctgtaccggcccaacaaggccggggagaccccctacaacatcgactgcagccaccagaagagcatcctgacccagatctttggagcccggcacctgagccccacagaaacagatggagacatgctgggctatgacctgtacagcagcgccctggccgacatcctgtctgagcccaccatgcagccccccatctgtgtgggcctgtatgcccagtggggcagcggcaagagcttcctgctgaagaagctggaggatgagatgaagacctttgctggccagcagatcgagcccctcttccagttctcctggctgattgtgttcctgaccctgctgctgtgtggcggcctgggcctgctgtttgccttcaccgtgcaccccaacctgggcattgctgtgtccctgtccttcctggccctgctgtacatcttcttcatcgtcatctactttggaggccggcgggagggggagagctggaactgggcctgggtgctgagcacccggctggcccggcacatcggctacctggagctgctgctgaagctgatgtttgtgaaccccccagagctgcctgagcagaccaccaaggccctgcctgtgcgcttcctgttcacagactacaaccggctgagctctgtgggcggggagaccagcctggccgagatgattgccaccctgagtgatgcctgtgagcgggagtttggcttcctggccaccaggctcttccgggtcttcaagacagaggacacccagggcaagaagaagtggaagaagacctgctgcctgcccagctttgtgatcttcctgttcatcatcggctgcatcatcagcggcatcaccctgctggccatcttccgggtggaccccaagcacctgactgtgaatgctgtgctgatcagcatcgcctctgtggtgggcctggcctttgtgctgaactgcaggacctggtggcaggtgctggacagcctgctgaacagccagaggaagaggctgcacaatgctgccagcaagctgcacaagctgaagtctgagggcttcatgaaggtgctgaagtgtgaggtggagctgatggccaggatggccaagaccatcgacagcttcacccagaaccagacccggctggtggtgatcattgatggcctggatgcctgtgagcaggacaaggtgctgcagatgctggacacagtgcgggtgctcttcagcaagggccccttcatcgccatctttgccagtgacccccacatcatcatcaaggccatcaaccagaacctgaacagcgtgctgcgggacagcaacatcaatggacatgactacatgagaaatattgtgcacctgcctgtgttcctgaacagccggggcctgagcaatgccaggaagttcctggtgaccagcgccaccaatggagatgtgccctgcagcgacaccaccggcatccaggaggatgctgacagaagagtgtcccagaacagcctgggggagatgaccaagctgggcagcaagacagccctgaacagaagagacacctacagaagacggcagatgcagaggaccatcacccggcagatgagctttgacctgaccaagctgctggtgacagaggactggttcagtgacatcagcccccagaccatgaggcggctgctgaacatcgtgtctgtgacaggccgcctgctgcgggccaaccagatctccttcaactgggaccggctggcctcctggatcaacctgacagagcagtggccctaccgcacctcctggctgatcctgtacctggaggagacagagggcatcccagaccagatgaccctgaagaccatctatgaaagaatcagcaagaacatccccaccaccaaggatgtggagcccctgctggagattgatggagacatccggaactttgaggtgttcctgagcagcaggacccctgtgctggtggccagagatgtgaaggtgttcctgccctgcaccgtgaacctggaccccaagctgcgggagatcatcgcagatgtgcgggccgcccgggagcagatcagcatcggcggcctggcctacccacccctgcccctgcacgagggccccccccgggcccccagcggctacagccagccccccagcgtgtgcagcagcaccagcttcaacggcccctttgctgggggcgtggtgagcccccagccccacagcagctactacagcggcatgacaggcccccagcaccccttctacaaccggcccttctttgccccctacctgtacaccccccgctactacccaggcggcagccagcacctgatcagccggcccagcgtgaagaccagcctgccccgggaccagaacaacggcctggaggtgatcaaggaggatgctgctgagggcctgagcagccccacagacagcagccggggcagcggccctgcccctggccctgtggtgctgctgaacagcctgaatgtggatgctgtgtgtgagaagctgaagcagatcgagggcctggaccagagcatgctgccccagtactgcaccaccatcaagaaggccaacatcaatggccgggtgctggcccagtgcaacattgatgagctgaagaaggagatgaacatgaactttggagactggcacctgttccgcagcacagtgctggagatgagaaatgctgagagccacgtggtgcctgaggacccccgcttcctgtctgagagcagcagcggccctgcccctcatggagagcccgcccggcgggccagccacaatgagctgccccacacagagctgagcagccagaccccctacaccctgaacttctcctttgaggagctgaacaccctgggcctggatgaaggagcccccaggcacagcaacctgtcctggcagagccagaccaggaggacccccagcctgagcagcctgaacagccaggacagcagcattgagatcagcaagctgacagacaaggtgcaggccgagtacagagatgcctaccgggagtacatcgcccagatgagccagctggagggcggccctggcagcaccaccatcagcggccgcagcagcccccacagcacctactacatgggccagagcagcagcggcggcagcatccacagcaacctggagcaggagaagggcaaggacagcgagcccaagccagatgatggcaggaagagcttcctgatgaagagaggagatgtgattgactacagcagcagtggagtgtccaccaatgatgccagccccctggaccccatcacagaagaagatgagaagagtgaccagagcggcagcaagctgctgcccgggaagaagagcagcgagaggagcagcctcttccagacagacctgaagctgaagggcagcggcctgcgctaccagaagctgcccagtgatgaagatgagagcggcacagaggagagtgacaacacccccctgctgaaggatgacaaggacaggaaggccgagggcaaggtggagcgggtgcccaagagccctgagcacagcgctgagcccatccgcaccttcatcaaggccaaggagtacctgagtgatgccctgctggacaagaaggacagcagtgacagcggcgtgcgcagcagcgagagcagccccaaccacagcctgcacaatgaggtggctgatgacagccagctggagaaggccaacctgattgagctggaggatgacagccacagcggcaagaggggcatcccccacagcctgagcggcctgcaggaccccatcatcgccaggatgagcatctgcagcgaggacaagaagagccccagtgaatgttccctgattgccagcagccctgaggagaactggccagcctgccagaaggcctacaacctgaacagaacacccagcacagtgaccctgaacaacaacagcgccccagccaacagagccaaccagaactttgatgagatggagggcatccgggagaccagccaggtgatcctgcggcccagcagcagccccaaccccaccaccatccagaatgaaaacctgaagtccatgacccacaagaggagccagaggagcagctacacccggctgagcaaggaccccccagagctgcacgccgccgccagcagcgagagcactggatttggagaggagcgggagagcatcctgtag

SEQ ID NO: 205464 - DNA, 3096 bp, Artificial Sequence
  derived and/or modified sequence
atgtctgtgctgatcagccagagcgtcatcaactacgtggaggaggagaacatcccagccctgaaggccctgctggagaagtgcaaggatgtggatgaaagaaatgaatgtggccagacccccctgatgattgctgctgagcagggcaacctggagatcgtgaaggagctgatcaagaatggagccaactgcaacctggaggacctggacaactggacagccctgatcagcgccagcaaggagggccacgtgcacatcgtggaggagctgctgaagtgtggggtgaacctggagcaccgggacatgggcggctggacagccctgatgtgggcctgctacaagggccgcacagatgtggtggagctgctgctgagccacggggccaaccccagcgtgacaggcctgcagtacagcgtgtaccccatcatctgggccgccggccggggccatgctgacatcgtgcacctgctgctgcagaatggagccaaggtgaactgcagcgacaagtatggcaccacccccctggtgtgggccgccaggaagggccacctggagtgtgtgaagcacctgctggccatgggcgcagatgtggaccaggagggcgccaacagcatgacagccctgattgtggccgtgaagggcggctacacccagagcgtgaaggagatcctgaagaggaaccccaacgtgaacctgacagacaaggatggcaacacagccctgatgattgccagcaaggagggccacacagagatcgtgcaggacctgctggatgctggcacctacgtgaacatcccagacagaagtggggacacagtgctgattggagctgtgcggggcggccacgtggagatcgtgcgggccctgctgcagaagtatgctgacatcgacatccggggccaggacaacaagacagccctgtactgggccgtggagaagggaaatgccaccatggtgcgggacatcctgcagtgcaacccagacacagagatctgcaccaaggatggagagacccccctcatcaaggccaccaagatgagaaatattgaggtggtggagctgctgctggacaagggggccaaggtgtctgctgtggacaagaagggggacacccccctgcacatcgccatccggggccgcagcaggaagctggccgagctgctgctgaggaaccccaaggatggccgcctgctgtaccggcccaacaaggccggggagaccccctacaacatcgactgcagccaccagaagagcatcctgacccagatctttggagcccggcacctgagccccacagaaacagatggagacatgctgggctatgacctgtacagcagcgccctggccgacatcctgtctgagcccaccatgcagccccccatctgtgtgggcctgtatgcccagtggggcagcggcaagagcttcctgctgaagaagctggaggatgagatgaagacctttgctggccagcagatcgagcccctcttccagttctcctggctgattgtgttcctgaccctgctgctgtgtggcggcctgggcctgctgtttgccttcaccgtgcaccccaacctgggcattgctgtgtccctgtccttcctggccctgctgtacatcttcttcatcgtcatctactttggaggaagaagagaaggagagagctggaactgggcctgggtgctgagcacccggctggcccggcacatcggctacctggagctgctgctgaagctgatgtttgtgaaccccccagagctgcctgagcagaccaccaaggccctgcctgtgcgcttcctgttcacagactacaaccggctgagctctgtgggcggggagaccagcctggccgagatgattgccaccctgagtgatgcctgtgagcgggagtttggcttcctggccaccaggctcttccgggtcttcaagacagaggacacccagggcaagaagaagtggaagaagacctgctgcctgcccagctttgtgatcttcctgttcatcatcggctgcatcatcagcggcatcaccctgctggccatcttccgggtggaccccaagcacctgactgtgaatgctgtgctgatcagcatcgcctctgtggtgggcctggcctttgtgctgaactgcaggacctggtggcaggtgctggacagcctgctgaacagccagaggaagaggctgcacaatgctgccagcaagctgcacaagctgaagtctgagggcttcatgaaggtgctgaagtgtgaggtggagctgatggccaggatggccaagaccatcgacagcttcacccagaaccagacccggctggtggtgatcattgatggcctggatgcctgtgagcaggacaaggtgctgcagatgctggacacagtgcgggtgctcttcagcaagggccccttcatcgccatctttgccagtgacccccacatcatcatcaaggccatcaaccagaacctgaacagcgtgctgcgggacagcaacatcaatggacatgactacatgaggaacatcgtgcacctgcccgtcttcctgaacagccggggcctgagcaatgccaggaagttcctggtgaccagcgccaccaatggagatgtgccctgcagcgacaccaccggcatccaggaggatgctgaccggcgggtgtcccagaacagcctgggggagatgaccaagctgggcagcaagacagccctgaacagaagagacacctacagaagacggcagatgcagaggaccatcacccggcagatgagctttgacctgaccaagctgctggtgacagaggactggttcagtgacatcagcccccagaccatgaggcggctgctgaacatcgtgtctgtgacaggccgcctgctgcgggccaaccagatctccttcaactgggaccggctggcctcctggatcaacctgacagagcagtggccctaccgcacctcctggctgatcctgtacctggaggagacagagggcatcccagaccagatgaccctgaagaccatctatgagcgctgctgcggggctgacagctgtgaccgggacagaattggcatcagcaagtctgtgctggtggccatgctgatggagagctag

SEQ ID NO: 205465 - DNA, 5019 bp, Artificial Sequence
  derived and/or modified sequence
atgattgctgctgagcagggcaacctggagatcgtgaaggagctgatcaagaatggagccaactgcaacctggaggacctggacaactggacagccctgatcagcgccagcaaggagggccacgtgcacatcgtggaggagctgctgaagtgtggggtgaacctggagcaccgggacatgggcggctggacagccctgatgtgggcctgctacaagggccgcacagatgtggtggagctgctgctgagccacggggccaaccccagcgtgacaggcctgtacagcgtgtaccccatcatctgggccgccggccggggccacgccgacatcgtgcacctgctgctgcagaatggagccaaggtgaactgcagcgacaagtatggcaccacccccctggtgtgggccgccaggaagggccacctggagtgtgtgaagcacctgctggccatgggcgcagatgtggaccaggagggcgccaacagcatgacagccctgattgtggccgtgaagggcggctacacccagagcgtgaaggagatcctgaagaggaaccccaacgtgaacctgacagacaaggatggcaacacagccctgatgattgccagcaaggagggccacacagaaattgtgcaggacctgctggatgctggcacctacgtgaacatcccagacagaagtggggacacagtgctgattggagctgtgcggggcggccacgtggagatcgtgcgggccctgctgcagaagtatgctgacatcgacatccggggccaggacaacaagacagccctgtactgggccgtggagaagggaaatgccaccatggtgcgggacatcctgcagtgcaacccagacacagagatctgcaccaaggatggagagacccccctcatcaaggccaccaagatgaggaacatcgaggtggtggagctgctgctggacaagggggccaaggtgtctgctgtggacaagaagggggacacccccctgcacatcgccatccggggccgcagcaggaagctggccgagctgctgctgaggaaccccaaggatggccgcctgctgtaccggcccaacaaggccggggagaccccctacaacatcgactgcagccaccagaagagcatcctgacccagatctttggagcccggcacctgagccccacagaaacagatggagacatgctgggctatgacctgtacagcagcgccctggccgacatcctgtctgagcccaccatgcagccccccatctgtgtgggcctgtatgcccagtggggcagcggcaagagcttcctgctgaagaagctggaggatgagatgaagacctttgctggccagcagatcgagcccctcttccagttctcctggctgattgtgttcctgaccctgctgctgtgtggcggcctgggcctgctgtttgccttcaccgtgcaccccaacctgggcattgctgtgtccctgtccttcctggccctgctgtacatcttcttcatcgtcatctactttggaggccggcgggagggggagagctggaactgggcctgggtgctgagcacccggctggcccggcacatcggctacctggagctgctgctgaagctgatgtttgtgaaccccccagagctgcctgagcagaccaccaaggccctgcctgtgcgcttcctgttcacagactacaaccggctgagctctgtgggcggggagaccagcctggccgagatgattgccaccctgagtgatgcctgtgagcgggagtttggcttcctggccaccaggctcttccgggtcttcaagacagaggacacccagggcaagaagaagtggaagaagacctgctgcctgcccagctttgtgatcttcctgttcatcatcggctgcatcatcagcggcatcaccctgctggccatcttccgggtggaccccaagcacctgactgtgaatgctgtgctgatcagcatcgcctctgtggtgggcctggcctttgtgctgaactgcaggacctggtggcaggtgctggacagcctgctgaacagccagaggaagaggctgcacaatgctgccagcaagctgcacaagctgaagtctgagggcttcatgaaggtgctgaagtgtgaggtggagctgatggccaggatggccaagaccatcgacagcttcacccagaaccagacccggctggtggtgatcattgatggcctggatgcctgtgagcaggacaaggtgctgcagatgctggacacagtgcgggtgctcttcagcaagggccccttcatcgccatctttgccagtgacccccacatcatcatcaaggccatcaaccagaacctgaacagcgtgctgcgggacagcaacatcaatggacatgactacatgagaaatattgtgcacctgcctgtgttcctgaacagccggggcctgagcaatgccaggaagttcctggtgaccagcgccaccaatggagatgtgccctgcagcgacaccaccggcatccaggaggatgctgacagaagagtgtcccagaacagcctgggggagatgaccaagctgggcagcaagacagccctgaacagaagagacacctacagaagacggcagatgcagaggaccatcacccggcagatgagctttgacctgaccaagctgctggtgacagaggactggttcagtgacatcagcccccagaccatgaggcggctgctgaacatcgtgtctgtgacaggccgcctgctgcgggccaaccagatctccttcaactgggaccggctggcctcctggatcaacctgacagagcagtggccctaccgcacctcctggctgatcctgtacctggaggagacagagggcatcccagaccagatgaccctgaagaccatctatgaaagaatcagcaagaacatccccaccaccaaggatgtggagcccctgctggagattgatggagacatccggaactttgaggtgttcctgagcagcaggacccctgtgctggtggccagagatgtgaaggtgttcctgccctgcaccgtgaacctggaccccaagctgcgggagatcatcgcagatgtgcgggccgcccgggagcagatcagcatcggcggcctggcctacccacccctgcccctgcacgagggccccccccgggcccccagcggctacagccagccccccagcgtgtgcagcagcaccagcttcaacggcccctttgctgggggcgtggtgagcccccagccccacagcagctactacagcggcatgacaggcccccagcaccccttctacaacagaggcagcggccctgcccctggccctgtggtgctgctgaacagcctgaatgtggatgctgtgtgtgagaagctgaagcagatcgagggcctggaccagagcatgctgccccagtactgcaccaccatcaagaaggccaacatcaatggccgggtgctggcccagtgcaacattgatgagctgaagaaggagatgaacatgaactttggagactggcacctgttccgcagcacagtgctggagatgagaaatgctgagagccacgtggtgcctgaggacccccgcttcctgtctgagagcagcagcggccctgccccccacggggagcccgcccggcgggccagccacaatgagctgccccacacagagctgagcagccagaccccctacaccctgaacttctcctttgaggagctgaacaccctgggcctggatgagggcgcccccaggcacagcaacctgtcctggcagagccagaccaggaggacccccagcctgagcagcctgaacagccaggacagcagcattgagatcagcaagctgacagacaaggtgcaggccgagtacagagatgcctaccgggagtacatcgcccagatgagccagctggagggcggccctggcagcaccaccatcagcggccgcagcagcccccacagcacctactacatgggccagagcagcagcggcggcagcatccacagcaacctggagcaggagaagggcaaggacagcgagcccaagccagatgatggcaggaagagcttcctgatgaagagaggagatgtgattgactacagcagcagcggcgtgtccaccaatgatgccagccccctggaccccatcacagaggaggatgagaagagtgaccagagcggcagcaagctgctgcccgggaagaagagcagcgagaggagcagcctcttccagacagacctgaagctgaagggcagcggcctgcgctaccagaagctgcccagtgatgaagatgaaagtggcacagaggagagtgacaacacccccctgctgaaggatgacaaggacaggaaggccgagggcaaggtggagcgggtgcccaagagccctgagcacagcgctgagcccatccgcaccttcatcaaggccaaggagtacctgagtgatgccctgctggacaagaaggacagcagtgacagcggcgtgcgcagcagcgagagcagccccaaccacagcctgcacaatgaggtggctgatgacagccagctggagaaggccaacctgattgagctggaggatgacagccacagcggcaagaggggcatcccccacagcctgagcggcctgcaggaccccatcatcgccaggatgagcatctgcagcgaggacaagaagagccccagcgagtgcagcctcatcgccagcagccctgaggagaactggccagcctgccagaaggcctacaacctgaacagaacacccagcacagtgaccctgaacaacaacagcgccccagccaacagagccaaccagaactttgatgagatggagggcatccgggagaccagccaggtgatcctgcggcccagcagcagccccaaccccaccaccatccagaatgaaaacctgaagtccatgacccacaagaggagccagaggagcagctacacccggctgagcaaggaccccccagagctgcatgctgctgccagcagcgagagcacaggctttggagaggagcgggagagcatcctgtag

SEQ ID NO: 205466 - DNA, 5259 bp, Artificial Sequence
  derived and/or modified sequence
atgtctgtgctgatcagccagagcgtcatcaactacgtggaggaggagaacatcccagccctgaaggccctgctggagaagtgcaaggatgtggatgaaagaaatgaatgtggccagacccccctgatgattgctgctgagcagggcaacctggagatcgtgaaggagctgatcaagaatggagccaactgcaacctggaggacctggacaactggacagccctgatcagcgccagcaaggagggccacgtgcacatcgtggaggagctgctgaagtgtggggtgaacctggagcaccgggacatgggcggctggacagccctgatgtgggcctgctacaagggccgcacagatgtggtggagctgctgctgagccacggggccaaccccagcgtgacaggcctgtacagcgtgtaccccatcatctgggccgccggccggggccacgccgacatcgtgcacctgctgctgcagaatggagccaaggtgaactgcagcgacaagtatggcaccacccccctggtgtgggccgccaggaagggccacctggagtgtgtgaagcacctgctggccatgggcgcagatgtggaccaggagggcgccaacagcatgacagccctgattgtggccgtgaagggcggctacacccagagcgtgaaggagatcctgaagaggaaccccaacgtgaacctgacagacaaggatggcaacacagccctgatgattgccagcaaggagggccacacagaaattgtgcaggacctgctggatgctggcacctacgtgaacatcccagacagaagtggggacacagtgctgattggagctgtgcggggcggccacgtggagatcgtgcgggccctgctgcagaagtatgctgacatcgacatccggggccaggacaacaagacagccctgtactgggccgtggagaagggaaatgccaccatggtgcgggacatcctgcagtgcaacccagacacagagatctgcaccaaggatggagagacccccctcatcaaggccaccaagatgaggaacatcgaggtggtggagctgctgctggacaagggggccaaggtgtctgctgtggacaagaagggggacacccccctgcacatcgccatccggggccgcagcaggaagctggccgagctgctgctgaggaaccccaaggatggccgcctgctgtaccggcccaacaaggccggggagaccccctacaacatcgactgcagccaccagaagagcatcctgacccagatctttggagcccggcacctgagccccacagaaacagatggagacatgctgggctatgacctgtacagcagcgccctggccgacatcctgtctgagcccaccatgcagccccccatctgtgtgggcctgtatgcccagtggggcagcggcaagagcttcctgctgaagaagctggaggatgagatgaagacctttgctggccagcagatcgagcccctcttccagttctcctggctgattgtgttcctgaccctgctgctgtgtggcggcctgggcctgctgtttgccttcaccgtgcaccccaacctgggcattgctgtgtccctgtccttcctggccctgctgtacatcttcttcatcgtcatctactttggaggccggcgggagggggagagctggaactgggcctgggtgctgagcacccggctggcccggcacatcggctacctggagctgctgctgaagctgatgtttgtgaaccccccagagctgcctgagcagaccaccaaggccctgcctgtgcgcttcctgttcacagactacaaccggctgagctctgtgggcggggagaccagcctggccgagatgattgccaccctgagtgatgcctgtgagcgggagtttggcttcctggccaccaggctcttccgggtcttcaagacagaggacacccagggcaagaagaagtggaagaagacctgctgcctgcccagctttgtgatcttcctgttcatcatcggctgcatcatcagcggcatcaccctgctggccatcttccgggtggaccccaagcacctgactgtgaatgctgtgctgatcagcatcgcctctgtggtgggcctggcctttgtgctgaactgcaggacctggtggcaggtgctggacagcctgctgaacagccagaggaagaggctgcacaatgctgccagcaagctgcacaagctgaagtctgagggcttcatgaaggtgctgaagtgtgaggtggagctgatggccaggatggccaagaccatcgacagcttcacccagaaccagacccggctggtggtgatcattgatggcctggatgcctgtgagcaggacaaggtgctgcagatgctggacacagtgcgggtgctcttcagcaagggccccttcatcgccatctttgccagtgacccccacatcatcatcaaggccatcaaccagaacctgaacagcgtgctgcgggacagcaacatcaatggacatgactacatgagaaatattgtgcacctgcctgtgttcctgaacagccggggcctgagcaatgccaggaagttcctggtgaccagcgccaccaatggagatgtgccctgcagcgacaccaccggcatccaggaggatgctgacagaagagtgtcccagaacagcctgggggagatgaccaagctgggcagcaagacagccctgaacagaagagacacctacagaagacggcagatgcagaggaccatcacccggcagatgagctttgacctgaccaagctgctggtgacagaggactggttcagtgacatcagcccccagaccatgaggcggctgctgaacatcgtgtctgtgacaggccgcctgctgcgggccaaccagatctccttcaactgggaccggctggcctcctggatcaacctgacagagcagtggccctaccgcacctcctggctgatcctgtacctggaggagacagagggcatcccagaccagatgaccctgaagaccatctatgaaagaatcagcaagaacatccccaccaccaaggatgtggagcccctgctggagattgatggagacatccggaactttgaggtgttcctgagcagcaggacccctgtgctggtggccagagatgtgaaggtgttcctgccctgcaccgtgaacctggaccccaagctgcgggagatcatcgcagatgtgcgggccgcccgggagcagatcagcatcggcggcctggcctacccacccctgcccctgcacgagggccccccccgggcccccagcggctacagccagccccccagcgtgtgcagcagcaccagcttcaacggcccctttgctgggggcgtggtgagcccccagccccacagcagctactacagcggcatgacaggcccccagcaccccttctacaaccggcccttctttgccccctacctgtacaccccccgctactacccaggcggcagccagcacctgatcagccggcccagcgtgaagaccagcctgccccgggaccagaacaacggcctgggcagcggccctgcccctggccctgtggtgctgctgaacagcctgaatgtggatgctgtgtgtgagaagctgaagcagatcgagggcctggaccagagcatgctgccccagtactgcaccaccatcaagaaggccaacatcaatggccgggtgctggcccagtgcaacattgatgagctgaagaaggagatgaacatgaactttggagactggcacctgttccgcagcacagtgctggagatgagaaatgctgagagccacgtggtgcctgaggacccccgcttcctgtctgagagcagcagcggccctgccccccacggggagcccgcccggcgggccagccacaatgagctgccccacacagagctgagcagccagaccccctacaccctgaacttctcctttgaggagctgaacaccctgggcctggatgagggcgcccccaggcacagcaacctgtcctggcagagccagaccaggaggacccccagcctgagcagcctgaacagccaggacagcagcattgagatcagcaagctgacagacaaggtgcaggccgagtacagagatgcctaccgggagtacatcgcccagatgagccagctggagggcggccctggcagcaccaccatcagcggccgcagcagcccccacagcacctactacatgggccagagcagcagcggcggcagcatccacagcaacctggagcaggagaagggcaaggacagcgagcccaagccagatgatggcaggaagagcttcctgatgaagagaggagatgtgattgactacagcagcagcggcgtgtccaccaatgatgccagccccctggaccccatcacagaggaggatgagaagagtgaccagagcggcagcaagctgctgcccgggaagaagagcagcgagaggagcagcctcttccagacagacctgaagctgaagggcagcggcctgcgctaccagaagctgcccagtgatgaagatgaaagtggcacagaggagagtgacaacacccccctgctgaaggatgacaaggacaggaaggccgagggcaaggtggagcgggtgcccaagagccctgagcacagcgctgagcccatccgcaccttcatcaaggccaaggagtacctgagtgatgccctgctggacaagaaggacagcagtgacagcggcgtgcgcagcagcgagagcagccccaaccacagcctgcacaatgaggtggctgatgacagccagctggagaaggccaacctgattgagctggaggatgacagccacagcggcaagaggggcatcccccacagcctgagcggcctgcaggaccccatcatcgccaggatgagcatctgcagcgaggacaagaagagccccagcgagtgcagcctcatcgccagcagccctgaggagaactggccagcctgccagaaggcctacaacctgaacagaacacccagcacagtgaccctgaacaacaacagcgccccagccaacagagccaaccagaactttgatgagatggagggcatccgggagaccagccaggtgatcctgcggcccagcagcagccccaaccccaccaccatccagaatgaaaacctgaagtccatgacccacaagaggagccagaggagcagctacacccggctgagcaaggaccccccagagctgcatgctgctgccagcagcgagagcacaggctttggagaggagcgggagagcatcctgtag

SEQ ID NO: 205467 - DNA, 2985 bp, Artificial Sequence
  derived and/or modified sequence
atggtgcgggacatcctgcagtgcaacccagacacagagatctgcaccaaggatggagagacccccctcatcaaggccaccaagatgaggaacatcgaggtggtggagctgctgctggacaagggggccaaggtgtctgctgtggacaagaagggggacacccccctgcacatcgccatccggggccgcagcaggaagctggccgagctgctgctgaggaaccccaaggatggccgcctgctgtaccggcccaacaaggccggggagaccccctacaacatcgactgcagccaccagaagagcatcctgacccagatctttggagcccggcacctgagccccacagaaacagatggagacatgctgggctatgacctgtacagcagcgccctggccgacatcctgtctgagcccaccatgcagccccccatctgtgtgggcctgtatgcccagtggggcagcggcaagagcttcctgctgaagaagctggaggatgagatgaagacctttgctggccagcagatcgagcccctcttccagttctcctggctgattgtgttcctgaccctgctgctgtgtggcggcctgggcctgctgtttgccttcaccgtgcaccccaacctgggcattgctgtgtccctgtccttcctggccctgctgtacatcttcttcatcgtcatctactttggaggccggcgggagggggagagctggaactgggcctgggtgctgagcacccggctggcccggcacatcggctacctggagctgctgctgaagctgatgtttgtgaaccccccagagctgcctgagcagaccaccaaggccctgcctgtgcgcttcctgttcacagactacaaccggctgagctctgtgggcggggagaccagcctggccgagatgattgccaccctgagtgatgcctgtgagcgggagtttggcttcctggccaccaggctcttccgggtcttcaagacagaggacacccagggcaagaagaagtggaagaagacctgctgcctgcccagctttgtgatcttcctgttcatcatcggctgcatcatcagcggcatcaccctgctggccatcttccgggtggaccccaagcacctgactgtgaatgctgtgctgatcagcatcgcctctgtggtgggcctggcctttgtgctgaactgcaggacctggtggcaggtgctggacagcctgctgaacagccagaggaagaggctgcacaatgctgccagcaagctgcacaagctgaagtctgagggcttcatgaaggtgctgaagtgtgaggtggagctgatggccaggatggccaagaccatcgacagcttcacccagaaccagacccggctggtggtgatcattgatggcctggatgcctgtgagcaggacaaggtgctgcagatgctggacacagtgcgggtgctcttcagcaagggccccttcatcgccatctttgccagtgacccccacatcatcatcaaggccatcaaccagaacctgaacagcgtgctgcgggacagcaacatcaatggacatgactacatgagaaatattgtgcacctgcctgtgttcctgaacagccggggcctgagcaatgccaggaagttcctggtgaccagcgccaccaatggagatgtgccctgcagcgacaccaccggcatccaggaggatgctgacagaagagtgtcccagaacagcctgggggagatgaccaagctgggcagcaagacagccctgaacagaagagacacctacagaagacggcagatgcagaggaccatcacccggcagatgagctttgacctgaccaagctgctggtgacagaggactggttcagtgacatcagcccccagaccatgaggcggctgctgaacatcgtgtctgtgacaggccgcctgctgcgggccaaccagatctccttcaactgggaccggctggcctcctggatcaacctgacagagcagtggccctaccgcacctcctggctgatcctgtacctggaggagacagagggcatcccagaccagatgaccctgaagaccatctatgaaagaatcagcaagaacatccccaccaccaaggatgtggagcccctgctggagattgatggagacatccggaactttgaggtgttcctgagcagcaggacccctgtgctggtggccagagatgtgaaggtgttcctgccctgcaccgtgaacctggaccccaagctgcgggagatcatcgcagatgtgcgggccgcccgggagcagatcagcatcggcggcctggcctacccacccctgcccctgcacgagggccccccccgggcccccagcggctacagccagccccccagcgtgtgcagcagcaccagcttcaacggcccctttgctgggggcgtggtgagcccccagccccacagcagctactacagcggcatgacaggcccccagcaccccttctacaacagaggcagcggccctgcccctggccctgtggtgctgctgaacagcctgaatgtggatgctgtgtgtgagaagctgaagcagatcgagggcctggaccagagcatgctgccccagtactgcaccaccatcaagaaggccaacatcaatggccgggtgctggcccagtgcaacattgatgagctgaagaaggagatgaacatgaactttggagactggcacctgttccgcagcacagtgctggagatgagaaatgctgagagccacgtggtgcctgaggacccccgcttcctgtctgagagcagcagcggccctgccccccacggggagcccgcccggcgggccagccacaatgagctgccccacacagagctgagcagccagaccccctacaccctgaacttctcctttgaggagctgaacaccctgggcctggatgagggcgcccccaggcacagcaacctgtcctggcaggaggagaatgccggcctggagattgacagcagcagtgaagatcctgactag

SEQ ID NO: 205468 - DNA, 5316 bp, Artificial Sequence
  derived and/or modified sequence
atgagcgtgctgatcagccagagcgtgatcaactacgtggaggaggagaatatccctgctctgaaagccctcctcgagaaatgcaaggacgttgatgagcgtaatgagtgcggccagactcccctgatgattgccgcggagcagggcaacttggaaattgtgaaggaacttatcaagaatggcgccaattgtaatctggaggacctcgacaactggactgctctgatatcagctagtaaagaaggccacgtgcacatcgtggaggagcttctcaagtgcggcgtaaatctcgaacacagagacatgggtggctggaccgccctcatgtgggcatgctacaaaggtagaacagatgtcgtggagttgctgctgagccacggtgcaaatccctcggttacaggtctatattcagtctacccaattatctgggcagcaggccggggccatgctgatatcgtgcatttactactccagaacggcgcgaaggttaactgctctgataagtacggcacaacgcccctggtgtgggctgcccgcaaggggcacctcgaatgcgtgaaacatttgctcgctatgggcgccgatgtcgatcaggagggcgccaacagtatgactgcactgattgtcgccgtgaagggggggtacactcagtctgtcaaggagattctgaagcgaaatccaaatgttaatttgaccgataaagacggcaataccgcgctgatgatcgctagcaaggagggacatacagagatcgtgcaggatctcctggacgcgggtacatatgtgaacatcccagatagatcaggggatacagtgctgatcggagcggttagaggaggccatgttgagatcgtccgcgctttgctgcaaaagtatgctgacatagacataaggggccaagacaataagaccgctctgtattgggccgtggagaagggtaatgcaactatggtgcgggatatcttacagtgcaaccccgacaccgagatctgcaccaaagatggtgaaactccgttgattaaagcgacaaagatgaggaacatcgaagtggtggaactgctgcttgataagggagcaaaagtgtcagccgttgacaaaaagggggacacccccctgcatatcgccattcgaggcaggtcccgcaagcttgccgagcttcttttacggaaccctaaggacggaaggttactctataggcctaacaaggctggcgaaaccccgtacaacattgactgttcacaccagaaatctattcttacacagatctttggcgcccgccaccttagtcctactgaaactgacggcgacatgctgggctacgatctctacagtagcgccctggccgacattctaagcgagcctaccatgcagccacctatctgtgtggggctgtacgcccagtggggctccgggaaatccttcttattaaagaagctggaggacgagatgaaaacctttgccggacagcagattgagccactcttccagttttcctggttgattgtcttcctgacactgctgttatgtggcggcctcgggctgttgttcgcttttacagtccatcccaatctgggaattgcagttagcctctctttcttggccctgctttacatattcttcatcgtgatatatttcggcggaaggcgagaaggtgagtcttggaactgggcctgggtgctgagcacaaggttggctcgccacatagggtacctcgagctgttgctcaagttgatgtttgtgaatcctcccgagctgcctgagcagaccactaaggccttgcccgtgcgcttcctctttactgattacaacagattgtcctctgtgggcggtgagacgagtctagccgaaatgatcgcaaccttatccgacgcatgcgagcgggaattcgggttcttggcgacccgtctcttcagggtttttaagaccgaggatacacaaggcaaaaaaaagtggaaaaagacatgttgcctgccttctttcgtcatttttctcttcatcatcggctgcatcatctccgggattactttactcgctatctttagggtcgatcccaagcacctgaccgtgaacgctgtcctgatttctatcgcttcagtggtcggtctggcctttgtgctaaactgcagaacttggtggcaagtgctggactccctcctgaatagtcagcgcaagagactgcacaacgctgcctctaagctacacaaactgaagtctgaagggtttatgaaagtgttgaagtgcgaggtcgaactcatggctcggatggccaagaccattgactcttttactcaaaatcaaacaagactcgtggttatcatcgatggcctggacgcgtgcgagcaggacaaggtgctccaaatgctcgacaccgtaagagtgctcttttcaaaaggacccttcattgctatctttgcaagtgacccccacatcattataaaagctattaatcagaacctgaattccgtcctgcgcgacagcaatattaacggacacgattacatgagaaacattgtacatctgcctgtcttcctgaattccagaggtctttccaatgcccgcaagttcttggtgactagcgccactaatggcgacgttccctgcagcgatactacggggatacaagaagatgccgatagaagagtctcccaaaattcactgggagagatgaccaaacttggtagcaagacggctctcaatcgaagagatacatataggcgccgtcagatgcagcggacgataactaggcaaatgagcttcgatctaacaaagctgctggtgacagaagactggttctctgatatctcaccccaaacaatgagacggcttttgaatatcgtatcagtgacaggtcgactccttagggccaaccaaatttcctttaattgggacagactggccagttggataaatctcaccgaacagtggccctacagaactagctggttgatactttacctggaagagacggagggaatcccggaccagatgaccctgaaaacaatctacgaaaggatcagcaaaaacatcccgacaaccaaggatgtggaacctctgctggagattgacggcgacattagaaattttgaggtctttctttcatctcggactcccgtgttagtggcacgggacgtgaaagtgttcttaccatgtacagtcaaccttgatcccaagctccgcgaaatcatcgccgacgtgcgcgccgcccgcgagcaaatctctatcggcggcctagcataccccccgctgccacttcacgaggggcccccacgagcgccttcaggatactctcagccccccagcgtgtgcagctcaaccagctttaatggcccttttgcaggcggagtggtctcaccacaaccccattctagttactacagcggtatgaccggccctcagcatcctttctacaatagaccttttttcgccccttacctatacactcctcgctactaccccgggggaagtcagcaccttatatccaggccaagtgttaaaacctctcttcccagagatcagaataacggactggaagttataaaggaagatgcagccgaggggttgtcctctccaaccgattcatcgcgcgggagtggccccgcacccggtcccgtcgtgctgctcaatagcctgaacgtggacgcagtgtgtgaaaagttgaaacaaatcgaaggactcgatcagtctatgttgccccaatattgtactactatcaagaaggcaaacattaacggtcgcgtcctggcgcagtgcaacattgatgaactcaagaaagagatgaatatgaacttcggtgattggcaccttttcaggtctaccgtgcttgaaatgagaaatgccgagtcccatgtggtgcccgaggacccgcggttcctctcggagagttcctcgggtccagcccctcatggggagccagccagacgagccagccacaacgagctaccccatactgaactcagcagtcaaacgccatacaccttgaatttctcttttgaggagttaaacactctgggcttagatgaaggcgctcctcgtcatagcaacctgagctggcagtcccagacccgacgtacaccctccctcagctctctgaatagtcaggattcctccattgagataagcaagctgaccgacaaggttcaggcagagtaccgcgacgcctatagggagtatattgcacaaatgtcccagctggaaggcggccccgggtctaccaccatctctgggagatcatcccctcactccacatattatatgggacagtcctcatcaggaggcagcatccactctaacctggaacaggagaaaggtaaggacagtgagcccaaacccgacgacgggcgcaaaagttttctcatgaagcgaggagatgttatcgactatagttctagcggcgtatctacgaatgacgcttcccctttggatcccatcacggaagaggacgagaagtccgaccagtctggctcaaagttgctcccaggaaagaagagcagcgagcgttcttcactctttcaaaccgatttgaagctaaaagggtccggtctgcgctatcagaagttgccaagtgatgaggatgaatctggaactgaggagtccgataatacacctttgttgaaggatgataaagatcggaaagctgaaggcaaagtcgagagggtgcccaagtctccggaacacagtgcagagcctatcagaacatttattaaggcaaaggagtacttgagtgacgccctgctggataagaaggacagttccgacagtggcgtgcgatcttctgagtcttccccgaaccactcccttcacaatgaagtggccgatgattcacaactggaaaaagctaatctgattgaactggaggacgacagccactctggcaagagaggaattcctcatagcctttctggactccaagacccgatcattgcccggatgagcatctgcagcgaggacaagaaaagcccctcagaatgctccctgatcgcgtcttctcccgaggaaaactggcccgcttgtcaaaaagcgtacaacttgaaccggaccccttccaccgtaaccctaaataataacagcgcccctgccaatagagccaaccagaatttcgacgagatggaaggaatccgcgagacctctcaggtgatccttcggcccagctcctccccgaaccctactactatccaaaacgaaaatctaaaaagtatgactcacaagcgctcgcagcggagctcttatactaggctcagtaaggatcccccagagttacacgctgccgcttctagcgagtccactgggttcggcgaggagagagagagcattctctag

SEQ ID NO: 205469 - DNA, 3096 bp, Artificial Sequence
  derived and/or modified sequence
atgagcgtgctgatcagccagagcgtgatcaactacgtggaggaggaaaatatcccagctcttaaagctttgctcgagaagtgcaaggacgtagacgaacggaacgagtgtggacagacgccgttgatgatcgccgctgaacagggaaacctagaaatcgtcaaagaactgataaaaaatggcgcaaactgtaatctcgaggacctagacaactggacagctctcatctccgcatcaaaggaaggccacgtccatatagtggaggagctgttaaaatgcggggtgaatctagaacacagagacatgggcggctggacggccctgatgtgggcatgttacaaaggacggaccgacgtggtggagctgctgctttcgcacggggcaaatcctagcgtcacggggctgcaatactccgtgtatcctatcatttgggcagctgggcgtgggcatgcggatattgtccacctcctcttacaaaacggcgccaaagtcaattgctccgataaatacggcactacccccttggtatgggcagcccgaaaaggacacctggagtgtgtgaagcacttgctggcaatgggggcagacgtagaccaagaaggcgccaattccatgacagctctgatagtggctgtcaaaggcgggtacacacagtccgtgaaggagatccttaaacgcaacccgaacgtaaacctgacagacaaagacggcaacacagcgttgatgatagctagcaaagagggccacacagagatagtgcaggacttgctagacgccgggacatatgtaaatatcccagacagaagcggcgataccgttcttatcggggcggtgcgtggtgggcacgtggagattgtccgtgccttgctgcagaaatacgctgacatagatatacggggacaagataataagaccgctttgtattgggctgtcgagaaggggaacgccacgatggtaagggacatcctgcagtgcaatcctgacaccgagatttgcactaaagatggcgagacgccacttataaaggcaacaaagatgcgcaacatcgaagtcgttgagctgttactggataagggagcaaaggtgtcagccgtagataaaaagggagatacccccctacacatagcgattcgcggtcgctcaaggaaactggccgaattgttgctcagaaaccctaaggatggtagacttctgtatcggcctaacaaggcaggcgagactccctataacattgattgctcccaccaaaagtctatactaacgcagatctttggggcccggcatctgagcccaactgaaactgacggtgatatgcttggctatgatctttattccagcgccctggctgacatcctgtcagagccaacaatgcagcccccaatatgcgtgggcttatacgctcagtgggggagcggtaagtcctttctgctcaagaagctggaggacgaaatgaaaacgttcgccggtcagcagattgaaccactctttcagttctcttggctgatcgtattcctgactttactcctctgcggtggtttaggactgcttttcgcctttaccgttcatcctaatctcggcatcgctgtgtcactcagttttctcgctttgttgtacatcttctttattgttatttacttcgggggccgacgcgaaggcgaaagctggaactgggcttgggtgctctctacccgcctcgctagacatatcggttacctggagctcctccttaaacttatgtttgtcaacccccccgagctccccgagcagacaactaaagctctgcccgttcggtttttatttaccgactacaatcggctatcaagcgtgggtggggagacgtccctcgccgagatgatcgccactctgtcagatgcatgcgagcgtgaatttggtttcctcgccacgcggctgtttcgggtatttaagacagaggacacgcagggtaaaaaaaagtggaaaaagacctgctgcttgccctcttttgttatctttttatttattatcggttgtataatcagtggtatcacccttctggctatctttcgggtcgatcctaaacacctgacagtgaatgctgtgctgattagcatcgccagcgtcgtgggtctggcctttgtgctgaactgtagaacttggtggcaggtgcttgattccctgttaaacagccagcggaagcggctgcacaacgctgcaagcaaattacataagctcaagtcagaagggtttatgaaagttctgaagtgcgaggttgagctcatggcccggatggctaaaaccatcgatagctttacgcaaaaccagacacggctagtggtcatcattgacggcctggacgcatgtgagcaggataaagttttacaaatgctggatacagtacgagttctttttagcaaaggcccttttatagccattttcgctagcgatccacatataataattaaggccatcaatcagaacctgaattccgttttgcgcgatagcaacattaatggccacgattatatgcggaacatcgtccatttacctgtgttccttaattcccggggcctcagtaacgcaaggaaatttctggtgacctctgcaacaaacggagatgtgccgtgctccgatacgaccggaatacaagaggacgcagacaggcgcgtttcgcagaattcgctgggcgagatgacaaaattgggaagcaaaacagctctcaatcgtcgtgacacctacaggcggaggcagatgcaacggacaattacccgccagatgtctttcgacctgaccaaattactggtgactgaagattggttctcggacatctcaccacagacgatgcggagacttttgaatattgtgtcggtcacgggacgtctgttacgagcaaatcagatatcctttaattgggatcgactggcgtcctggattaatctgaccgagcagtggccgtatcgaacatcctggcttatactctacctagaagagaccgaaggtatcccagaccaaatgacactcaagactatttacgaacgatgttgtggtgccgattcatgcgatcgagacagaattggaatctccaagtctgtactcgttgcaatgctgatggagtcctag

SEQ ID NO: 205470 - DNA, 5019 bp, Artificial Sequence
  derived and/or modified sequence
atgatcgccgccgagcagggcaacctggagatcgtgaaggagctgattaaaaacggcgccaattgtaatctggaggatctcgacaattggacagccttgatttccgcaagcaaagaaggacacgtgcatatcgttgaagagctattaaagtgtggcgtgaacctagaacaccgggacatgggtggctggacggcccttatgtgggcatgttacaagggaagaacagatgtagttgagctcctcttgtcccacggggccaatccatctgtgactggcctctacagtgtatatcctattatctgggccgctggacgcgggcatgctgatattgttcatctgctcctccaaaatggtgcaaaggtgaactgtagcgataagtatgggaccacccccctggtctgggcagcacgtaaaggccatttagagtgcgtgaaacacctgttggccatgggtgctgatgtcgatcaggagggggccaatagcatgaccgctctgatcgttgcggtgaagggcggctatacccagtcggtcaaagagattctgaagcgcaatcctaacgtgaatcttaccgacaaggacgggaacactgccttgatgatcgctagtaaagaaggccatactgagattgtgcaagatttgctcgacgcaggaacttatgtgaacatcccagaccgtagcggagacactgttcttataggagccgtgagaggaggccacgtagaaatcgtgcgagccttgctacaaaagtatgccgacattgacatccgagggcaggacaataagactgctttgtactgggccgttgaaaaggggaacgccacaatggtgagagacatactccagtgtaaccctgatacagagatctgcacaaaggacggagagacccccctgatcaaggctacaaaaatgcgcaatatcgaagttgtggagttgctgcttgacaagggggccaaggttagcgcagtcgataagaagggggacactcccctgcacatagcaattagaggtagatctcggaaattggccgaactactgctgagaaaccccaaagacgggagactcctctacaggcccaacaaagccggagagactccgtacaatatagattgtagtcatcagaagagtattctgacacaaattttcggtgccagacacttgtcaccgacggaaaccgacggggacatgctgggctacgacctgtactctagcgccctggctgatatcttgtcagaacctacaatgcagcctcccatctgcgtgggtctgtacgcccagtggggaagtggcaagtcgttcctcctgaagaagctcgaggacgagatgaagacttttgccggccagcagattgaacccctgttccagttctcctggttgattgttttcctgactttgctgctctgcggagggctcggtcttctgtttgctttcaccgtccacccaaatctaggtattgctgtgtcacttagctttcttgcactcctgtacatcttctttatcgtaatctattttggtgggcgtcgagaaggggaaagctggaattgggcctgggtcctgtctactcgactggcccgccacatagggtacttggagttactgttgaaacttatgttcgttaacccccctgaactacccgaacaaaccaccaaagctttacctgtgaggttcctatttacagactataatcggctaagttccgttggtggggaaacctcactcgctgagatgattgctacactgtctgatgcgtgtgaaagagaatttggttttctcgccacccgactgttccgcgtgtttaagaccgaagacacacagggaaaaaagaagtggaaaaagacctgttgtttacctagcttcgtcatcttcctgttcatcattggatgtattatatccggaataactctgttagccatctttcgcgttgatcctaaacacctgaccgtgaacgccgttctgattagcatcgcatctgttgtcggactggcctttgtcctcaactgcaggacatggtggcaggtcctggactccctgttgaactcacagcggaaacgcctccacaacgcggctagtaagttgcataaattgaagtccgaaggtttcatgaaggtattgaaatgcgaagtggagctgatggcccggatggctaaaacaatcgacagctttacacagaatcagactaggctggtcgtgatcatcgacggtctcgacgcctgtgagcaagacaaggtcctccagatgctggacacggttcgcgttctgttctctaaagggcctttcatagccatctttgcatctgacccccatataattataaaagccatcaatcaaaacctcaactccgttctgcgcgactctaacattaacgggcatgactatatgcgcaacatcgtgcacctgccagtgttcctcaactcacgtggactctccaacgcgcggaagttcctggttactagtgccacaaatggagatgtcccttgttctgatactaccggaatccaagaggatgcagacagaagggtttcacagaacagcctcggtgaaatgaccaaactgggatcaaaaacagcccttaatcgacgagacacctaccgcaggagacagatgcaacgaacaatcacgaggcagatgagctttgacctgaccaagttgttggtcaccgaggattggttctctgacatttctcctcagactatgagaagactcctgaatatcgttagtgtaacaggacgcctgctaagagctaaccaaatttcctttaattgggaccgtttggcatcctggataaatctgaccgagcaatggccttaccggacatcctggctgattctgtatttggaggagacagagggtatacccgaccagatgacacttaaaaccatctacgagagaatttctaaaaatattccaactaccaaggacgtggaacctttgctggagatagacggcgacatcaggaatttcgaagttttcctgagtagccgtactccagttttagtggctcgggatgtcaaggtttttttgccatgcacagtgaatctggatccgaaactcagagagattatcgcggacgttagggcagcacgcgagcaaatcagcattgggggcttggcctatccccccctgcctctccacgaaggcccacctcgggcaccctccggctattcccaacccccctccgtgtgtagttccacatcatttaacgggccatttgccggcggagtggtcagcccgcagccccatagctcgtattatagtggtatgaccggccctcagcatccgttctataatcgcggctcggggccagctcctggcccggttgtactactcaattcactgaatgtagacgcagtgtgcgaaaagctgaagcagattgagggactggaccagagcatgctgccccagtactgtactactattaagaaggccaatattaacggccgggtccttgcgcagtgtaacatcgacgagctcaagaaggagatgaacatgaattttggagattggcacctgtttcgatcaactgtgctggagatgcgcaacgcagaaagccatgtagtgccagaggacccccgcttcttatccgagagttcttcgggccctgcaccacatggcgagccagcacggcgggcttcacacaacgaactgccccacaccgagctttcatcccagaccccgtacactctgaatttcagtttcgaggaactgaacacgttgggactcgatgagggagcacctcgacactctaatctcagctggcaatcacagactcggcggactccaagcctgagttccctgaattctcaggactcatccattgagatctctaagctaaccgataaggttcaagcagagtatcgagatgcctaccgcgaatacattgcgcagatgagccaactggagggtggccccggctcaaccaccatttcagggcggagttctccccactccacttattacatgggccagtctagctcaggtgggagcattcactcaaatttagaacaggaaaagggcaaggattccgaacctaaaccggatgatggtcgcaagtctttcctcatgaagcggggagacgttattgactatagctcctcaggcgtgtccacaaacgatgcttcacctctggatccaataactgaagaggacgaaaaatctgatcagagcggaagcaagctgttaccgggaaagaaaagttcagaaagatcgagcctgtttcagaccgatctgaaactgaagggcagcggcctgaggtatcagaaactgccatcagatgaggacgaatccggtaccgaagaatccgataacacgcccctcctaaaagatgacaaggacagaaaggccgaagggaaggtcgaaagagtacccaagtctcccgaacacagcgctgaaccaatccggacctttatcaaggccaaggaatatctatctgatgcattgcttgataaaaaggatagcagcgatagtggcgtacggagctccgaatctagtccaaatcattcacttcacaacgaggtcgccgacgattcccaactcgaaaaggctaatttgatcgagctagaggatgactcgcattctggaaagcgtggcatcccacatagcttgtccgggttgcaggatcctattatcgctcgaatgagtatttgctctgaggataagaaaagtccctctgaatgctcactgatcgcgtcgagtcctgaggagaactggcccgcctgccagaaggcttacaacttaaatagaactccctccacagtgacacttaataataactccgcaccagcaaatcgggcgaatcaaaacttcgatgaaatggagggtatcagggagacctctcaggtgatcctgaggcctagctctagtcctaaccctacaacaatccaaaatgaaaatctcaaaagtatgacccataaacgaagccagagatccagttatactcgcctatcaaaggatccaccagagctccatgcagcagcatcctccgagtctaccggttttggagaggagcgagagtctatactttag

SEQ ID NO: 205471 - DNA, 5259 bp, Artificial Sequence
  derived and/or modified sequence
atgagcgtgctgatcagccagagcgtgatcaactacgtggaggaggagaatatccccgccctgaaggcgctcctggaaaagtgtaaggacgtcgatgaacgcaatgaatgcggacagacacccctgatgatcgcagcagagcaaggcaatctggagatcgtgaaggaattaatcaagaatggcgcaaattgcaatttagaggacctggacaattggacagcactcatcagtgccagcaaggagggacacgtgcacatcgtggaggaactgctgaagtgtggggtgaatctcgagcatcgtgacatgggcggatggacagctctgatgtgggcgtgttataagggccggaccgacgtcgtcgagctccttctgtcacatggcgccaatccttcagttacaggcctgtactctgtgtatcccatcatttgggccgcaggacgaggccatgccgatattgtacatctcctcctgcagaatggagccaaggtcaattgttcagacaagtatgggacaacccctcttgtgtgggctgctcgaaagggacatctggagtgcgtgaagcacctgcttgccatgggcgcggacgtcgatcaggagggagctaactccatgactgccctgatagtcgcggtcaaaggtggctatacccagagtgtgaaggagatcttgaaacggaatcccaacgtgaatctgaccgataaagacggcaataccgctttgatgattgcaagtaaagaaggccatacagagatcgtgcaagatctgctcgacgcgggaacatacgttaacattcctgaccggtcaggagacacagtactcattggagctgtcaggggaggacacgtcgaaattgttcgagcactgctgcaaaagtacgccgacatagatattaggggtcaagacaataagacagctttgtattgggccgtagaaaaaggaaatgcaacaatggtgcgggacatcctgcagtgcaatcctgacaccgagatctgcacaaaggacggagaaacccccctgatcaaagctaccaagatgaggaatatcgaggttgttgagctcctcctggataaaggcgccaaggtgtctgcagtcgacaaaaagggcgacactcccctgcatattgccattcggggccgatcccgcaagcttgcggagctgcttctgcgcaatcccaaagatggtcgcttactctaccgtccgaataaagccggggaaaccccgtataatattgattgttcccatcagaaaagcattttgacacagattttcggggccaggcatctcagccctactgagaccgatggggacatgctcggatacgacctttactccagcgctctcgccgacatactgagcgagccaacaatgcaacccccaatctgcgttggtctgtacgcgcaatgggggagtggaaagtcgtttcttctcaaaaagctggaagacgaaatgaagaccttcgcaggacaacagattgaaccacttttccagttttcctggctaatagtcttcttaacactactgctctgtggcggcctcggtctcctgttcgcatttacggttcaccctaaccttggcattgctgtgtctctgtcttttctcgccctgctgtatatattctttatcgttatctactttggaggacggcgtgagggcgaaagctggaattgggcatgggtcctgagtaccaggctggcccgccacatcggctacttagaattgttgctgaaactgatgtttgtgaaccccccagagcttccggaacagacgacaaaggctttgcccgtgagatttctttttactgactataaccggctcagtagcgttggcggagagacctctctggctgagatgatcgcgacactgtcagatgcttgcgagcgagaattcggctttctggccactagactttttcgcgtttttaaaacggaggatactcagggaaagaagaagtggaaaaagacctgctgcctgccctcatttgtgatttttctattcatcatcggctgcataatttcgggtattactctcttggcaatatttagagtcgacccgaaacacctgacagtgaacgccgtgttaatcagcattgcgtccgtcgtgggcctcgcctttgtgctgaactgtagaacgtggtggcaggtcctcgactctctgctcaacagccaaagaaagcgcctgcataatgctgctagcaaactccacaaactgaagagcgagggcttcatgaaggtactgaaatgtgaggtagagttgatggctaggatggccaaaaccatcgatagttttacacagaaccaaacgcggttggtggtaatcatcgatgggctggacgcctgtgagcaggacaaggtgctgcagatgttggacactgtcagagtgcttttttccaaagggcctttcatagccatcttcgcatctgatccccatatcattatcaaggctatcaaccagaatctgaactccgttctgagagactcaaacattaatggccatgattatatgcgaaacatagtgcacctgcccgtgttcctcaactcccggggacttagtaacgccagaaagttcttagttacatccgccacgaatggggatgtcccttgctccgacactacggggattcaggaagacgctgataggcgcgtgtcacagaactccctcggagaaatgaccaaactgggcagcaaaactgcacttaaccgccgcgacacctaccgtaggcgacagatgcagagaaccataactaggcagatgtccttcgatctcaccaaacttctcgtcactgaagactggtttagcgacatttcaccccagacaatgagacgactcctcaacatcgtgtctgtgaccggaaggctgctaagggccaaccagattagtttcaactgggatcggctggcctcatggattaatcttacggaacaatggccgtaccggacatcgtggctgattctgtatctcgaggagacggagggcatccctgatcaaatgaccctgaaaaccatttatgagcggattagcaagaatattccgactaccaaagatgttgagccactcctggagatcgacggcgatattcgcaatttcgaggttttcctttctagcagaacacccgtgttagtggctagagatgttaaggtcttcttaccatgcaccgtcaacctggaccccaaactgcgggagatcatcgctgacgtgcgggcagccagagaacagattagtattgggggcctcgcctacccacctctaccgctgcacgagggacccccaagagccccctctggttacagccagccaccatctgtctgtagcagtacctccttcaatggccctttcgctggaggcgtcgtctctccacaacctcacagctcttattattcaggtatgaccggaccccagcatccattctataatcgcccgtttttcgccccctacctgtatacaccaagatactaccctggcggctcccagcacctgatcagtagaccatcggtgaagacttctctcccccgagatcagaacaacggcttagggagcggccctgctcccgggcctgtagtgttgttaaattccctcaacgtggatgccgtgtgtgaaaaactgaagcagatagaaggattggatcagagtatgttgccacaatattgcacaaccattaagaaagctaatatcaatggacgggttctggcacagtgtaacatcgacgagcttaagaaggaaatgaatatgaacttcggcgactggcacctatttcggtctacagtgctggaaatgcggaatgccgaatcccacgtagttccagaggatccaagatttctctctgagagctcttcaggtcccgcccctcatggggaacccgctagacgcgcatcacataacgaactgcctcatactgagctttcttctcagacaccctacactcttaacttttcctttgaagagttgaacactctggggttggacgaaggggcccctcgacacagcaacctttcctggcaatctcagaccagacgaacgccgagcctgtctagtcttaactcacaggattcatcaatcgagattagtaaactgacagacaaagtacaagctgagtaccgtgacgcttacagagagtacattgctcaaatgagtcagttagaaggggggccggggagcacaaccatcagcggtagatcctccccgcactcaacctactacatgggccagtccagttcaggaggatcaattcattcaaatctcgagcaagagaaagggaaggattcggagccaaagccggatgatggacgcaagtcttttctgatgaaaagaggggacgtcatcgactactcaagttctggcgtgtctacaaacgacgcatctccactagaccctatcacagaggaagatgagaaaagtgatcaatctggctctaagttactcccagggaaaaagagctcagagcggagttcgctctttcagacagatctgaagctcaaaggctctgggctgcggtaccaaaagctgccgtcagacgaggatgagtctggaacagaggaatccgataatactcccctcctgaaggacgacaaagatagaaaggctgagggcaaagttgaacgtgtgcccaagtcacccgagcatagcgccgagccaatccggacattcataaaggctaaagaatacctgagcgacgcactcctcgataaaaaggattcatccgactcaggggtcaggtcttccgaaagtagcccgaatcactctctccacaacgaggtggccgacgactcacagttagaaaaggcaaacctgatcgagttagaagacgactcccactcaggaaaacggggcatcccacacagcctgtcgggtcttcaggaccccataattgcaagaatgtcaatctgcagtgaagacaagaaatccccaagcgagtgctcgcttatcgcatccagccccgaagagaattggcccgcctgccaaaaagcctataacttaaatagaacacctagcacagtcactctgaataacaattcagcgcctgccaacagagcaaaccaaaatttcgacgaaatggagggcattcgggaaacctctcaggttatcctgcggcctagctcctcccccaatccgactaccatacaaaatgagaacttaaagtccatgacccacaaaaggtcacagcgatcgagctatacccggttgtcaaaagacccgccagagcttcacgctgccgcttcctccgagtccaccggatttggggaggagcgggagagcatcctgtag

SEQ ID NO: 205472 - DNA, 5259 bp, Artificial Sequence
  derived and/or modified sequence
atgagcgtgctgatcagccagagcgtgatcaactacgtggaggaggagaatattcccgctttgaaagctctcctcgaaaagtgcaaggatgtggatgagcgtaatgaatgtgggcagacacccctgatgatcgcggccgagcaaggaaacttagaaattgttaaagagctcatcaaaaacggggccaattgtaacctggaggacttggataattggacagccttgatctccgcctccaaggagggacacgtgcatattgtagaagaactgctcaaatgcggtgtgaacctggaacacagggatatgggaggctggaccgccctgatgtgggcatgctataaaggcagaactgatgtggtggagctactgctctcccatggtgctaacccatctgtgaccggactgtatagtgtctatccgatcatatgggcagccgggaggggtcacgctgatattgtacaccttctgctgcagaacggtgcaaaagttaattgctctgacaagtatggcactacacccctggtttgggcggctagaaaaggtcatctcgagtgtgtgaaacatttgctggctatgggcgcagatgttgatcaggagggtgccaactctatgaccgcacttattgtcgccgtgaagggaggctacacacagagcgtgaaggaaattttaaaacgtaaccctaatgtaaatttgaccgataaagatggcaacaccgccctgatgatcgctagcaaagagggacacaccgagatcgtacaagacctattggatgcaggcacttatgtgaatatccctgacagatcaggagacacagtgctaatcggggcagtgcggggcggccatgtggagatcgtgcgagcattgcttcagaaatacgccgatatcgatatcagggggcaggataacaagaccgctttgtactgggcggttgagaagggcaacgctacaatggtgcgcgacatattgcagtgtaatcctgataccgaaatctgtactaaggatggagagacccctctgatcaaggctacgaagatgcggaacatcgaagtggtggaactgctgttggataaaggtgccaaggtctccgccgtggacaaaaagggtgatacccctctgcatatcgctatcagagggaggtcccgaaaactggccgagttacttctgaggaacccgaaggatggacggctcctgtaccgaccgaacaaggctggcgagacgccgtacaacatagactgctctcatcagaagtcaatactgactcagatctttggggctagacacttaagccctactgagactgacggtgatatgttgggatacgatctgtacagctccgcactcgcagacatactgagcgagccaactatgcagcccccgatttgtgtgggcctatacgcacaatggggctccggaaagagcttcctattaaaaaagctggaagacgagatgaagaccttcgcggggcagcaaattgagcctctgttccagtttagctggctgatcgtgtttctgacgctgcttctttgtgggggcctcggccttctgtttgcatttacagtgcaccccaatctggggatagccgtgagtctgagtttcctggcgctcctgtacatcttcttcattgtgatttatttcggtgggcggagggagggggagtcatggaattgggcttgggtgctcagcaccaggttagccagacacattggttatctggagctgttgctgaagctcatgttcgtgaatcccccggagttgccagagcaaacaaccaaagctctgcccgtacggtttctgtttaccgattacaatcgactgtcctctgtggggggagagacctctctggccgagatgatcgcgactctgtctgatgcctgcgagcgcgagttcggctttttggccacaaggcttttcagagtgtttaagactgaggatactcagggaaaaaagaaatggaaaaaaacgtgttgcttacccagtttcgtgattttccttttcataatcggctgtatcatcagcggtatcacactcctggccatctttcgggtggacccaaaacacctgacggtgaacgctgtgctgatcagcatcgcctccgtggtgggtctggccttcgttctaaactgtcgtacgtggtggcaggttctcgactctctcctgaattctcagaggaagcggctccacaacgccgcctcaaaattgcacaaactaaagagcgaaggtttcatgaaagtgttgaagtgcgaagtcgagctgatggcacggatggcaaaaacaatcgactcattcacgcagaatcagacccgcctcgttgtgattattgacgggctggatgcctgcgagcaagacaaggtattacagatgctggacaccgtgagggttctgttctctaagggccctttcatcgccatctttgccagtgatcctcacatcatcatcaaagccatcaatcagaatctaaactccgtactgagagactccaatattaacggccacgattatatgcgaaacattgttcaccttccagtctttctgaactcccgggggctttctaacgctcggaagttcttggtgacatcggctaccaacggggacgtgccctgtagtgacacgactggtatccaggaggatgccgaccgaagagtctctcaaaattctctcggcgagatgacaaagcttggtagcaagacggctctgaatagacgcgatacctatcgaaggcgccagatgcagagaactattaccagacagatgagcttcgacctgactaaattactcgtcactgaggattggttctccgacatttcgccacagactatgcggaggctcctgaacatcgtcagtgttactggcagactgctgagggcaaaccaaatctcctttaactgggatcgattagcctcctggatcaatttgaccgaacagtggccgtatcgtactagctggttgatcctctacttagaggaaaccgagggaatacccgaccagatgactctgaaaactatatatgaaagaatctccaagaacattcctactactaaagacgtagagcctctgctcgagatcgatggagacataagaaacttcgaggtctttctgtccagtcgaacacccgtgctggtggctagagacgtcaaagtctttcttccctgtacggtgaacctcgatccaaagctccgggagatcattgcggacgtgcgcgccgcgagggaacagattagcatcggggggctggcatacccgccactgcctcttcacgaaggaccaccacgggccccttccggatacagtcaaccaccgagcgtttgctcttcaacttcctttaatgggccattcgccggcggcgtggtgtcgccacagccccattcaagctactatagtggtatgacggggccccaacatccattctataatagacctttcttcgccccctacctgtacacccccaggtactatccaggggggtcccaacacttgatatctagaccctctgtgaaaacctccctccctcgcgaccagaataatggcttgggaagcggccccgctcctggcccagttgtgctgctgaactccctgaatgtggatgcagtctgtgaaaaactgaagcagattgagggtttggaccagagcatgttgccccaatattgtacaacaattaagaaggctaatatcaacgggcgtgtgttagctcagtgcaacatcgacgagctcaagaaagagatgaacatgaatttcggagattggcatctttttaggagcaccgtgctagagatgcggaatgccgagtcccacgtggtcccagaagaccccagatttctcagtgaatcctcctctggcccagctccacatggtgaacccgctcggcgcgcctctcacaacgagctgccccacaccgagctgtccagccagactccctacaccctgaactttagtttcgaagaactgaatactctggggttagacgagggggctccccggcattcaaacctctcgtggcaatctcaaactcgacgtaccccctccctgtcctcacttaactcccaagactcgagcattgaaatatctaagctcacggataaagttcaggccgaatacagagatgcatatagagaatatatagctcaaatgtctcaactcgaaggagggcccggtagcacgaccatttccggccgctcatcccctcacagcacctattacatgggccagtcgtcatccggcgggtctatccatagcaacctggaacaggaaaaaggcaaggacagcgaacctaaacctgatgacgggagaaagtctttcctcatgaagagaggtgatgtaattgattattcctcaagcggcgtaagcactaacgacgcttcccctcttgatcccattacagaagaagacgaaaaatcagatcagagcgggtctaagctacttccaggcaaaaaatcatccgaaaggagctctcttttccaaaccgatcttaaactcaagggcagtgggctgagataccaaaagctgccatccgatgaggacgaaagcggcacggaggagtcagataacacccccttactcaaagatgacaaggatagaaaggccgagggaaaagtggagcgcgtgcccaagagcccagaacacagtgccgagcccatccgtaccttcatcaaagcaaaagaatatttgtccgacgctctgctggacaagaaagattcatccgacagcggcgtgagatcctccgagtcctctccaaaccactcactccacaatgaggtcgcagacgactcccagctcgagaaagcgaacctgatcgagctggaggacgactcccacagcggaaagagaggaattccacattcgctgagcggactgcaagatcctataatagctcgcatgtctatttgcagcgaggataaaaaatcaccatctgagtgcagccttattgcctcttcaccagaggagaattggcccgcctgtcagaaagcgtataacctgaataggaccccctccactgttacattgaacaacaatagtgccccggcaaacagggccaaccagaactttgacgagatggagggcattagagaaacatcccaagttatcttgagaccctcatcctctcctaatcctacaacaattcagaacgagaacttgaagtctatgacccacaaaaggtcgcagcgaagcagttataccaggctgtcaaaggaccctcctgagcttcatgcggctgcttccagtgagtctaccgggtttggcgaagagcgcgagtctatcttgtag

SEQ ID NO: 205473 - DNA, 2985 bp, Artificial Sequence
  derived and/or modified sequence
atggtgcgggacatcctgcagtgcaaccccgacaccgagatctgcacaaaagacggcgagactccactgatcaaggctaccaaaatgagaaatatagaagtggttgaattactcctggataaaggggcaaaagtgtccgctgtcgataagaagggcgacacccctctacacatcgctatccggggcaggagtcgcaagctcgccgagctcctgcttcgcaacccgaaggacggtaggctgttgtatagaccaaataaggctggggaaactccctataatattgattgcagccaccagaagtctatactcactcaaatctttggagcaaggcacctcagcccaacagagacggatggagacatgcttggttacgacttgtactcatccgccctggcagatatactgtccgagccgaccatgcaacctcctatctgcgtagggttatatgcccaatggggttcgggaaagtcttttctactgaagaagctcgaggacgaaatgaaaacattcgccggtcagcagatcgaaccgcttttccagttttcctggctcattgtgttcctgaccctgttgctatgcggcggcctgggtctactctttgcattcacggtccatcctaatctgggaattgccgtctccttaagcttcctagctctcctttatattttttttatcgtcatctactttgggggccggcgggagggtgagagctggaattgggcatgggtcctttccacacgcctggcccgccacataggctatttagagcttctgctgaaactgatgttcgtcaatcccccagagctacccgagcagacgactaaggctttacccgtccgcttcctgttcactgattataataggctgagcagcgtgggaggcgagacatcccttgcagaaatgattgccaccttgagcgatgcctgtgaaagggagttcggtttcctcgccacacggttatttcgggtgtttaaaaccgaagacactcagggcaaaaagaagtggaaaaaaacctgttgtctcccttcattcgtcatcttcctgttcattattgggtgtatcatttctggcataactcttctagcaatttttcgggtggaccctaagcatctcacagtgaatgcagtcctgataagtatcgccagcgtagtgggccttgcgtttgtgctcaattgcaggacatggtggcaggtgctggactctctcctcaatagccagcggaagcgtctgcataatgctgcatctaagctccataagctcaagtccgagggctttatgaaagtgctgaagtgtgaagtagagctgatggctagaatggctaaaaccatcgacagttttactcaaaatcaaacacgcctggttgtcatcattgacggcctcgacgcctgcgagcaggacaaggtattacaaatgctggacactgttagggtcctcttcagcaaaggtccgttcattgccatctttgcatccgatccacacataatcattaaggccattaatcaaaacctgaattcagttcttcgagactccaacatcaacggacacgactatatgcgtaatattgtacatttgccagtttttctgaattctcgcggcctctccaatgcccggaagttcctcgtcacctctgccactaatggggacgtcccatgctccgacacaactgggattcaggaagacgcggatcgacgagtgtcccagaattcactcggcgaaatgactaaacttgggtccaaaacagcacttaaccggcgtgatacctatcggagacggcaaatgcagagaacaattacccgccagatgtccttcgacttgactaagctattggtgacggaagattggttcagtgacatcagtccccagacgatgcgtcgtcttctaaatatcgtgtctgttacaggccgcctgctcagggccaatcagatctcctttaactgggacaggcttgcctcgtggatcaacctgacggaacaatggccctacaggacctcctggctgatactgtatctcgaagaaacggagggaattcctgatcaaatgaccctaaagaccatctacgaaagaatctcaaaaaatattcccaccacgaaggacgtagaacctctgctcgagatcgatggggatatccggaattttgaggtgtttctctcgagtcgaacacctgtcttggtagcccgggatgtaaaggtgttcctgccatgtactgtgaatctggaccccaaacttagagaaattatcgccgacgtgagggctgctcgcgagcagatctctattggagggctcgcttacccccccctcccactgcatgagggacctcccagagccccatcaggctactctcagccacctagcgtctgtagctccacgtctttcaatggcccctttgccggaggcgttgtctcccctcagccgcatagttcgtattacagcgggatgaccgggcctcagcatcctttctacaacagagggtctggacctgcgcccggccccgttgttctactaaactctctgaacgtagacgccgtgtgcgagaagctcaagcagatcgaggggctagatcagtccatgctccctcagtactgcacaactatcaagaaagccaacattaatggaagagttctcgcgcaatgcaatattgacgagctgaagaaggagatgaatatgaacttcggcgactggcatctgttccgcagcaccgtgctcgaaatgcgcaatgccgagagccacgttgtgccagaggatccacgattcctctcagaaagcagttccggtcccgccccccatggcgagcctgcaaggcgcgccagtcacaacgaactcccccatactgaactgagttcacaaaccccgtacaccctgaacttttctttcgaggagctcaacacgttaggacttgacgaaggagcccccaggcattctaacctgagctggcaagaggagaacgcagggctggagattgacagttcgtccgaggatccagattag

SEQ ID NO: 205474 - DNA, 5316 bp, Artificial Sequence
  derived and/or modified sequence
atgtcagttcttatttcccaatcagtgataaattacgtcgaggaggaaaacattcccgctcttaaggcgttactggaaaaatgcaaagacgtcgatgaaagaaacgaatgtgggcagacccccctgatgatcgctgcagagcagggtaaccttgaaatagttaaggagctgattaagaacggcgcaaactgcaacttagaggatttagataactggaccgcgctgatctccgcctctaaggagggacacgttcatatagtcgaggaacttctgaagtgcggggtaaacctcgagcaccgggatatggggggttggacggctttgatgtgggcttgttataagggccgaaccgacgttgtggagttgcttcttagccacggtgcgaacccatctgttactggcctctactcagtgtacccaatcatctgggcagccggtcggggtcatgcagacattgtccatctgctcttacagaatggcgcaaaggtgaattgctcggataagtacgggacgaccccacttgtttgggccgctagaaagggtcacctggagtgcgttaaacacctcctggccatgggcgctgatgtggatcaggaaggagctaattcaatgaccgcattgattgtggccgtgaagggtgggtacacccaaagcgtgaaagagattctgaaacgcaacccaaacgtgaacctgacggacaaggacggtaacaccgccctcatgatcgccagcaaagaggggcacaccgagattgtgcaggacctacttgatgccggaacctacgtcaatatccccgatagatctggcgataccgtgctgatcggggcagtgagagggggacacgtggaaattgtccgagctctcctccagaagtacgccgatatcgacataagaggccaggataacaagacagccttgtactgggcagtggaaaagggcaacgccacaatggtccgtgacattttacagtgcaacccggacactgaaatttgcacgaaggatggcgagacgccactcataaaggccactaagatgaggaacatcgaagtcgtggaactactgctcgacaagggcgctaaggtcagcgccgtcgacaaaaaaggggacacccctctgcatatcgccatcaggggccgtagcaggaagcttgccgaactgctactacgcaaccccaaggatgggagattactatatagaccaaataaggctggagagactccttacaatatagactgcagtcaccagaaatctatcttaactcagatattcggcgctaggcacctcagccccaccgagactgacggggacatgctgggctacgacctctattcaagtgctctagcagacatcttgtccgagccaaccatgcagccacctatctgtgtcggattgtacgcccagtggggctctgggaagtcttttctcctgaaaaagctcgaggacgaaatgaagacatttgcaggccaacagattgaaccactgttccagtttagctggctcattgtgttcctcacgctgctgctctgcggcggtttgggactgctgtttgcatttaccgtccatcccaatctcggtatcgcagtttccttgtcctttctggctcttctgtacatttttttcatagtaatctatttcggagggagaagagagggggagtcctggaattgggcttgggtgctttctacaaggctcgcccgtcacatcggctatctggagctgctgctgaagctcatgtttgttaaccctccagagctccccgaacagactaccaaggctctccctgtgcgctttctctttacagactacaatcgattgagttccgtgggcggagaaacgagtctggccgagatgatcgccacactgtccgatgcatgcgaaagagagtttggcttcctagccaccagactctttagagtgtttaagaccgaggacacccagggaaaaaaaaagtggaaaaagacttgttgccttcccagcttcgtcatttttctgttcatcattgggtgtatcatctccgggatcaccctcctggcaatctttagagtggatcccaaacaccttacagtgaatgccgtgttgatctcaatcgcctccgtcgtggggctcgcgttcgtgctgaactgcagaacatggtggcaggtcctggactcattactgaactcacagagaaagagactgcataacgcagcctccaaacttcacaagctgaagtccgaggggttcatgaaggtgttgaaatgcgaggtggagcttatggctcgaatggctaagactatcgactccttcacacagaatcaaacacgactcgtggtcatcattgatggattggacgcatgcgagcaggataaggtcctgcagatgctggatactgtgagggtgctattttctaagggtccattcattgcaatctttgcttccgatccccacattattataaaggctattaatcagaatctaaatagtgttcttagggacagtaacatcaacggtcacgattatatgagaaacatagttcatttaccagtgttcctcaatagcagagggttgtccaacgcacgaaaatttctggtaaccagcgctacaaatggggatgtgccgtgttcagataccaccggcatccaggaagacgccgacagacgagtgagccagaacagcctgggggagatgactaagttggggtccaaaaccgctctgaaccgacgggatacatacagaagaagacagatgcagaggactatcacgagacaaatgtctttcgatctgaccaagctgctagttactgaagactggttcagcgatataagccctcagaccatgcggagactcctaaatatcgtgtctgtgaccggaaggctgctcagagctaaccagatcagttttaactgggaccggctggccagctggataaacctcacggagcagtggccctacaggacgtcttggttgatcctgtacttggaggagactgagggcattccagatcaaatgactctaaagacaatctacgagcgaatttctaagaatatccctaccaccaaggacgttgagcccctactcgaaatagatggcgacatacgcaattttgaagtgtttttgtccagcaggactcctgtccttgtggcacgggatgtgaaagtttttcttccctgtacagttaacttagaccctaagctccgggaaattatcgcagacgtccgagccgcaagagaacagattagtatcggcggtctggcttacccacctctgccgctccacgagggacccccaagagccccatccgggtactcgcagccgccttctgtgtgttcttctaccagcttcaatggccctttcgccggtggggtcgtatctccacagccccattcgtcatattactctggtatgaccgggcctcaacatcccttttataaccgtccgttttttgccccttacctctacacccctaggtactaccccggaggctcccaacatctgatctcgcgtccttcagtgaaaactagcctaccacgcgaccagaacaatggcctggaagtgatcaaagaggatgccgcagagggtctgtccagtcctacagatagcagccggggatccggacctgcaccagggcctgttgtcctcctgaactccttgaacgtagacgctgtgtgtgagaagttgaagcagattgaggggctggatcaaagcatgctgccgcagtactgcactacaattaagaaggctaatatcaatggccgagtcctggctcagtgcaatatagacgagctgaaaaaggaaatgaatatgaatttcggcgattggcatcttttcaggtctaccgtgttggaaatgcggaacgccgaatcccacgtcgtcccagaggaccctcggttccttagtgaaagttcctctggccctgcacctcacggagaacctgccagacgggcttcgcataatgagttgcctcacactgaactttcttctcagactccctatactctgaacttttcattcgaagagttgaataccttgggcctggatgagggcgcacctcggcacagcaatctatcgtggcagtctcaaacgcggaggactccaagcctttcatcactcaactcacaagattcgagtatcgagatttcgaaattaacggacaaggtgcaagctgaatatagagacgcttatcgggagtacatcgcacagatgtctcagcttgagggaggccctggttctacaactattagtggtagatcaagtccacacagcacttactacatggggcagagtagttccgggggatcaatccacagtaacctggagcaggagaagggtaaagactccgaacccaaacctgatgatgggagaaagagttttctgatgaaacggggagatgtgatcgactactcaagctctggagtgagcactaacgatgcgtcacctctggaccctattactgaggaagacgagaaatctgaccaaagcggatccaagctgctacctgggaaaaagtcgagtgaaagatccagtctctttcaaaccgacctcaagttgaaaggttcaggacttagataccaaaaactcccgagcgacgaggatgaatccggcacagaagagtcggataatacgccactgttgaaagatgacaaggatcgcaaagcggagggaaaggtggagagggtcccgaaaagccccgagcatagcgccgagcctatccggacgttcataaaggctaaggagtatcttagcgatgctctcctcgataagaaggattcaagtgactccggcgtccgatccagcgagagctcaccaaatcatagcctacacaatgaagtggcagacgatagccagctagaaaaagccaatctgattgaactggaggacgatagccactccggtaagcggggaataccacattcactttccggactgcaggacccaatcatagcacgcatgtcaatttgcagtgaggataaaaagtcacccagcgagtgttcgctgattgcaagcagcccagaagagaattggcctgcctgtcagaaggcatataatttgaacaggacgccttcgaccgtcacgctgaataacaattctgctcccgctaatcgcgcaaaccaaaattttgacgaaatggagggcatcagagaaacatcacaggtcatactgcgaccgtcctcgagtcctaacccgactacaattcagaacgagaatctcaagtctatgactcacaagcggtctcagaggagtagttacacccgactctcaaaagacccccctgagctccacgccgcagccagctctgagagcacagggttcggtgaagagcgagaatcaattctgtaa

SEQ ID NO: 205475 - DNA, 3096 bp, Artificial Sequence
  derived and/or modified sequence
atgagcgttcttatttctcagtctgttataaactatgtggaagaggagaatattcccgctttgaaggcactgctcgagaagtgtaaggacgttgatgagcgtaacgaatgtgggcaaacaccactgatgattgccgcagagcagggaaatttggagatcgttaaggaactgatcaaaaacggagccaactgtaacctggaggatctcgataactggaccgcactgatctcagcttctaaggagggccacgttcacatcgtagaggagctcttaaagtgtggcgtgaatctagaacatagggacatgggaggctggacggctctgatgtgggcgtgttacaaaggaaggacggacgttgtggagctgctactctctcacggggctaaccccagcgtgaccggtttgcaatattctgtgtatcctatcatctgggctgccggtagagggcatgctgacatagtgcatttattgctgcaaaacggggctaaggtaaactgcagcgataagtacgggaccacacccctcgtatgggctgcacgcaagggccatctggagtgtgtgaaacacctactggccatgggagccgatgtggatcaggagggggcaaactctatgacagcattgattgttgccgtgaaaggtggctacacccagagtgttaaggaaattcttaaacgcaatcctaacgtgaatcttactgataaagatgggaacacggctctgatgattgctagcaaagaaggacatactgagattgtccaggacttgttagatgcagggacctacgttaacatccctgaccgatctggggatactgtgcttattggagccgtacgcggaggacatgtggagattgttagagcgcttctacagaagtacgctgatattgatatcaggggacaggataacaaaaccgccctctattgggccgtggagaaggggaacgccaccatggttagagacattctccagtgtaatcccgataccgagatctgcacgaaagatggcgaaaccccccttatcaaggctaccaagatgaggaatattgaagtggtggagctactcctggacaaaggggctaaagtgtcggctgtagacaaaaagggggatacacccctccacatcgccattcgaggcaggtcaagaaagctggccgagttgctcttacgcaaccctaaggacggccgattgttatatcgacctaacaaggccggtgagactccttacaacatcgactgctcccatcagaaaagcatactaacccagatctttggagcacgacacttgtctccaacggagacagacggggacatgttgggatacgacctgtattcatcggcactggccgatattctaagcgagccaaccatgcagcccccaatttgtgtcggtttgtacgcccaatgggggtccggcaagagcttccttctgaaaaaattagaagatgagatgaaaacattcgcaggccagcagattgagccactgttccagttttcatggctgatcgtgttcctgaccctgcttctgtgcggcggactaggactgttgtttgcttttacagttcatcccaacctagggattgccgtttccctatcatttctagccctgctgtacattttctttatcgtgatttactttgggggaaggcgcgagggggagagttggaattgggcatgggttctgagcacccgacttgccagacacatcggttacttagagctgcttctgaaactcatgtttgtgaacccacccgaactgcccgagcagaccacgaaggcactgcccgtaaggttcttgttcaccgactacaaccgactgtccagtgtgggaggagaaacctcactagctgagatgattgccacactctccgacgcctgtgaaagggaattcgggtttctggccacaaggctgttccgggtgtttaagacagaagatactcagggcaaaaagaagtggaagaagacttgttgcctccccagcttcgtgatctttctgtttattataggatgcataatttcagggatcactttattagccattttcagggtggatcctaaacatttaactgtcaacgcggtgcttatcagcattgcctccgtggtcggacttgcatttgtattaaattgtcggacctggtggcaggtcctagattcactgctcaacagccagcgtaagcgcctccataacgctgcctctaaactacacaaattgaaaagcgagggatttatgaaagtcctgaaatgtgaagtcgaactgatggctcggatggctaagaccattgacagctttacccagaatcagacgcgccttgtggttatcattgacggactagatgcttgtgagcaggacaaagtactgcaaatgctcgacaccgtgagagttttgtttagcaagggtccattcatagcgatttttgcatctgatccccacatcatcattaaagcaatcaaccaaaatctaaactcagtgctcagagatagcaatatcaacggtcacgactacatgaggaatattgtgcacttacctgttttcctgaatagtcgtggcctcagcaacgcacgcaagttccttgttacttctgccactaacggagatgtgccttgttctgacaccacaggcatccaggaggacgcggatcggcgagttagccagaactctctcggcgagatgactaagctgggttctaagaccgccctgaaccgcagggacacgtataggcggaggcaaatgcagcgaaccatcacgcggcaaatgtcatttgatctgacaaagttgctggttactgaagactggttctctgatattagcccccaaaccatgcggaggctgctgaacattgtcagcgtcacaggtcggcttttgcgagctaatcaaatttccttcaactgggataggctggctagctggatcaacctcactgagcagtggccctaccgaacctcttggctcattctctacctagaagaaactgaaggtatccccgatcagatgaccctgaagaccatctatgagcggtgttgcggcgctgatagttgcgatagagatcgcatcggaatatccaaatccgtcctggtggcgatgctgatggagtcctag

SEQ ID NO: 205476 - DNA, 5018 bp, Artificial Sequence
  derived and/or modified sequence
atgatcgccgctgaacaaggtaatctggaaattgtgaaagaattgattaaaaacggggctaattgcaatctcgaggacttggacaactggaccgccctgatcagcgcctcaaaggaagggcacgtccatattgtcgaagaactgcttaagtgcggagtgaacttagagcacagggacatgggcggttggaccgcactcatgtgggcttgttacaaaggcaggaccgatgttgtcgaactcctgctgtcccacggggctaatccctcggtgaccggcctgtatagcgtttatcctatcatttgggctgccggacgtggccatgctgacattgtgcacttgctgctgcagaatggggctaaagttaactgctcagataaatatggcactacacccctcgtctgggccgctaggaagggacacctggaatgcgtgaagcatctgctggcaatgggtgctgacgtggaccaagaaggtgctaactctatgacggcactgattgtagcagtcaagggtgggtatacacaatctgttaaggagatcttgaagcgtaatcccaatgtcaacctgacagacaaagatggtaataccgccctcatgatcgcaagcaaggagggccatactgaaattgtacaagatttgctggatgcgggtacatacgtgaacatcccagaccgctcaggggatacggtactcatcggcgcagtgagaggaggacacgtggaaatagttcgcgcactgctccagaaatacgctgacatcgacatccgagggcaagacaataaaaccgcgttgtactgggcggtcgagaaggggaatgccacaatggtgcgggacatccttcagtgcaatccggacacagaaatctgcaccaaggacggtgagacaccattaattaaagccactaagatgcgtaatatcgaagtggtagaactcctgctggataaaggcgctaaagtgtcagcagtcgataagaaaggcgacacgcctctgcatatcgccataagggggcgaagcagaaagctagcagagctcctgctacggaacccgaaggatggtaggctcctgtaccggccaaataaggcaggagagaccccgtataatatcgactgtagccaccagaaaagcatactgacccagatattcggggctagacacttgagccccaccgagacagacggagatatgctcgggtatgacttgtactccagtgcactcgctgatatactgtcggagccaaccatgcaacccccaatctgtgtggggctctatgctcagtggggtagtggaaagagcttcctgctgaaaaaactggaagacgaaatgaagacctttgccggacaacagatcgagcctctctttcagttttcttggcttatcgttttcctcacattgctgctgtgcggagggctcgggttgctgtttgcctttaccgtgcatcccaatctcggaattgccgtgtcactctctttcctggccctgctctacattttctttattgtcatttatttcggcggacgccgtgaaggcgagtcatggaactgggcctgggtcctctcaacccggctcgctagacacattggatatctggaattactgctgaagttgatgtttgtgaacccaccagaacttcccgagcaaacaaccaaggctctgcccgtccgtttcctgtttactgattataaccggctctcgtcagttggcggtgagacctcgctggccgaaatgatcgccacactttccgacgcgtgcgaaagggaatttggctttctggccacacggttgtttcgggtctttaagaccgaggatacccagggcaagaagaaatggaaaaaaacttgctgcttgccttcatttgtgatattcctattcataatcggctgcatcattagtggaataactctcctggccatcttccgcgtcgatcctaagcacttgacagtgaatgcagtgcttataagcatagcatccgtggttggtctggccttcgtgctgaactgtcggacctggtggcaggtcttggattctctgctgaattcacagcggaagcgtctgcacaacgccgcttccaagctgcacaaactgaaatctgaaggcttcatgaaggtcctgaagtgtgaagttgaattaatggccagaatggcaaaaactattgactcatttactcaaaaccagactaggctcgtggtcatcattgacgggttggatgcctgtgaacaagacaaggtcctccagatgctggatacagtccgcgttttattttcaaagggacctttcatcgcaattttcgctagcgatccacacattataatcaaggccatcaatcagaatctaaattccgtgttacgcgactctaacattaatggacacgactacatgagaaatatagtccatcttcccgtcttcctaaattcccgaggcctctcaaatgccaggaagttcctggtgaccagtgctaccaatggggatgttccttgctccgatacgactggcatacaagaggacgccgatcgcagggtatcccagaatagcctcggagagatgaccaagctaggatctaaaactgccctcaatcggcgagatacttatcggagacgccagatgcagcgaaccatcaccagacaaatgtcctttgacctcacaaaactgcttgtcaccgaagattggttttccgatatttccccccagacaatgaggagactgctgaacattgtgagcgtgacaggtcgcttacttagggctaaccaaataagcttcaactgggaccgactggccagctggattaacctgactgagcagtggccataccggacctcatggttgatcctgtaccttgaggagactgagggcattcctgaccagatgactctgaagacaatctacgaaagaatctcgaagaatatccccactactaaggacgtcgaacctctgcttgaaatcgacggggatatccgcaacttcgaagtcttcctctcttctaggacacccgttttggtggccagggacgtgaaagttttcctcccatgtactgtaaacctggatccaaagctacgcgaaatcattgcggatgtgcgagccgcaagggaacagatttctattggaggtcttgcatatcccccattgccactccacgaaggaccaccacgtgctccgagcgggtacagtcagccaccctccgtgtgtagcagcacctcattcaacgggccattcgccggaggtgtggtatctccacagccccacagtagttactactccggcatgactggaccacagcacccattttacaatagaggcagtggacccgctcctggtcccgtcgtgctcctgaattccctgaatgtagatgctgtgtgtgaaaagttgaaacagattgaaggactggaccagagcatgctaccccagtactgcactactatcaagaaagcgaacatcaatggtagagtcttagcccagtgcaatatcgacgagctcaagaaagagatgaatatgaactttggtgactggcatctgttcagatccaccgtgttagagatgagaaacgccgagtcacatgttgtaccagaggatccacgctttctttccgaatccagctctgggccagccccacacggagagcccgctcgcagagcatctcacaacgagctcccacacaccgagctgtcctctcagacaccatatacgctgaatttcagctttgaagaactgaatacattgggcctcgatgagggagcaccacggcactctaacttgtcctggcagtctcagacaagaagaacgccctcgcttagttctcttaacagtcaggatagcagcatagaaatcagtaagctcaccgacaaggtgcaggcagaataccgcgacgcttatcgggaatatatagctcaaatgagccagctggaagggggtcctggatccacgactatctccggaagatcatcacctcacagtacgtactacatgggacagagttcatcgggtggcagtatccactcaaacctcgaacaggagaagggcaaggacagcgaacccaagccggatgatggtcgtaaatcctttctaatgaaaagaggagacgtgatcgactattccagctccggtgtgagtaccaacgatgcttcccccctggaccctatcaccgaggaggacgaaaagtctgatcagagcggcagcaaactgctgcctggtaagaaatcctcagagaggtctagcctctttcagaccgatctcaaactgaagggttcaggtctgcggtatcagaagttgccgagcgacgaggacgagtccgggaccgaggagtcagataataccccactcctgaaagacgacaaggaccgtaaggcagaaggcaaagtggagagggtgcctaagtctcccgagcacagtgccgagccaatacgcacgttcataaaggctaaggagtacctgtccgatgccctgctggacaagaaagattcctcagactccggcgtccgcagcagcgaaagctcacccaatcatagcctacataacgaagtggctgatgattcccagctggagaaagccaatctcattgagctcgaggacgacagtcacagcggtaaacgaggcatccctcatagtctgtcaggactgcaagaccccattatagctcgaatgagcatttgctcggaggataaaaaatctccctctgagtgctctctcattgcatcctcgcccgaggagaactggcctgcctgtcagaaggcctataacttgaataggactcccagcaccgttacgctcaataataactcagccccagctaacagggccaaccagaactttgacgagatggaaggcatcagagagacatctcaggtgatcctgagaccatcatcttctccaaatcccaccaccatccagaacgagaacctcaagtcgatgacccataagaggagccagcggagtagctatacgaggctgtccaaagacccgcctgagttacatgctgccgcatccagcgagagtaccggattcggagaagaaagggagagtatattgta

SEQ ID NO: 205477 - DNA, 5258 bp, Artificial Sequence
  derived and/or modified sequence
atgagcgtgttaatctcgcaaagtgtcattaattacgtcgaggaggaaaacatacccgcactgaaagcgctactggagaagtgtaaggatgtggacgagagaaatgagtgcggtcaaaccccactgatgattgccgcagagcaaggcaacctcgaaattgtgaaggagttaataaaaaacggagcaaactgcaacctagaggatttggataattggactgcgctcatcagcgctagcaaggaaggccatgtgcacatcgtggaggagctgctcaagtgtggggttaatctagagcaccgagatatgggtgggtggaccgccttgatgtgggcgtgctataagggaagaacagatgtggtcgagctcttactctcacatggcgcaaacccttccgtcacgggattgtattctgtataccctataatctgggctgccggacggggacacgcagacatcgtgcatctcctgctacaaaacggagccaaagtcaattgttcagacaaatatggaaccaccccacttgtatgggccgctaggaagggtcatcttgaatgtgtgaaacacctcctagctatgggtgccgacgtggaccaggaaggcgctaactccatgaccgctctgatagtggcagtcaaaggagggtacacacagagcgtcaaggagatcctgaagcgaaaccccaatgtgaatttgaccgataaagatggaaatactgccttgatgatagcatccaaggagggccacaccgagatagtacaggacctgctcgacgccggaacctatgtgaacattccagataggtccggcgatacagtcctcattggcgcagtgaggggtgggcatgttgagattgtcagggccttgctgcagaagtatgctgacattgatattaggggccaggacaataaaacagccctctattgggccgtggaaaagggaaacgccactatggtacgagatattctccaatgtaaccccgacaccgaaatctgcaccaaggacggggaaacccctctgatcaaagctactaagatgagaaacatcgaggtggtggagttgctgttagacaaaggggcaaaggttagcgccgtggataagaagggtgatacgccgcttcacatcgctatcagaggccgatcccgtaagctggcggaacttctgttacgcaatccaaaggatggtagactgctgtatcggcctaataaagccggtgagacaccttacaacatcgactgctctcatcagaagagcatcctcactcagatctttggtgccagacacctctcccccactgaaacagacggtgatatgctgggatacgacttgtattcctccgcccttgcagacattctcagcgaacctaccatgcaacctcctatctgcgtcggactatatgcccagtgggggtcaggtaagtcgtttcttctcaagaaactcgaggacgagatgaagactttcgctggccagcagatcgagcccctgtttcaattttcctggctgatagtattcctgactctcttgttgtgcggcggactcggcctgcttttcgcctttacagtacacccaaacttaggcatcgctgtgtccctgagctttctcgcgttactgtacatcttcttcatcgtcatatatttcgggggtagacgagagggcgagtcctggaattgggcctgggtactaagcacacgcttggccaggcatatcggctacctcgagttgttgttaaaactgatgtttgtgaatcctcctgaacttcctgaacagaccacaaaggcgctgcccgtgagattcctgttcacagactataatcgtctgagttccgtgggtggggagacatcccttgctgaaatgattgcgaccctgtcagacgcctgcgagagggaatttggctttctggctacaagactgttccgtgtgtttaaaacagaagatacacagggcaaaaaaaagtggaagaagacctgctgcttaccgtcttttgtgatcttcctttttattattggctgtatcataagcggcatcaccctgttagcaatattcagagtagatccaaagcatctgaccgtgaacgcggtcttaatctctatcgcttccgtggtgggcctggcattcgtgctgaactgtagaacctggtggcaagtgttagactccctgttaaactctcaacggaaacgcctgcacaacgctgcatccaagctgcataaactgaagtctgaaggttttatgaaagtgttgaaatgcgaagtcgagttaatggctcggatggccaagaccattgattcatttactcagaaccagaccagactggtggtcataattgatggtctggacgcctgcgagcaggacaaagtgctacagatgttggatactgtgagagtactgtttagcaagggtccattcatcgccattttcgcttctgaccctcacatcataatcaaagctattaatcagaatttgaatagtgttctgcgagattcaaacatcaatggtcacgactacatgcgtaacatcgtgcaccttcctgtgtttctcaatagccgtggattaagtaatgctcgaaaattcctggtgacatccgcaaccaatggcgatgtgccttgctcagacactacaggtatccaggaagacgcagaccggagagtaagccaaaactccttaggcgagatgaccaagctgggctcgaagactgccctcaatcgacgagatacctaccgcagaagacagatgcagcggactatcactcggcagatgtcctttgacttaaccaaactactcgttacagaggactggtttagtgatattagcccccagacaatgcgcaggctcctgaacattgtgtctgtaacgggtcgacttctgcgggctaaccagatctcatttaattgggatcgcctcgcttcgtggataaatttgaccgagcagtggccttaccgaaccagttggctgattctgtatctggaagagacagaaggtataccagatcagatgactctgaaaacgatttatgagcggatctctaagaatatccctacaactaaggatgttgagcccctattggagattgatggcgatattcggaatttcgaggtgtttctttcctccagaacaccggttctagtggctagggacgtgaaggtgttcttgccctgcacagtgaatctggatcctaagctgcgggagattattgctgacgttcgggctgctagggagcaaatttccattggcggactggcctaccccccattacctctgcacgaggggccacctcgggcaccctccggttactcccagcccccatccgtgtgcagcagtaccagctttaacggccctttcgcaggcggagtagtgagtcctcagccccactcatcctattactcgggaatgactggtcctcagcatcctttctataacagaccatttttcgcaccctatttgtatactcccaggtactacccagggggtagccaacacctgatcagccgaccaagcgtcaaaacaagtcttcctagggaccaaaataatggattggggagtgggcctgctcccggtcccgtggttctgctcaacagcctcaatgtcgatgcagtttgtgagaagcttaagcagatcgagggattagaccaatctatgctgccccaatactgcaccaccattaaaaaagccaacataaacggtcgcgtcttggcccaatgcaacattgatgagctaaaaaaggaaatgaatatgaacttcggcgactggcatctgttcagatccaccgtgctggagatgcgcaacgcggagtcccatgttgtccctgaggacccccgattcttaagtgaatcatccagtggccctgcaccccacggagagcccgctagacgcgcatctcacaatgaactaccacacaccgagttgagctctcagaccccatacactctgaatttttcctttgaagagctcaacactctcggacttgatgaaggtgcacctagacatagtaatctgtcatggcagtcccagacccgacgcactccaagtctgtcaagcttaaacagtcaagacagtagtatagagattagtaagctcacggataaggtccaggccgagtatagagacgcttaccgcgagtacattgcccagatgtcacagctggaaggcggacctggtagcaccaccatctcggggaggtcatcacctcatagtacatattatatggggcagtcatcaagtgggggaagcatccactctaacctcgaacaggaaaagggtaaagattctgagcctaaacctgatgatggcagaaagagcttcctgatgaagaggggcgacgtgatagactattcctcctcgggcgtcagcactaatgacgcgtctcctctggaccctatcacggaagaggatgaaaaatcagatcaatctggcagcaaactgctgccaggcaaaaagtcctcagagaggagttctttgttccagaccgacctcaaactgaagggcagtggattgaggtatcagaagcttcccagtgacgaggacgagtcaggtacagaagaatcagacaacactcccttgcttaaagatgacaaggatagaaaagcagaggggaaagtcgagcgagttcccaagtccccggagcattccgccgaacctattagaacatttataaaagcaaaagagtatctaagtgatgcactcctcgacaagaaggattcctctgacagcggagtccgcagctctgagagtagtccgaaccacagtctccataacgaggttgccgacgattcccagttggaaaaagcgaatctgatcgagttagaggatgactcacattccgggaaaagggggattccccattccctatctgggttgcaggaccccattatcgctaggatgagcatttgtagtgaagacaaaaaatcacctagcgaatgttcactgatcgcctcctcaccagaagagaattggcctgcttgtcaaaaggcctataacctgaaccgcacacctagcaccgtgaccctcaacaataacagtgcaccagccaacagggccaaccagaacttcgatgaaatggaggggatcagagaaacttcacaggtaattctccgaccatcctcatcccccaaccccaccactattcagaacgaaaatttgaagtctatgactcacaagaggtcccaaaggagtagttacactaggctctcaaaggatccccctgaactgcatgccgcagcctcctcggaatccactggctttggcgaagagcgagaatctatcttata

SEQ ID NO: 205478 - DNA, 5258 bp, Artificial Sequence
  derived and/or modified sequence
atgtctgtcttaattagtcagagtgtgatcaactacgtggaagaagagaacatcccagctcttaaggctttgctggagaaatgcaaggatgtcgatgagcgcaacgagtgtggccaaacacccctgatgattgcagctgagcagggaaatctggaaattgttaaggaactcattaagaatggtgcaaactgcaatctggaggatctggataactggaccgcccttataagcgccagcaaggaggggcacgtacacatcgttgaagagcttctcaaatgtggcgtgaatttggaacaccgcgacatgggtggttggacagcactgatgtgggcatgttacaaaggtaggacagatgtggtcgagctcctgctctcccacggggcaaacccaagtgtaacggggttgtactctgtgtaccccataatctgggctgctggaaggggccatgccgacatagtacatctgctgcttcagaacggggctaaagttaactgtagcgataagtatggaaccacccccctcgtgtgggccgctcgtaagggtcacctggagtgcgtgaaacatctgctggcgatgggggcagatgtggaccaggaaggggcaaatagtatgaccgctctgatagtcgcggtgaaaggtggatacactcagagcgtcaaggaaatcctgaagcgcaacccgaacgtcaacctgactgacaaagacggaaataccgctcttatgattgcctctaaagagggacataccgagatagttcaagatttgcttgacgccggaacctacgttaacatccctgatcgaagcggggataccgtgctgatcggcgctgtgcgtggcggacatgtggagatcgtccgcgctctgctgcagaagtatgcagatattgatatccggggacaagacaacaaaaccgctctctactgggccgtagaaaagggtaatgccaccatggtgagggacattcttcagtgtaaccccgatactgagatctgcacaaaggacggagagacaccattgattaaggcgactaaaatgaggaacattgaagtcgtcgagctgctactggataaaggggcaaaagtaagtgctgtagacaagaagggtgataccccgctgcatattgccatacggggacgttcgaggaagctggccgaattgttgctgcggaaccctaaggacggcaggcttctttatcgccctaacaaagcaggggagaccccgtataacattgactgttctcatcagaagagtatcctcactcaaattttcggggctcggcacctgtctccaaccgagacagatggtgacatgctggggtatgacttgtacagctcggccctcgctgacatcctgtcagaacccactatgcagcccccaatctgcgtggggctgtatgcccaatggggtagtggaaagtcatttttgctaaaaaaactcgaagatgaaatgaaaacttttgcaggacagcagatcgaacctctattccagttctcttggctgattgtgttcctcactcttcttttatgcggcggtcttggactgctttttgcttttactgtccaccccaacctggggattgctgtgtctctgtcctttttggcgctgttatatatcttcttcatcgtcatctacttcggcggacgcagagagggagagtcatggaactgggcttgggtgctctcgacgcgcctcgctcgtcacattggctacctcgaacttttactaaaactgatgtttgtgaacccacctgaactaccagagcagaccaccaaggccctgcctgttagattcttgttcaccgattacaacagactttcaagtgtcggcggtgagacttcgctggcggagatgatcgctacactgtctgatgcatgcgagagagagtttggcttcttggctacaagattatttcgggtgtttaaaacagaggacactcaaggaaagaagaagtggaaaaagacttgttgccttccttcatttgtgatttttttgtttataattgggtgcatcattagcgggataactctgctagctatattcagggttgatcccaaacacctcacagttaatgctgtgttgatctctattgctagcgtggttggcctcgcatttgtgctgaactgcagaacctggtggcaggttttagactctctgcttaacagccagcgaaagcgactccataatgcagcctccaagcttcacaagctcaagtcggaaggcttcatgaaagtcttaaaatgtgaggtagagcttatggctagaatggccaagacgattgactctttcactcagaatcagacaaggcttgttgttatcattgatggcctcgacgcttgtgagcaagataaagtcctccagatgctagatacggtgagagtgctgttttcaaaaggtccattcattgccatttttgccagtgatcctcatatcattattaaggctattaatcagaatctgaacagcgtgctgcgcgatagtaacatcaacggacacgattatatgcgcaatattgtccatctgccagtctttcttaatagccgagggttgtccaacgccaggaagtttcttgttacatccgccacgaacggggacgtcccctgctcagatacaaccggaattcaggaggatgccgataggagagtgtctcaaaacagtctaggggagatgacaaagctaggctccaaaacagcccttaatcgacgcgacacttatcgaagaagacagatgcagcggactataacacggcagatgtctttcgacctgaccaagctgctcgtgaccgaagactggttctctgacattagtccgcagacaatgcggcgactgctgaacattgtttctgtgacagggaggcttctaagagctaatcagatctccttcaactgggatcgcttggcctcgtggattaaccttacagagcaatggccttacaggacaagctggttaatcttgtatctggaggaaacagaggggatccctgaccaaatgaccctaaaaactatttatgagcggataagcaaaaatattcctactacaaaagatgttgagcctttgctggagattgatggagacattaggaactttgaagtgtttctaagcagccgcaccccagtgctggtggccagggacgtcaaagtgtttctaccctgtaccgtgaatctcgaccctaaactgagggaaatcatcgctgacgtgcgtgcagcacgggagcagatttcgattggtggcttagcttatccgcctctcccactgcacgaaggcccacctcgggcaccttctggatattcccaacccccttccgtctgtagctcaaccagtttcaatggaccatttgctggcggagtggtgtccccacagccccattcgagctattattccggtatgacgggaccacagcaccctttttacaatagaccctttttcgctccttacctgtatacccctcgctattacccagggggatcgcaacacctgatcagccgcccaagcgtgaaaacctcactccctcgggaccagaacaacggcctgggttccggcccagccccaggtcccgtggttctcctgaactcactgaatgtggacgctgtgtgcgagaaactcaaacagattgagggtcttgatcagtcaatgttgccccagtactgtactaccatcaagaaggctaatataaacggtagggtcctcgcccaatgtaatatagatgagttgaagaaagagatgaacatgaacttcggcgactggcacttgtttcggtctaccgtgcttgagatgcgaaacgctgagtctcacgtggtgcccgaggatcctaggttcctcagtgagagctcttccggcccagcccctcacggggaaccagccagacgagcaagccataatgagctgccccacaccgagctcagttcacagacgccatacactttgaacttttcttttgaggaacttaataccctgggcctcgatgaaggagccccaagacatagcaacctcagttggcagagccagactcgtcgcacaccatctctttcttccctaaactctcaggactcatccatagaaatatccaagctgaccgacaaggtacaggcagagtatcgcgacgcttacagggagtatattgcccagatgtcccaactagagggaggaccagggtcgactactatcagtggtaggtcttcacctcatagcacttactacatgggacagtcctcatcaggcggttctattcactccaacctggagcaagagaaggggaaggactccgaacctaaacccgatgatggacgcaagtcgttcctgatgaaaagaggagacgtgattgattatagcagttctggggtgagcacaaatgacgcttcccctctggaccccatcaccgaggaggatgagaagagcgatcaaagcggctcaaagcttcttccgggaaaaaaaagcagcgagcgctccagcctgtttcagactgacctgaaactgaaagggtcaggcctccgatatcagaagctgccgtctgatgaggatgagtcaggaaccgaagaaagcgacaatacgcccctacttaaggacgataaagatcgtaaagctgagggcaaggtcgagcgtgtccccaagtccccagaacactccgcagaacccatcaggacgttcataaaagccaaggaatatctttcagacgccctgttagacaagaaagacagcagcgacagcggcgtgcgtagctctgagagttccccaaaccacagtctgcataatgaggtcgcagatgacagtcagttggaaaaagccaacctcattgaactggaggacgactcgcattctggtaagaggggtattccacattcattgtccgggctgcaggaccccattatcgcaagaatgtctatctgcagtgaggataagaagtccccttccgagtgctcactgatcgcatctagccctgaagagaactggcctgcctgccagaaagcctacaatctgaatcggacccctagtacagtgaccttaaacaacaactctgcccctgctaaccgcgctaaccagaatttcgacgaaatggaagggattagagagacgtcccaggtgatactgcggccttccagttctcccaacccaacaaccattcagaatgagaacctgaaatctatgacccacaaaagaagccagcgttcttcatacacccgcctatcgaaagatccccctgaactgcatgccgctgcttcttcagagagtactgggttcggggaggaaagagagtcaattctgta

SEQ ID NO: 205479 - DNA, 2985 bp, Artificial Sequence
  derived and/or modified sequence
atggtgcgtgacatcctgcaatgtaatcccgacaccgagatatgtactaaggacggagaaacgccccttatcaaagctacaaagatgcgtaatatagaggtggtggagctgctcctggacaagggagccaaagtgagtgccgttgacaagaaaggcgacacgcccctccatattgctatacgtggtagatctcgaaagctggccgagctgttactgcggaatcctaaggacggcagactactttaccggcctaacaaggccggtgaaacgccatacaatattgattgcagtcaccagaaaagcatccttacgcagatcttcggggctagacatctctctccaactgaaacagacggcgacatgctgggttacgacttgtattccagcgctctcgctgacatcttatccgagccaactatgcagccaccaatctgcgtcgggctttacgctcagtggggcagcggaaaaagtttcctgctgaagaaacttgaagatgaaatgaaaacatttgctggccaacagattgaacctttgttccagtttagctggcttattgttttccttacgctcctgctgtgtggcggtctgggcctgctgttcgccttcacagtgcaccccaatctcgggattgccgtttccttgtctttcctcgccctcctgtacatattctttatcgtgatctactttggaggacgcagagaaggcgaatcctggaactgggcttgggttctgtccacccggctggctcgccacataggttacctcgagctcttactcaagttgatgttcgtgaatcccccagaactccccgaacaaaccacaaaggcgttgcctgtgaggttcctgttcacagactacaatcgcctgtcttcagttggcggtgaaacaagcctcgccgagatgattgcgacactgtctgatgcctgtgagcgtgagttcgggtttctggcaacacgccttttcagggtgtttaaaacggaagacacgcagggcaaaaaaaaatggaaaaagacttgctgcctaccttctttcgtgatattcttattcattatcggttgcattatctccggtatcacactactggcaatttttagagttgacccaaaacacctgacagtcaacgccgttttaattagcattgcttccgtggtgggcttggctttcgtgttgaactgcaggacttggtggcaggtcctcgactcactcttgaactcccagcgaaaacggctccacaacgcggcatccaagctacataaattgaaatccgaagggtttatgaaggtcctcaagtgcgaagtggaattgatggccaggatggctaaaaccatcgacagtttcacacagaatcagacgaggctggtagtcattatcgacgggctggacgcttgtgaacaggacaaagtcttgcagatgctggataccgtccgggtcctattcagcaaagggccattcatagctatcttcgccagcgatcctcacattatcataaaggccatcaatcaaaacctgaatagtgtgctgagagattcaaacatcaatggacatgattacatgaggaacatcgtgcacctacccgtgtttctaaacagcagggggctctccaacgccaggaagttcctcgtgacatccgccaccaatggcgatgttccatgctctgataccacgggaatccaagaagacgctgatcggagagtcagtcagaactcattaggcgagatgaccaaactggggtcaaaaaccgctctaaaccgtcgggacacctatagaaggagacagatgcagcgaaccatcacgcggcagatgtccttcgacctgactaagttgctcgtgacagaggactggttctcagacatcagtccccagacaatgcggcgactcctcaatattgtgtcagtaacaggccgtctcctgagggctaaccagatctctttcaactgggatcggctggcaagctggatcaatctgactgaacagtggccctaccggacctcatggctcatcctatacttagaagagactgagggcattccagatcagatgaccctgaagacaatctacgagagaataagcaagaatataccgaccacaaaagacgtggaaccgctactggagatcgacggagacattcgtaatttcgaggtgtttctaagctcacgcacccccgtcctggttgcacgcgacgtgaaagtgttcttgccctgcacagtgaatcttgatccgaagcttcgcgagataatcgcagatgtgcgcgcagctcgcgaacagatttccattgggggtctggcctatcctccactgcccttgcacgaagggccacccagggcacccagtggatattctcaaccaccctccgtgtgctcctcaaccagttttaatggcccatttgcaggcggtgtggtgagcccacagcctcactctagttattactcagggatgactggccctcaacatccgttctacaatcgaggctccggaccagcgcctggcccagtggtgctgcttaattccctcaacgtggacgccgtctgtgaaaagctcaagcaaatcgaaggtctggaccaaagtatgctcccacagtactgtaccacgattaaaaaggctaacatcaatggacgcgtgcttgcgcagtgcaacatcgatgagctaaaaaaagagatgaatatgaattttggcgactggcatctgttccgcagcacagtgctagagatgagaaacgcggagtctcatgtggtaccagaggaccctcgctttttatctgaaagctcctcagggccagcccctcacggagaacctgccagaagagccagccataacgagctaccacacaccgagttaagcagccagacaccttatacgttgaacttcagctttgaagagctcaatactctcggattggatgaaggcgctcccagacactctaatctctcatggcaggaagaaaatgcaggtttggagatagactcaagcagcgaggaccccgattag

SEQ ID NO: 205480 - protein, 515 aa, Artificial Sequence
  derived and/or modified sequence
MAANMYRVGDYVYFENSSSNPYLIRRIEELNKTASGNVEAKVVCFYRRRDISNTLIMLADKHAKEIEEESETTVEADLTDKQKHQLKHRELFLSRQYESLPATHIRGKCSVALLNETESVLSYLDKEDTFFYSLVYDPSLKTLLADKGEIRVGPRYQADIPEMLLEGESDEREQSKLEVKVWDPNSPLTDRQIDQFLVVARAVGTFARALDCSSSVRQPSLHMSAAAASRDITLFHAMDTLYRHSYDLSSAISVLVPLGGPVLCRDEMEEWSASEASLFEEALEKYGKDFNDIRQDFLPWKSLTSIIEYYYMWKTTDRYVQQKRLKAAEAESKLKQVYIPTYSKPNPNQISTSNGKPGAVNGAVGTTFQPQNPLLGRACESCYATQSHQWYSWGPPNMQCRLCAICWLYWKKYGGLKMPTQSEEEKLSPSPTTEDPRVRSHVSRQAMQGMPVRNTGSPKSAVKTRQAFFLHTTYFTKFARQVCKNTLRLRQAARRPFVAINYAAIRAECKMLLNS

SEQ ID NO: 205481 - DNA, 1548 bp, Artificial Sequence
  derived and/or modified sequence
atggccgccaacatgtaccgggtaggcgattacgtgtactttgaaaatagcagtagtaatccttaccttattagacggatcgaagaactgaataaaaccgccagtggcaatgttgaggctaaggtggtgtgcttctaccgccgccgggatatttccaataccctcattatgctggccgacaagcacgcaaaagagattgaggaggagagcgagactactgttgaagccgaccttaccgataagcaaaaacaccagctcaaacacagagaactgtttttgtcgagacaatatgagagtctgccagcaacccatatccgaggtaagtgctctgtggccctcctgaacgagaccgagtctgtgctctcatatctggataaggaagacactttcttctactcactggtctacgatccatccttaaaaaccctcctggccgataagggagagattagggtggggcccagataccaggccgacatcccagaaatgctacttgagggggaatctgacgaacgcgaacagagcaagctggaggtgaaggtgtgggacccgaattctcccttaacagaccgacagatagatcaatttctcgtggtggcccgggctgtcggtacattcgctcgggcactggactgttcatcaagcgtgcgccaaccgtccctccacatgtcagcagccgcagcaagtcgggacattaccctgtttcatgctatggatacactctatcgccattcctacgatttgagcagcgccatcagtgtcctggtgccccttggcggaccagtcctctgccgcgacgagatggaggaatggtctgcaagcgaagctagcctgttcgaggaggctttggagaagtacggcaaagacttcaatgacatacggcaggattttctcccttggaagtctttgacctcgatcatcgaatattattacatgtggaagacaacggacaggtatgttcagcagaagcgactgaaggctgctgaggctgaatctaagctaaagcaggtatacatccctacatattcaaagccaaaccccaatcagatttccacctcaaacgggaagccaggcgcggtcaatggtgccgtggggacgaccttccaaccgcagaatccattactgggacgggcctgcgagagttgttacgctactcagtctcaccagtggtattcttggggccctccaaacatgcagtgcagactgtgtgcaatctgctggctctactggaaaaaatatggcggtctgaaaatgcccacgcaatctgaggaagagaaactttcgcctagtcctacaaccgaggaccctcgcgtgcgcagccacgtgagccgacaagctatgcaaggcatgcccgtgaggaacaccggcagcccaaaaagtgccgttaagaccaggcaggccttttttctgcacactacatacttcacaaaattcgcaagacaagtctgcaagaacactcttcgccttaggcaagccgcccgcaggccattcgtcgccattaattacgctgcaatcagggcggagtgtaagatgctgctgaattcatag

SEQ ID NO: 205482 - DNA, 2202 bp, Artificial Sequence
  derived and/or modified sequence
cccactcggccttgctagcctggcgctgggggcgggcaccagcccccacccctcggcgtaccatcccctttacttcccccaccccctgtcccctcccttccctcccttcccccccgtggcgaggcagcagcgacggcggcggcggcagcggcggtcgcggctgaggctgaggaggaggcggcggcggcgggcggggctcggctcgggctccgcgggcgggcgggcggacatggcggccaacatgtaccgggtcggagattatgtctactttgagaattcctccagcaacccatacctaataagaaggatagaagaactcaacaagactgcaagtggcaacgtggaagcaaaagtagtatgcttttatagacgacgtgatatttccaacacacttataatgctcgcagataagcatgctaaagaaattgaggaagaatctgaaacaacagttgaggctgacttgaccgataagcagaaacatcagttgaaacatagggaactctttttgtcacgccagtatgaatctctgcccgcaacacatatcaggggaaagtgcagtgttgcccttctgaatgagacagaatcagtattgtcatatcttgataaggaggataccttcttctactcattggtctatgacccctcattgaaaacactattagctgacaaaggtgaaatcagagtgggacctagatatcaagcagacattccagaaatgctgttagaaggagaatcagatgagagggaacaatcaaaattggaagttaaagtttgggatccaaatagcccacttacggatcgacagattgaccagtttttagttgtagcacgtgctgttgggacattcgccagagccctggattgcagcagttctgtgaggcagcctagtttgcatatgagtgctgctgcagcttcccgagacatcaccttgtttcacgctatggatacattgtatagacacagctatgatttgagcagtgccattagtgtcttagtaccactcggaggacctgttttatgcagagatgaaatggaggaatggtcagcctctgaagctagcttatttgaagaggcactggaaaaatatggcaaagacttcaatgacatacggcaagattttcttccttggaaatcattgactagcatcattgaatattattacatgtggaaaactactgacagatatgtgcaacagaaacgtctaaaagcagcagaagctgagagtaaactgaaacaagtatatatcccaacctacagcaaaccaaatcccaaccaaatatccactagtaatgggaagcctggtgctgtgaatggagctgtggggaccacgttccagcctcagaatcctctcttagggagagcctgtgagagctgctatgctacacagtctcaccagtggtattcttggggcccacctaatatgcagtgtagattatgtgcaatttgttggctttattggaaaaaatatggaggcttgaaaatgcccacccagtcagaagaagagaagttatctcctagcccaactacagaggaccctcgtgttagaagtcacgtgtcccgccaggccatgcagggaatgccagtccgaaacactgggagtccaaagtctgcagtgaagacccgccaagctttcttccttcatactacatatttcacaaaatttgctcgtcaggtctgcaaaaataccctccggctgcggcaggcagcaagacggccgtttgttgctattaattatgctgccattagggcagaatgtaagatgcttttaaattcttaaccttatatgttgtgcttctgaccattttctcttttcctctctttccttttttttttgtttgtttgtttgcaataaacataagttcttgtgtacagccttttatttggtttattttttaacattgtttttgtgtgctgccatttgtatcatgccaacctggaaaaaaaaaatcaaaacattgaaacttctgtactctttaccagagagtagtgcttagcaaaagattggtgggaggtgatcctattccatggggttttgtgatggaattgcctgcagagcccttattgaagcacttttaccttttaggtagtgccacaatgtaacccctaaggatgctgttataatgagactccataatcgagacagtacagtccagtcttacatggattcattaggtttaaataaaatttgccaatttacactaa

SEQ ID NO: 205483 - DNA, 1548 bp, Artificial Sequence
  derived and/or modified sequence
atggccgccaacatgtacagagtgggggactatgtgtactttgagaacagcagcagcaacccctacctgatcagaagaattgaggagctgaacaagacagccagcggaaatgtggaggccaaggtggtgtgcttctacagaagaagagacatcagcaacaccctcatcatgctggccgacaagcacgccaaggagattgaggaggagagcgagaccaccgtggaggccgacctgacagacaagcagaagcaccagctgaagcaccgggagctgttcctgagccggcagtatgagagcctgcctgccacccacatccggggcaagtgcagcgtggccctgctgaatgaaacagaatctgtgctgagctacctggacaaggaggacaccttcttctacagcctggtgtatgaccccagcctgaagaccctgctggccgacaagggggagatccgggtgggcccccgctaccaggccgacatccctgagatgctgctggagggggagagtgatgagcgggagcagagcaagctggaggtgaaggtgtgggaccccaacagccccctgacagaccggcagattgaccagttcctggtggtggcccgggctgtgggcacctttgcccgggccctggactgcagcagctctgtgcggcagcccagcctgcacatgtctgctgctgctgccagccgggacatcaccctcttccacgccatggacaccctgtaccgccacagctatgacctgagcagcgccatctctgtgctggtgcccctgggcggccctgtgctgtgcagagatgagatggaggagtggagcgccagcgaggccagcctgtttgaggaggccctggagaagtatggcaaggacttcaatgacatccggcaggacttcctgccctggaagagcctgaccagcatcatcgagtactactacatgtggaagaccacagacagatatgtgcagcagaagaggctgaaggctgctgaggccgagagcaagctgaagcaggtgtacatccccacctacagcaagcccaaccccaaccagatcagcaccagcaatggcaagccaggagctgtgaatggagctgtgggcaccaccttccagccccagaaccccctgctgggccgggcctgtgagagctgctacgccacccagagccaccagtggtacagctggggcccccccaacatgcagtgccgcctgtgtgccatctgctggctgtactggaagaagtatggaggcctgaagatgcccacccagagcgaggaggagaagctgagccccagccccaccacagaggacccccgggtgcgcagccacgtgtcccggcaggccatgcagggcatgcctgtgaggaacacaggcagccccaagtctgctgtgaagacccggcaggccttcttcctgcacaccacctacttcaccaagtttgcccggcaggtgtgcaagaacaccctgcggctgcggcaggccgcccggcggccctttgtggccatcaactatgctgccatccgggcagagtgcaagatgctgctgaacagctag

SEQ ID NO: 205484 - DNA, 1548 bp, Artificial Sequence
  derived and/or modified sequence
atggccgccaacatgtaccgggtgggcgactacgtgtacttcgagaactctagtagcaacccctacctgatccggcggatcgaggaactgaacaagactgcttcaggaaacgtggaagccaaggttgtgtgtttttacaggcgccgggacatttcaaataccctcatcatgctggccgataaacacgccaaagagattgaggaggaatcagagaccacagtggaagccgacctgactgacaaacagaagcatcagcttaagcacagagaactgttcctcagcaggcagtatgagtctttgcctgccacgcacattagggggaagtgctccgtagcactgctgaatgagacagaaagcgtgctgtcttacctggataaagaggataccttcttctactccctcgtctacgacccttctctgaagacattgctcgccgacaagggcgagatccgcgtgggtccacgataccaggcggacattccagagatgctgcttgaaggggaatccgacgaacgcgagcagtcaaagcttgaagttaaggtttgggatcccaactcacctttgacagaccgccagattgatcagttcttggtggtggcaagagccgtgggaacgttcgccagggcactggactgtagtagctctgtgagacaaccatccctccacatgagcgccgcagcggcctcacgcgatataaccctctttcacgcgatggacaccttgtatcgccattcttatgatctgtcgagcgccatctctgttcttgtgcccctaggcggacccgtactttgtagagacgagatggaagaatggagtgcctctgaagcatctctgtttgaggaggctctggaaaaatatggaaaggactttaatgatataagacaggatttcttgccctggaaaagtttgacctctatcatcgagtactactacatgtggaaaactactgacaggtacgtgcagcagaagcggttaaaggccgctgaggcagagagtaaactcaagcaagtgtacatacctacatactccaaaccgaaccctaaccagatctctactagtaatggaaagccgggggccgtgaacggcgcagttgggaccacatttcagcctcagaatcctctgcttggccgtgcatgtgagtcatgctatgccactcagagtcatcagtggtacagctgggggccccccaacatgcagtgtcgtctttgcgccatctgttggctgtactggaagaaatatggcgggcttaagatgccaacccagagcgaagaagaaaagctaagcccctcaccaaccaccgaagacccccgggtgcggtcccatgtcagtagacaggccatgcagggtatgccagttagaaatacaggctcacccaagtccgccgtcaagacccgacaggcattcttcctccatactacatactttactaaattcgctcggcaggtttgcaagaacaccctgagactgcgacaggccgctaggcgcccattcgtcgccataaattatgccgccatccgggctgagtgcaagatgttactgaattcatag

SEQ ID NO: 205485 - DNA, 1548 bp, Artificial Sequence
  derived and/or modified sequence
atggccgcaaacatgtacagagtaggcgactacgtttatttcgaaaatagcagttccaatccatacctgatccgcaggattgaagaactgaataagacggcctccgggaatgttgaagccaaggtggtttgtttctatcgaaggagggatatttctaacaccctcatcatgctcgccgataagcacgctaaagagattgaggaggaaagcgagaccaccgtagaagcagacttgactgacaagcaaaaacatcaactgaaacatagagagctattcctctccaggcagtatgaaagccttccagctacacatatccgaggcaaatgttcagttgccttgttaaatgagaccgaaagcgtgttgagctacctggacaaagaggacacctttttctacagccttgtatatgatcccagcctgaagaccctgctggccgacaaaggcgagatccgggttgggccacgttatcaagctgatatacctgaaatgctgttggaaggagagtcagatgagcgggaacagagcaagctcgaggttaaagtttgggatccaaactctcccctgacagaccggcagatcgaccaattcttggtcgtggccagggccgtgggcactttcgcacgggctctcgactgttccagctccgttaggcaaccgtccttgcacatgtccgctgcagctgcgagtcgcgatataaccctgttccacgccatggacactctctatcgacactcgtacgacctttcctctgccattagcgtgttggtgccgttaggcggacccgtgctctgcagagacgagatggaggaatggtcagcctctgaggccagcctcttcgaggaagccctggagaaatacggcaaagacttcaacgatatccgtcaggacttcctgccatggaagagtctgacctcgattatcgagtattactatatgtggaagactaccgaccggtatgtccagcagaaacgcctgaaagcagcagaagccgagagcaaattgaaacaggtgtatatccccacttactcgaagcccaatccgaaccaaatctctacgtcaaatggcaaacctggcgctgttaatggagccgtgggaaccacctttcaacctcagaacccactgttaggccgagcatgcgagtcctgttatgcaactcagagtcaccagtggtactcttggggaccgccaaacatgcagtgtagactgtgtgctatttgttggttgtactggaagaagtatgggggactaaagatgccaacgcagtccgaagaagaaaaactgagtccaagccccacaaccgaagaccctagagtcaggtctcacgtgtcaaggcaggccatgcaggggatgccagtgagaaatacagggagtcctaaaagcgcggtgaaaaccaggcaggcattctttctccacactacctacttcacaaagttcgccagacaggtgtgtaagaacaccctccgcctgagacaagcagcacgcaggccgttcgtggccatcaattacgccgctatacgcgcagaatgcaagatgctgctgaactcctag

SEQ ID NO: 205486 - DNA, 1548 bp, Artificial Sequence
  derived and/or modified sequence
atggccgccaacatgtacagagtgggcgactacgtgtacttcgagaacagcagcagcaacccctacctgatcagaagaatcgaggagctgaacaagaccgccagcggcaacgtggaggccaaggtggtgtgcttctacagaagaagagacatcagcaacaccctgatcatgctggccgacaagcacgccaaggagatcgaggaggagagcgagaccaccgtggaggccgacctgaccgacaagcagaagcaccagctgaagcacagagagctgttcctgagcagacagtacgagagcctgcccgccacccacatcagaggcaagtgcagcgtggccctgctgaacgagaccgagagcgtgctgagctacctggacaaggaggacaccttcttctacagcctggtgtacgaccccagcctgaagaccctgctggccgacaagggcgagatcagagtgggccccagataccaggccgacatccccgagatgctgctggagggcgagagcgacgagagagagcagagcaagctggaggtgaaggtgtgggaccccaacagccccctgaccgacagacagatcgaccagttcctggtggtggccagagccgtgggcaccttcgccagagccctggactgcagcagcagcgtgagacagcccagcctgcacatgagcgccgccgccgccagcagagacatcaccctgttccacgccatggacaccctgtacagacacagctacgacctgagcagcgccatcagcgtgctggtgcccctgggcggccccgtgctgtgcagagacgagatggaggagtggagcgccagcgaggccagcctgttcgaggaggccctggagaagtacggcaaggacttcaacgacatcagacaggacttcctgccctggaagagcctgaccagcatcatcgagtactactacatgtggaagaccaccgacagatacgtgcagcagaagagactgaaggccgccgaggccgagagcaagctgaagcaggtgtacatccccacctacagcaagcccaaccccaaccagatcagcaccagcaacggcaagcccggcgccgtgaacggcgccgtgggcaccaccttccagccccagaaccccctgctgggcagagcctgcgagagctgctacgccacccagagccaccagtggtacagctggggcccccccaacatgcagtgcagactgtgcgccatctgctggctgtactggaagaagtacggcggcctgaagatgcccacccagagcgaggaggagaagctgagccccagccccaccaccgaggaccccagagtgagaagccacgtgagcagacaggccatgcagggcatgcccgtgagaaacaccggcagccccaagagcgccgtgaagaccagacaggccttcttcctgcacaccacctacttcaccaagttcgccagacaggtgtgcaagaacaccctgagactgagacaggccgccagaagacccttcgtggccatcaactacgccgccatcagagccgagtgcaagatgctgctgaacagctag

SEQ ID NO: 205487 - protein, 985 aa, Artificial Sequence
  derived and/or modified sequence
MAASVAAAARRLRRAIRRSPAWRGLSHRPLSSEPPAAKASAVRAAFLNFFRDRHGHRLVPSASVRPRGDPSLLFVNAGMNQFKPIFLGTVDPRSEMAGFRRVANSQKCVRAGGHHNDLEDVGRDLSHHTFFEMLGNWAFGGEYFKEEACNMAWELLTQVYGIPEERLWISYFDGDPKAGLDPDLETRDIWLSLGVPASRVLSFGPQENFWEMGDTGPCGPCTEIHYDLAGGVGAPQLVELWNLVFMQHNREADGSLQPLPQRHVDTGMGLERLVAVLQGKHSTYDTDLFSPLLNAIQQGCRAPPYLGRVGVADEGRTDTAYRVVADHIRTLSVCISDGIFPGMSGPPLVLRRILRRAVRFSMEILKAPPGFLGSLVPVVVETLGDAYPELQRNSAQIANLVSEDEAAFLASLERGRRIIDRTLRTLGPSDMFPAEVAWSLSLCGDLGLPLDMVELMLEEKGVQLDSAGLERLAQEEAQHRARQAEPVQKQGLWLDVHALGELQRQGVPPTDDSPKYNYSLRPSGSYEFGTCEAQVLQLYTEDGTAVASVGKGQRCGLLLDRTNFYAEQGGQASDRGYLVRAGQEDVLFPVARAQVCGGFILHEAVAPECLRLGDQVQLHVDEAWRLGCMAKHTATHLLNWALRQTLGPGTEQQGSHLNPEQLRLDVTTQTPLTPEQLRAVENTVQEAVGQDEAVYMEEVPLALTAQVPGLRSLDEVYPDPVRVVSVGVPVAHALDPASQAALQTSVELCCGTHLLRTGAVGDLVIIGDRQLSKGTTRLLAVTGEQAQQARELGQSLAQEVKAATERLSLGSRDVAEALRLSKDIGRLIEAVETAVMPQWQRRELLATVKMLQRRANTAIRKLQMGQAAKKTQELLERHSKGPLIVDTVSAESLSVLVKVVRQLCEQAPSTSVLLLSPQPMGKVLCACQVAQGAMPTFTAEAWALAVCSHMGGKAWGSRVVAQGTGSTTDLEAALSIAQTYALSQL

SEQ ID NO: 205488 - DNA, 2958 bp, Artificial Sequence
  derived and/or modified sequence
atggctgcgtcagtggcagctgccgcaagaaggctgcgtcgcgccattcgccggtccccagcctggagaggactttcacatagacctctgagttcagaaccacctgccgcaaaggccagcgctgttagggcagcattcctaaacttctttagggaccgccacggtcatcgactcgtcccatccgcctctgtgagaccaagaggagatccctcgcttctgtttgtgaacgccggtatgaatcagttcaagcctatctttctgggcacggttgacccaagatcagaaatggctggattcaggagagtcgctaattcacagaagtgtgtgagagcaggagggcatcacaacgacctggaggacgtgggcagagatctttctcaccacacatttttcgagatgctaggtaattgggcctttggtggagaatattttaaggaggaagcttgtaacatggcctgggaacttctgacgcaagtttatggtatcccagaagagcgactgtggatttcttactttgatggggaccctaaagcaggcttagatccggacctggagactagggacatctggctctctctcggagtgcctgcctctagagttctctcttttggtcctcaagaaaatttctgggagatgggggatacgggcccatgcgggccctgcaccgaaatccactacgatctggcagggggcgtcggcgcgcctcaacttgtggaactttggaatctcgtgttcatgcagcataatcgagaggctgacggaagtcttcagcccttaccacagcgccatgttgatacgggaatgggactcgagagactggtggcagtcctccagggcaagcactcaacctacgacacagatctgttcagtcccctcttgaatgcaatacagcaggggtgcagagccccaccctaccttgggagggttggcgtggcagacgaaggccggacggacacggcctacagggtcgtggcagatcatatcaggaccctatccgtgtgtatatcagatggcatctttcctggcatgtcagggccacccctagtcttaaggagaatcctgcgaagagcggtaagattctcaatggaaattctgaaggcccccccgggatttctggggtctttggtgcccgtggttgtggaaactctgggtgatgcctaccccgaactacaaaggaattccgctcagattgcgaacttagtttcagaggacgaagccgccttcctggccagtctggagcgggggaggagaattattgataggacgttacggaccctcggccctagcgatatgttccccgcggaagtggcctggtcactgtccctgtgcggcgatctcggtttgccactggacatggtagagctgatgctggaggagaagggcgtgcagctggattccgcagggcttgaaagacttgcccaggaggaggcacagcaccgcgcgcgacaggccgagccagttcagaagcaaggcctgtggcttgatgtacacgccctgggcgagctccagagacagggtgttccacctacagacgactcgccaaaatataactactctcttaggccttcaggctcgtacgagttcggcacctgtgaggcccaagtgctacaattatacactgaagacggtaccgctgtggctagcgtggggaaaggtcaaagatgtgggctcctgctggatcgcacgaacttttacgctgaacaaggaggccaggcttctgaccggggctatctcgtgagagctgggcaggaggacgttttattccccgttgcccgagcccaggtgtgtggggggttcatcttgcacgaagcagtggcccccgagtgcctgagactgggcgaccaggtgcagctgcacgtggatgaagcatggagactggggtgcatggcaaaacacaccgccacccacctgctgaactgggcccttcgacagacactggggccggggaccgaacagcagggatctcatcttaaccctgagcagctgaggctggatgtgacaacacagaccccccttacacctgagcagttgcgggccgtcgagaacacagttcaggaagctgtcgggcaagacgaggctgtttacatggaggaagttcccctcgccctgaccgcacaggttcctggcttaaggtcactggatgaggtgtaccccgaccccgtgcgcgtggtcagtgtcggcgtcccagtggcccacgctctggatcccgcctcacaagcagcactgcagacttctgtcgaattgtgttgtggcacacatttgctcaggaccggggctgtgggggatctggtaatcatcggtgaccgacaactgtcgaagggaactacccggctgctggctgtcactggtgagcaggcccaacaggccagggaattgggccagtccctcgcacaggaagtgaaggccgccactgagaggctttccctaggcagtagggatgttgctgaggcgctacgactatctaaggatatcggccgacttatagaggccgttgaaaccgctgttatgccacagtggcagaggagggaactacttgccaccgtcaaaatgctgcaacggagagcaaatacagcgattcgcaagctgcaaatgggccaggccgctaaaaaaacgcaggaactgctagaacggcatagtaaaggacccttaattgtggacaccgtgagcgccgaatcactctccgttttagtgaaggtggtccggcagctttgtgaacaagccccatcaacatccgtcctactgttaagcccccaacccatgggtaaggttttgtgcgcctgtcaggtcgcccagggcgcaatgcccacgttcactgcagaggcctgggcgttggccgtgtgttcgcatatggggggtaaagcttgggggagtagggttgtggcccaaggtaccggctctacaacggacttagaagccgcactgagcattgcccaaacctatgctttgagccagttatag

SEQ ID NO: 205489 - DNA, 2958 bp, Artificial Sequence
  derived and/or modified sequence
atggccgcctctgtggccgccgccgcccggcggctgcggcgggccatcagaagaagccctgcctggaggggcctgagccaccggcccctgagcagcgagcccccagctgccaaggccagcgctgtgcgggccgccttcctgaacttcttccgggacagacatggccaccggctggtgcccagcgcctctgtgcggcccaggggggaccccagcctgctgtttgtgaatgccggcatgaaccagttcaagcccatcttcctgggcaccgtggaccccaggtctgagatggccggcttccggcgggtggccaacagccagaagtgtgtgcgggccggcggccaccacaatgacctggaggatgtgggccgggacctgagccaccacaccttctttgagatgctgggcaactgggcctttggaggagagtacttcaaggaggaggcctgcaacatggcctgggagctgctgacccaggtgtatggcatccctgaggagcggctgtggatctcctactttgatggagaccccaaggccggcctggaccctgacctggagacccgggacatctggctgagcctgggcgtgcctgccagccgggtgctgagctttggcccccaggagaacttctgggagatgggagacaccggcccctgtggcccctgcacagagatccactatgacctggccggcggcgtgggcgccccccagctggtggagctgtggaacctggtgttcatgcagcacaaccgggaggctgatggcagcctgcagcccctgccccagagacatgtggacaccggcatgggcctggagcggctggtggccgtgctgcagggcaagcacagcacctatgacacagacctcttcagccccctgctgaatgccatccagcagggctgccgggccccaccctacctgggccgggtgggcgtggctgatgagggccgcacagacacagcctacagagtggtggccgaccacatccgcaccctgtctgtgtgcatcagtgatggcatcttccctggcatgagcggcccccccctggtgctgcggcgcatcctgcggcgggctgtgcgcttctccatggagatcctgaaggcccctcctggcttcctgggcagcctggtgcctgtggtggtggagaccctgggagatgcctacccagagctgcagaggaacagcgcccagatcgccaacctggtgtctgaagatgaggccgccttcctggccagcctggagcggggccgccgcatcatcgacaggaccctgcggaccctgggccccagcgacatgtttcctgctgaggtggcctggagcctgagcctgtgtggggacctgggcctgcccctggacatggtggagctgatgctggaggagaagggcgtgcagctggacagcgctggcctggagcggctggcccaggaggaggcccagcaccgggcccggcaggccgagcctgtgcagaagcagggcctgtggctggatgtgcacgccctgggggagctgcagaggcagggcgtgcccccaacagatgacagccccaagtacaactacagcctgcggcccagcggcagctatgaatttggcacctgtgaggcccaggtgctgcagctgtacacagaagatggaacagctgtggcctctgtgggcaagggccagagatgtggcctgctgctggacaggaccaacttctacgccgagcagggcggccaggccagtgaccggggctacctggtgcgggccggccaggaggatgtgctcttccctgtggcccgggcccaggtgtgtggcggcttcatcctgcacgaggccgtggcccctgagtgcctgcggctgggggaccaggtgcagctgcacgtggatgaggcctggaggctgggctgcatggccaagcacacagccacccacctgctgaactgggccctgcggcagaccctgggccctggaacagagcagcagggcagccacctgaaccctgagcagctgcggctggatgtgaccacccagacccccctgaccccagagcagctgcgggctgtggagaacacagtgcaggaggccgtgggccaggatgaagctgtgtacatggaggaggtgcccctggccctgacagcccaggtgcccggcctgcggagcctggatgaggtgtacccagaccctgtgcgggtggtgtctgtgggcgtgcctgtggcccacgccctggaccctgccagccaggccgccctgcagacctctgtggagctgtgctgcggcacccacctgctgaggactggagctgtgggggacctggtgatcatcggggaccggcagctgagcaagggcaccacccggctgctggccgtgactggagagcaggcccagcaggcccgggagctgggccagagcctggcccaggaggtgaaggccgccacagagcggctgagcctgggcagcagagatgtggccgaggccctgcggctgagcaaggacatcggccgcctcatcgaggccgtggagacagctgtgatgccccagtggcagaggcgggagctgctggccaccgtgaagatgctgcagaggcgggccaacacagccatcaggaagctgcagatgggccaggccgccaagaagacccaggagctgctggagcggcacagcaagggccccctcatcgtggacacagtgtctgctgagagcctgtctgtgctggtgaaggtggtgcggcagctgtgtgagcaggcccccagcacctctgtgctgctgctgagcccccagcccatgggcaaggtgctgtgtgcctgccaggtggcccagggcgccatgcccaccttcaccgctgaggcctgggccctggccgtgtgcagccacatgggcggcaaggcctggggcagccgggtggtggcccagggcaccggcagcaccacagacctggaggccgccctgagcatcgcccagacctacgccctgagccagctgtag

SEQ ID NO: 205490 - DNA, 3854 bp, Artificial Sequence
  derived and/or modified sequence
acgatggcagcgtcagtggcagctgcagcccggaggctgcggcgggccattcgaaggtcgcccgcatggcggggcctcagccatcggccgctctcatcggagccccctgcagccaaggcctcggccgtgagggccgcctttctgaacttctttcgggaccgccatggccaccggctggtgccctccgcttccgtgcggccccgcggcgaccccagtttgctttttgtcaatgcgggcatgaaccagttcaagccaatctttctgggcaccgtggatccacgaagcgagatggcaggcttccgacgtgtggccaacagccagaaatgtgtgagagctggaggacaccataacgacctggaagatgtgggtcgagacctttcccatcataccttctttgaaatgcttggcaattgggcctttgggggtgaatattttaaggaggaggcttgtaacatggcctgggaactgctgactcaggtctatgggatccctgaggaaaggctctggatctcctactttgatggtgaccccaaggcagggctggacccagacctggagaccagggacatctggctgagcttaggggtgcctgctagccgtgtgctttcctttggaccacaagagaacttctgggagatgggggatactggcccttgtgggccctgtactgagatccactacgaccttgctggtggggtgggagccccccagctggtagagctttggaacctggtcttcatgcaacacaacagagaggcagatggaagcctgcagcccctgccccagcggcatgtggacacaggaatgggcctggaaaggctggtggctgtgctgcaaggcaaacactccacctatgacactgacctcttttccccgctgctcaacgccatacagcagggctgcagggcacccccttacttgggccgagtaggggtggcagacgaggggcgcacagacacagcgtaccgcgtggtggctgaccacatccgcacactcagtgtctgcatctctgatggcatcttccctgggatgtcaggtcccccgctggttcttcgtcggatcctgcgtcgagctgtgcgtttctccatggagatcttaaaggcaccacctggcttcctaggcagcctggtacctgtagtggtggagacactgggagatgcttatccagaactgcaaaggaactcagcccagatcgccaacctggtgtcagaggacgaggcagccttcctggcctccctggagcggggtaggcggatcattgatcggactctgaggaccctggggccttcagatatgttccctgctgaagtggcctggtccttgtcactgtgtggagacctgggactccccttggacatggtagagctgatgctggaggagaaaggggtccagctagactccgctggactggagcggttggcccaagaggaggcccagcaccgggcacggcaggctgagccagttcagaagcagggattgtggcttgatgtccatgcgcttggggagctgcagcgccaaggagtgcccccaactgacgacagccccaagtacaactactccctgcgacccagcggaagttatgagttcggcacctgtgaggcccaggtgttgcaactgtatacagaggacgggacagcagtggcctccgtggggaaaggccagcgctgtggcctcctcttggacaggaccaacttctacgcagaacaggggggccaggcttcagaccgtggctacctggtgcgggcagggcaagaggacgtgctgttcccagtagcccgggcccaggtctgtggaggtttcatcctgcatgaggcagtagcccctgagtgcctgcggttaggggaccaggtgcagctgcatgtggatgaggcctggcgtctaggctgcatggcgaagcatacggccacccacctgctgaactgggcactgaggcagaccctgggccctggcacagagcagcagggctcccatctcaatcctgagcagctgcgcttggatgtgaccacccagaccccattgaccccagagcagctccgggcagtggagaacactgtgcaggaggccgtggggcaggatgaggctgtgtacatggaggaggtgcccctggcgctcactgcccaggtccctggcctgcgctctctggatgaggtttacccagaccctgtgcgggtggtatcagtgggggtgcccgtggcccatgcattggacccagcctcccaagccgcactgcagacctctgtggagctatgctgtgggacgcacctgttacgtactggggctgtaggggacctggttatcatcggggaccgccagctttccaagggcactacccgcctgctggccgtcactggggagcaggcccagcaggcccgagagctaggccagagcctggcccaggaagtgaaagcggccactgagcggctgagtctggggagccgggatgtggcggaggcactgaggctgtccaaggacataggacgactcattgaagctgtggaaactgctgtgatgccccagtggcagcggcgggagctgctggccacagtgaagatgctgcagcggcgtgccaacactgccatccgtaagctgcaaatgggacaggctgcaaagaaaactcaggagctgctggagcggcactcgaaggggcctctgattgtggacacagtctctgctgagtctctctcagtgctggtgaaggtggtacggcagctgtgtgagcaggcccccagcacgtctgtgctcctactcagcccccagcccatggggaaggtgctgtgtgcctgtcaggtggcccagggtgccatgcccaccttcacagcagaggcctgggcactggcagtgtgcagccacatggggggcaaggcgtggggctcacgagtggtggcccaaggcaccggaagcactactgacctggaagctgccctcagtatagcccaaacctatgccctcagccagctctgacccaggtccgcccagggacccacatggactaaaggcaatgccaggagccctgaaggagccagcagaaccttcccacatgctgaagcgaggactagaggctggaggccaagcagctgagccaaagaagatcacctgggccagggcctacgtgacacaaggagacatgggctagggaaggcagaactgggcccaaagacacacacccccttggtgaaagagaagacatggacaattatggctgtgactgcacattagaaattatttcactggccgggtgtggtggttcacacctgtaatccaagcactttgggaggccgaggcaggtagatcatgaggtcaggagatcaaaaccatcctggctaacatggtgaaaccccatctctactaaaaatacaaaaaattagccgggtgtggtggcacacgcctgtagtcccagctactcgggaggctgaggcagaagaatcgcttgaacctgggaggtggaggttgcagtgggccaagatcgcaccactgcactccagcctgggtgacagagcgagactctgtctcaaataattatttcacagaggatagcaagctccagaaggttctattacctttaaaaaagagtagttttgcccctcccagcaacctaagaccagtctgaactcacactgtctgaaaggccacccaggatccaaatcgggccatcttcattgccatgagtgttcggacaggctctgcgtgccaggcaacagtgggcagacaaagggctccctggctactgggaagatacagaaccatcctgtgaaaatcatttcagcactggagaccttctttgctattacttctttcattaacaatgacctctaatttaaattgggccctgctggtttgttgatgaattgagcaac

SEQ ID NO: 205491 - DNA, 2958 bp, Artificial Sequence
  derived and/or modified sequence
atggccgccagcgtggccgccgccgcccggcggctgcggcgggccataagacggagcccagcttggaggggtctgtcccacaggccattatccagtgagcctcctgcagcaaaggcttcagccgtgagggcagccttcctgaattttttccgggataggcatggtcacaggctggtgccgagcgcctctgtacgacctcgtggtgaccctagcctgttgttcgtaaacgcaggaatgaatcagtttaagcctatttttctcggaaccgtcgatccccgcagcgagatggctggctttcgtcgcgtagccaactctcagaaatgcgtccgagcaggcggtcaccacaatgacctggaggatgtgggaagagatctttctcatcacaccttctttgagatgttaggaaattgggccttcggcggagaatatttcaaggaagaagcgtgcaacatggcttgggaacttctgacccaggtgtacgggatccccgaggagcggctgtggatctcctacttcgacggcgatcctaaagccggcttggaccccgacctcgagactagagacatctggctaagtcttggggtgcccgctagcagagttctatcttttgggccacaggaaaatttttgggaaatgggagataccggcccatgtgggccatgcacagagatccattatgatttggctggaggagtcggcgcaccgcagctcgttgaactctggaacttggtgttcatgcagcacaaccgggaagccgacggatctttgcagccactgccccagcgccacgtggatacgggtatgggattagagcgattagtggccgtcctccaggggaagcatagcacctacgacacagatctttttagccctttgcttaacgcaatccagcaggggtgtagagcacccccatacctcggacgtgtaggggtggccgatgagggtcggactgacactgcatatcgggtggtggcagatcacatccgcacgctctctgtttgcatctcagatggaatttttccaggaatgtccggccccccactggtcttgagaagaatcttacggcgagccgttcggttcagtatggaaattttaaaggccccaccagggttcctgggctctctagtcccagtggtagtggaaaccttaggcgacgcttatccggaactgcagcggaactccgcgcaaattgctaatcttgtttcagaagacgaggcggcttttctggccagtttagaaaggggacggcggatcatcgaccggacgctgcggaccctgggcccatcggatatgtttcccgccgaggttgcctggtcattaagtctatgtggcgatcttggattgcccttagacatggtcgagctaatgctggaggagaagggggtgcaactcgatagtgcaggcctggagcggctcgcgcaagaggaagcccagcatagagctcgccaagcggaacccgtccagaagcagggtctgtggcttgatgtacacgccctgggcgagctacagcgccagggggtaccacccaccgatgatagcccgaagtacaactattcattgcgcccttctggtagctacgagttcgggacatgcgaagcacaggtactacagctctacaccgaggacggaacagccgttgcgagtgttgggaaagggcaaagatgtggcctgctgttggatagaacaaatttctacgccgagcaaggaggccaggcctcagaccgcggctaccttgttagggcaggacaagaagatgtcctctttcctgtggctcgtgcccaggtttgcggaggatttatcctacatgaagctgtcgcacccgaatgtttacgattgggcgatcaggtgcaactccacgtcgatgaggcatggagattgggctgtatggcaaagcatacagccacacacctgctgaactgggctttgcggcaaacacttggaccaggcactgagcaacaggggtcccatttaaatcccgaacagctacgactcgatgtcactacacagactcccttaacccccgagcagctgagagctgttgagaacacagttcaggaggcagtcggccaggatgaggcggtgtacatggaagaggtccctctggccctgactgcacaggtcccgggtctgagatcgttagacgaggtataccccgatcccgtgagggtcgttagcgtgggagtgcccgttgcccatgccctggaccctgcatctcaggcagccctgcagacatctgttgagttgtgttgcgggacccacttactgcgcactggcgctgtaggggatctggtaatcattggcgatcgacagctgagtaaggggactacccgtctgctcgcagtcactggtgaacaggcccagcaagccagagagctgggacagtccctggcgcaggaggttaaggccgctacagagagactcagcttgggttcaagagatgttgcagaagcattaaggctgtcaaaagacattggacgcttgattgaggctgtcgagaccgcagttatgccacagtggcagcgaagagagttgttggctactgtaaagatgctgcagcgccgcgccaataccgcgatccggaagctacagatgggacaggccgctaagaagacacaggaactactcgagaggcacagcaagggacccttgattgttgataccgttagtgcggaaagcctgagcgtgctagttaaggtcgtccgtcagttatgtgagcaggccccatctacatctgtcttactgctgtccccacagccgatgggaaaagtgctgtgcgcctgtcaggtcgcacaaggcgccatgcccacattcaccgcggaagcatgggctttagccgtgtgcagccacatgggtggtaaagcatggggctcccgggtggtcgcacaaggaactggttcaactacagaccttgaagccgctctatctattgctcaaacttacgccttatcacagctgtag

SEQ ID NO: 205492 - DNA, 2958 bp, Artificial Sequence
  derived and/or modified sequence
atggccgcttccgtggcagcggctgctcgacggctgagacgggcaatccgacgttctccagcttggcgtggcttgtcccatagaccattgtcgtcagagcccccagcggctaaagcgtccgccgtgcgcgctgcgtttctgaattttttccgagaccgccacggccaccgcctcgtcccttctgcttcggtcaggcctcggggtgatccctctctcctctttgtgaatgcaggcatgaatcagtttaagccaatcttcctgggcacagtggatcctagatctgagatggctgggttccgcagagtggccaattcacagaaatgtgtacgcgcaggagggcatcataatgacctggaagatgtgggcagggacctctcccaccacacatttttcgagatgctgggcaattgggcctttggaggcgaatacttcaaggaggaggcttgcaatatggcttgggagttactgacccaggtttacggcatacccgaggagcgcctctggatttcttactttgacggtgatccaaaggccggactcgatcctgacttggagacacgcgacatttggctgtctctcggggtgcccgcatcaagagttctgagttttggaccacaggaaaacttttgggagatgggagacactggtccatgtgggccatgcacagagatacattacgatctggctggaggtgtaggcgcaccccagttggtcgagctgtggaacctcgtgtttatgcagcacaaccgggaggctgatggcagcctccagccactgccacagcgtcatgtggacaccggcatgggtcttgaaaggttggtggccgttctccaggggaagcattccacatacgatacagatctgttcagtcctctcctaaacgccattcagcaaggctgtcgcgcacccccatatctaggccgtgtaggcgtggccgatgaaggcaggactgacacagcctacagggtagtggctgatcatatccgaacccttagtgtctgcatttcagacggaatcttccccggaatgtcaggtcccccactggttctcaggaggatactccgtcgcgcagtgaggtttagtatggagattctcaaagcgccacccggtttcctggggtctctggtgccagtggtcgtggagactttgggtgacgcctacccggaacttcaacggaactctgcccagattgctaacctggtgagcgaggacgaagcggcatttttggcctctctggaacggggacggaggatcatagacagaaccctacgcactctgggcccttccgacatgtttcctgctgaggtggcatggtctctgagcttatgtggcgacctggggctcccgcttgatatggttgagcttatgctggaggaaaagggcgtacagctggactccgccggtctggagcggcttgcccaagaagaggcccagcacagagcacgccaggccgagcccgtgcagaaacagggactatggctggatgtccacgctctcggggaattacagcggcagggagtcccgcctacggatgattcccccaagtacaattacagcctgcggccatcggggagttacgagttcggaacttgtgaagcccaggttctccagctgtacacggaagacggcacagccgtggctagcgtcggcaagggacaaaggtgtggcttactgctggataggactaatttctacgcagaacagggaggccaggccagtgaccgagggtacttagtccgcgcagggcaggaggacgttctgtttcccgtcgctcgggcacaggtttgcggaggcttcatcctgcacgaagccgtggcccctgaatgtcttcgattaggcgaccaagtacagttgcacgtcgacgaggcctggcgcttagggtgcatggcgaaacacaccgcaacacacctcctcaactgggcactcagacaaactttaggaccgggaactgagcagcagggttctcatctaaatcctgagcaactacggctggacgtcaccacgcagacacctttaactcccgaacagcttcgggcagtagaaaataccgttcaggaagccgtaggacaggacgaggccgtctacatggaggaggttcctctggcattgactgcccaggtgccaggactgagaagtcttgacgaagtctacccagaccctgtgcgggtggtatcagtgggcgtgcctgtggcacatgcactcgacccagcaagccaggccgctctgcagacatctgtagagctgtgttgcgggacccacctgctccgtactggcgctgtaggcgacctggttattatcggcgaccgacagctcagcaaaggcaccacgaggctacttgcagttactggagaacaggcacagcaagcaagggaactgggtcagagtcttgctcaagaggtcaaggctgcaactgagcggctctcgctgggatcccgggacgtggcggaggccctgcgtttatccaaggacatcggacggcttatcgaggcagtcgagacggccgttatgccgcagtggcagcggcgagaactgcttgctaccgtgaagatgctccagcggagagctaataccgcgatcagaaagctgcagatgggccaggctgcaaagaagacacaggaactgctggagcggcactctaagggacctctcatcgtggatactgtgtcggcagaatctttgagcgttctggtgaaggtggtaagacaactttgcgaacaagccccttcaacatcagttctgttgctctctccgcagccaatgggcaaagtgctttgtgcgtgtcaggtggcacagggcgcaatgcctacctttaccgctgaggcttgggctctggcagtctgctcccacatgggcggaaaagcgtggggcagcagagtcgttgcgcaggggaccggcagtactacagacctggaggcagctttgtctattgcacaaacctatgcactttcacagctgtag

SEQ ID NO: 205493 - DNA, 2958 bp, Artificial Sequence
  derived and/or modified sequence
atggccgccagcgtggccgccgccgccagaagactgagaagagccatcagaagaagccccgcctggagaggcctgagccacagacccctgagcagcgagccccccgccgccaaggccagcgccgtgagagccgccttcctgaacttcttcagagacagacacggccacagactggtgcccagcgccagcgtgagacccagaggcgaccccagcctgctgttcgtgaacgccggcatgaaccagttcaagcccatcttcctgggcaccgtggaccccagaagcgagatggccggcttcagaagagtggccaacagccagaagtgcgtgagagccggcggccaccacaacgacctggaggacgtgggcagagacctgagccaccacaccttcttcgagatgctgggcaactgggccttcggcggcgagtacttcaaggaggaggcctgcaacatggcctgggagctgctgacccaggtgtacggcatccccgaggagagactgtggatcagctacttcgacggcgaccccaaggccggcctggaccccgacctggagaccagagacatctggctgagcctgggcgtgcccgccagcagagtgctgagcttcggcccccaggagaacttctgggagatgggcgacaccggcccctgcggcccctgcaccgagatccactacgacctggccggcggcgtgggcgccccccagctggtggagctgtggaacctggtgttcatgcagcacaacagagaggccgacggcagcctgcagcccctgccccagagacacgtggacaccggcatgggcctggagagactggtggccgtgctgcagggcaagcacagcacctacgacaccgacctgttcagccccctgctgaacgccatccagcagggctgcagagcccccccctacctgggcagagtgggcgtggccgacgagggcagaaccgacaccgcctacagagtggtggccgaccacatcagaaccctgagcgtgtgcatcagcgacggcatcttccccggcatgagcggcccccccctggtgctgagaagaatcctgagaagagccgtgagattcagcatggagatcctgaaggccccccccggcttcctgggcagcctggtgcccgtggtggtggagaccctgggcgacgcctaccccgagctgcagagaaacagcgcccagatcgccaacctggtgagcgaggacgaggccgccttcctggccagcctggagagaggcagaagaatcatcgacagaaccctgagaaccctgggccccagcgacatgttccccgccgaggtggcctggagcctgagcctgtgcggcgacctgggcctgcccctggacatggtggagctgatgctggaggagaagggcgtgcagctggacagcgccggcctggagagactggcccaggaggaggcccagcacagagccagacaggccgagcccgtgcagaagcagggcctgtggctggacgtgcacgccctgggcgagctgcagagacagggcgtgccccccaccgacgacagccccaagtacaactacagcctgagacccagcggcagctacgagttcggcacctgcgaggcccaggtgctgcagctgtacaccgaggacggcaccgccgtggccagcgtgggcaagggccagagatgcggcctgctgctggacagaaccaacttctacgccgagcagggcggccaggccagcgacagaggctacctggtgagagccggccaggaggacgtgctgttccccgtggccagagcccaggtgtgcggcggcttcatcctgcacgaggccgtggcccccgagtgcctgagactgggcgaccaggtgcagctgcacgtggacgaggcctggagactgggctgcatggccaagcacaccgccacccacctgctgaactgggccctgagacagaccctgggccccggcaccgagcagcagggcagccacctgaaccccgagcagctgagactggacgtgaccacccagacccccctgacccccgagcagctgagagccgtggagaacaccgtgcaggaggccgtgggccaggacgaggccgtgtacatggaggaggtgcccctggccctgaccgcccaggtgcccggcctgagaagcctggacgaggtgtaccccgaccccgtgagagtggtgagcgtgggcgtgcccgtggcccacgccctggaccccgccagccaggccgccctgcagaccagcgtggagctgtgctgcggcacccacctgctgagaaccggcgccgtgggcgacctggtgatcatcggcgacagacagctgagcaagggcaccaccagactgctggccgtgaccggcgagcaggcccagcaggccagagagctgggccagagcctggcccaggaggtgaaggccgccaccgagagactgagcctgggcagcagagacgtggccgaggccctgagactgagcaaggacatcggcagactgatcgaggccgtggagaccgccgtgatgccccagtggcagagaagagagctgctggccaccgtgaagatgctgcagagaagagccaacaccgccatcagaaagctgcagatgggccaggccgccaagaagacccaggagctgctggagagacacagcaagggccccctgatcgtggacaccgtgagcgccgagagcctgagcgtgctggtgaaggtggtgagacagctgtgcgagcaggcccccagcaccagcgtgctgctgctgagcccccagcccatgggcaaggtgctgtgcgcctgccaggtggcccagggcgccatgcccaccttcaccgccgaggcctgggccctggccgtgtgcagccacatgggcggcaaggcctggggcagcagagtggtggcccagggcaccggcagcaccaccgacctggaggccgccctgagcatcgcccagacctacgccctgagccagctgtag

SEQ ID NO: 205494 - protein, 148 aa, Artificial Sequence
  derived and/or modified sequence
MPFAEDKTYKYICRNFSNFCNVDVVEILPYLPCLTARDQDRLRATCTLSGNRDTLWHLFNTLQLPTWAGEETPGGQSSGRGLDFSSLTSGAVWLWQMSDFWSCFSTWTVSIWLILHWVLLRLNLQVFAKCLAQSKWPLLLPSLSCPTW

SEQ ID NO: 205495 - protein, 124 aa, Artificial Sequence
  derived and/or modified sequence
MPFAEDKTYKYICRNFSNFCNVDVVEILPYLPCLTARDQDRLRATCTLSGNRDTLWHLFNTLQRRPGWVEYFIAALRGCELVDLADEVASVYQSYQPQFRASPADAQPQSHPKESRWWPPGVLL

SEQ ID NO: 205496 - protein, 540 aa, Artificial Sequence
  derived and/or modified sequence
MPFAEDKTYKYICRNFSNFCNVDVVEILPYLPCLTARDQDRLRATCTLSGNRDTLWHLFNTLQRRPGWVEYFIAALRGCELVDLADEVASVYQSYQPRTSDRPPDPLEPPSLPAERPGPPTPAAAHSIPYNSCREKEPSYPMPVQETQAPESPGENSEQALQTLSPRAIPRNPDGGPLESSSDLAALSPLTSSGHQEQDTELGSTHTAGATSSLTPSRGPVSPSVSFQPLARSTPRASRLPGPTGSVVSTGTSFSSSSPGLASAGAAEGKQGAESDQAEPIICSSGAEAPANSLPSKVPTTLMPVNTVALKVPANPASVSTVPSKLPTSSKPPGAVPSNALTNPAPSKLPINSTRAGMVPSKVPTSMVLTKVSASTVPTDGSSRNEETPAAPTPAGATGGSSAWLDSSSENRGLGSELSKPGVLASQVDSPFSGCFEDLAISASTSLGMGPCHGPEENEYKSEGTFGIHVAENPSIQLLEGNPGPPADPDGGPRPQADRKFQEREVPCHRPSPGALWLQVAVTGVLVVTLLVVLYRRRLH

SEQ ID NO: 205497 - DNA, 447 bp, Artificial Sequence
  derived and/or modified sequence
atgcccttcgccgaggataagacctacaaatacatatgtcgcaatttctccaatttctgtaatgtagacgttgttgagatcctcccatacctaccttgcttaactgcccgggaccaggacaggcttcgcgccacatgtaccctgtccggaaatcgtgacactctctggcatttattcaatactcttcagctgccaacctgggctggcgaggaaactcctggtgggcaaagctctggacgcggattagacttcagcagcctcacttcaggtgctgtgtggctgtggcaaatgtcagacttctggtcgtgcttctcaacatggactgtcagcatttggcttatcttgcattgggtgctactgaggctgaatcttcaagtcttcgccaagtgtctcgcccagagtaaatggccccttctcttgcctagtctgtcctgtccaacatggtag

SEQ ID NO: 205498 - DNA, 375 bp, Artificial Sequence
  derived and/or modified sequence
atgcccttcgctgaggataagacgtataagtatatttgccgaaacttcagcaatttttgtaatgtggacgtagttgaaatcttgccttacctgccatgcctgaccgctcgcgaccaggatcgccttagggccacgtgtactttgagcgggaatcgggacaccctttggcatctgttcaacacgcttcaaagacgacctggctgggtagagtacttcattgcggccctccggggttgtgaactcgtcgatctggctgatgaggtagctagcgtttaccagtcctaccagccacagtttagagcttctccagccgacgcacaacctcaaagccaccctaaggaatcacgttggtggccaccaggagtcctcctttag

SEQ ID NO: 205499 - DNA, 1623 bp, Artificial Sequence
  derived and/or modified sequence
atgcccttcgcagaggataaaacttacaagtatatctgtcgcaatttttcaaatttctgcaatgttgacgtggtggagattctgccgtatttgccatgcctgacggccagagaccaggaccggttgagagccacgtgtacactttcggggaacagagatacactttggcacctctttaacacactccagcgtagacccgggtgggtggaatattttatagccgcgctgcggggatgcgagcttgtcgatttagccgacgaagtggccagcgtctaccagtcctatcagccacgtacgagcgacaggccacccgaccccctggagcctccttctttgcctgctgaaaggccaggtcctcctacccccgcagccgcacatagcatcccatataactcctgtcgcgagaaagagccatcatacccaatgccagttcaggaaactcaggcacccgagtctccaggcgagaatagcgagcaagctttgcagactctcagcccacgcgctattccaagaaatccagatggcgggcctcttgagtcatctagcgatctggccgcactgtctcccctgacctcatccgggcaccaggagcaggataccgagctgggcagcactcacaccgcaggagccacttcttctctgactccttcccgggggccagtatccccatcagtgtcattccaacctcttgcgcgcagtacaccccgggcttcccgccttccgggcccaactggatccgtcgtatctaccggaaccagttttagtagttcttcccccgggcttgcaagtgcaggagccgccgaagggaaacagggcgccgagagcgatcaggctgagcccatcatttgctccagcggagctgaagccccagccaatagccttccgagcaaagtgccaaccacattaatgccagtgaacacagtggctttgaaggttcccgcaaatcccgcctccgtctcaaccgtgccatctaaactccctacatcatcaaagcccccaggcgccgttccatctaacgctctgaccaaccccgccccatccaaactgccaatcaattccacccgcgcaggcatggttccctccaaagtacccacaagtatggtgctcaccaaggtgtccgcttcgactgtgccgacggacgggagttcaaggaatgaggaaactccagccgcgccgactccagcaggggccacaggaggctcttccgcttggctggacagcagcagtgagaaccgagggcttggcagcgagctgtcgaagccaggagtcttagcctctcaggtcgattctcctttcagcgggtgtttcgaagatctggcaatttctgccagtacgtctctgggcatgggcccttgccacggacccgaggagaatgagtacaagtccgagggcactttcgggatccacgtggccgagaacccctcaatccaactgctcgaagggaaccccggaccacccgccgacccggacggcggcccaagaccacaggcggaccgtaagtttcaggagagagaggtcccatgccaccgaccaagcccaggggcactgtggctgcaggtagctgtaaccggggttcttgtggtgacactgttagtggtactatacaggagaagactccactag

SEQ ID NO: 205500 - DNA, 447 bp, Artificial Sequence
  derived and/or modified sequence
atgccctttgctgaggacaagacctacaagtacatctgcaggaacttcagcaacttctgcaatgtggatgtggtggagatcctgccctacctgccctgcctgacagcccgggaccaggaccggctgcgggccacctgcaccctgagcggcaacagagacaccctgtggcacctgttcaacaccctgcagctgcccacctgggccggggaggagaccccaggcggccagagcagcggccggggcctggacttcagcagcctgaccagcggggctgtgtggctgtggcagatgtctgacttctggagctgcttcagcacctggacagtgtccatctggctgatcctgcactgggtgctgctgcggctgaacctgcaggtgtttgccaagtgcctggcccagagcaagtggcccctgctgctgcccagcctgagctgccccacctggtag

SEQ ID NO: 205501 - DNA, 375 bp, Artificial Sequence
  derived and/or modified sequence
atgccctttgctgaggacaagacctacaagtacatctgcaggaacttcagcaacttctgcaatgtggatgtggtggagatcctgccctacctgccctgcctgacagcccgggaccaggaccggctgcgggccacctgcaccctgagcggcaacagagacaccctgtggcacctgttcaacaccctgcagaggcggcccggctgggtggagtacttcatcgccgccctgcggggctgtgagctggtggacctggctgatgaggtggcctctgtgtaccagagctaccagccccagttccgggccagccctgcagatgcccagccccagagccaccccaaggagagccgctggtggcccccaggagtgctgctgtag

SEQ ID NO: 205502 - DNA, 1623 bp, Artificial Sequence
  derived and/or modified sequence
atgccctttgctgaggacaagacctacaagtacatctgcaggaacttcagcaacttctgcaatgtggatgtggtggagatcctgccctacctgccctgcctgacagcccgggaccaggaccggctgcgggccacctgcaccctgagcggcaacagagacaccctgtggcacctgttcaacaccctgcagaggcggcccggctgggtggagtacttcatcgccgccctgcggggctgtgagctggtggacctggctgatgaggtggcctctgtgtaccagagctaccagcccaggaccagtgaccggcccccagaccccctggagccccccagcctgcctgctgagaggcctggcccccccaccccagctgctgcccacagcatcccctacaacagctgccgggagaaggagcccagctaccccatgcctgtgcaggagacccaggcccctgagagccctggagaaaattctgagcaggccctgcagaccctgagcccccgggccatccccagaaatccagatggcggccccctggagagcagcagtgacctggccgccctgagccccctgaccagcagcggccaccaggagcaggacacagagctgggcagcacccacacagctggggccaccagcagcctgacccccagccggggccctgtgagccccagcgtgtccttccagcccctggcccggagcaccccccgggccagccggctgcccggccccaccggctctgtggtgtccacaggcaccagcttcagcagcagcagccctggcctggccagcgctggagctgctgagggcaagcagggcgctgagagtgaccaggccgagcccatcatctgcagcagtggagctgaggccccagccaacagcctgcccagcaaggtgcccaccaccctgatgcctgtgaacacagtggccctgaaggtgcctgccaacccagcctctgtgtccacagtgcccagcaagctgcccaccagcagcaagcccccaggagctgtgcccagcaatgccctgaccaacccagcccccagcaagctgcccatcaacagcacccgggccggcatggtgcccagcaaggtgcccacctccatggtgctgaccaaggtgtctgccagcacagtgcccacagatggcagcagcagaaatgaggagaccccagctgcccccaccccagctggggccaccggcggcagcagcgcctggctggacagcagcagcgagaacagaggcctgggcagcgagctgagcaagccaggagtgctggccagccaggtggacagccccttcagcggctgctttgaggacctggccatcagcgccagcaccagcctgggcatgggcccctgccacggcccagaagaaaatgagtacaagtctgagggcaccttcggcatccacgtggccgagaaccccagcatccagctgctggagggcaaccctggccccccagctgaccctgatggcggcccccggccccaggccgacaggaagttccaggagcgggaggtgccctgccaccggcccagccctggggccctgtggctgcaggtggccgtgactggagtgctggtggtgaccctgctggtggtgctgtacagaagaaggctgcactag

SEQ ID NO: 205503 - DNA, 575 bp, Artificial Sequence
  derived and/or modified sequence
gcgggaagggtcctgggccccgggcggcggtcgccaggtctcagggccgggggtacccgagtctcgtttcctctcagtccatccacccttcatggggccagagccctctctccagaatctgagcagcaatgccgtttgctgaagacaagacctataagtatatctgccgcaatttcagcaatttttgcaatgtggatgttgtagagattctgccttacctgccctgcctcacagcaagagaccaggatcgactgcgggccacctgcacactctcagggaaccgggacaccctctggcatctcttcaatacccttcagctccctacatgggctggggaggagacacctggtgggcagagctcaggcagaggtttggatttcagctccctcacttccggggctgtgtggctttggcagatgtcagacttctggtcttgcttctccacgtggacagtgagtatctggctcattcttcactgggttcttctgagattgaacctacaggtgtttgccaagtgcctggcccagagcaagtggccactgcttctcccatctctctcctgcccaacctggtag

SEQ ID NO: 205504 - DNA, 1707 bp, Artificial Sequence
  derived and/or modified sequence
gctgcgggaagggtcctgggccccgggcggcggtcgccaggtctcagggccgggggtacccgagtctcgtttcctctcagtccatccacccttcatggggccagagccctctctccagaatctgagcagcaatgccgtttgctgaagacaagacctataagtatatctgccgcaatttcagcaatttttgcaatgtggatgttgtagagattctgccttacctgccctgcctcacagcaagagaccagggacctcggaccgtcccccagacccactggagccaccgtcacttcctgctgagaggccagggccccccacacctgctgcggcccacagcatcccctacaacagctgcagagagaaggagccaagttaccccatgcctgtccaggagacccaggcgccagagtccccaggagagaattcagagcaagccctgcagacgctcagccccagagccatcccaaggaatccagatggtggccccctggagtcctcctctgacctggcagccctcagccctctgacctccagcgggcatcaggagcaggacacagaactgggcagtacccacacagcaggtgcgacctccagcctcacaccatcccgtgggcctgtgtctccatctgtctccttccagcccctggcccgttccacccccagggcaagccgcttgcctggacccacagggtcagttgtatctactggcacctccttctcctcctcatcccctggcttggcctctgcaggggctgcagagggtaaacagggtgcagagagtgaccaggccgagcctatcatctgctccagtggggcagaggcacctgccaactctctgccctccaaagtgcctaccaccttgatgcctgtgaacacagtggccctgaaagtgcctgccaacccagcatctgtcagcacagtgccctccaagttgccaactagctcaaagccccctggtgcagtgccttctaatgcgctcaccaatccagcaccatccaaattgcccatcaactcaacccgtgctggcatggtgccatccaaagtgcctactagcatggtgctcaccaaggtgtctgccagcacagtccccactgacgggagcagcagaaatgaggagaccccagcagctccaacacccgccggcgccactggaggcagctcagcctggctagacagcagctctgagaataggggccttgggtcggagctgagtaagcctggcgtgctggcatcccaggtagacagcccgttctcgggctgcttcgaggatcttgccatcagtgccagcacctccttgggcatggggccctgccatggcccagaggagaatgagtataagtccgagggcacctttgggatccacgtggctgagaaccccagcatccagctcctggagggcaaccctgggccacctgcggacccggatggcggccccaggccacaagccgaccggaagttccaggagagggaggtgccatgccacaggccctcacctggggctctgtggctccaggtggctgtgacaggggtgctggtagtcacactcctggtggtgctgtaccggcggcgtctgcactagtgaagccctgggctcttcccaccacccatctgttccgttcctgcagtacacctggcccctctccgaagccccttgtccctttcttggggattgtggaggctgggtcagaggggagttaagggactgca

SEQ ID NO: 205505 - DNA, 4237 bp, Artificial Sequence
  derived and/or modified sequence
gcgggaagggtcctgggccccgggcggcggtcgccaggtctcagggccgggggtacccgagtctcgtttcctctcagtccatccacccttcatggggccagagccctctctccagaatctgagcagcaatgccgtttgctgaagacaagacctataagtatatctgccgcaatttcagcaatttttgcaatgtggatgttgtagagattctgccttacctgccctgcctcacagcaagagaccaggatcgactgcgggccacctgcacactctcagggaaccgggacaccctctggcatctcttcaatacccttcagcggcggcccggctgggtggagtacttcattgcggcactgaggggctgtgagctagttgatctcgcggacgaagtggcctctgtctaccagagctaccagcctcggacctcggaccgtcccccagacccactggagccaccgtcacttcctgctgagaggccagggccccccacacctgctgcggcccacagcatcccctacaacagctgcagagagaaggagccaagttaccccatgcctgtccaggagacccaggcgccagagtccccaggagagaattcagagcaagccctgcagacgctcagccccagagccatcccaaggaatccagatggtggccccctggagtcctcctctgacctggcagccctcagccctctgacctccagcgggcatcaggagcaggacacagaactgggcagtacccacacagcaggtgcgacctccagcctcacaccatcccgtgggcctgtgtctccatctgtctccttccagcccctggcccgttccacccccagggcaagccgcttgcctggacccacagggtcagttgtatctactggcacctccttctcctcctcatcccctggcttggcctctgcaggggctgcagagggtaaacagggtgcagagagtgaccaggccgagcctatcatctgctccagtggggcagaggcacctgccaactctctgccctccaaagtgcctaccaccttgatgcctgtgaacacagtggccctgaaagtgcctgccaacccagcatctgtcagcacagtgccctccaagttgccaactagctcaaagccccctggtgcagtgccttctaatgcgctcaccaatccagcaccatccaaattgcccatcaactcaacccgtgctggcatggtgccatccaaagtgcctactagcatggtgctcaccaaggtgtctgccagcacagtccccactgacgggagcagcagaaatgaggagaccccagcagctccaacacccgccggcgccactggaggcagctcagcctggctagacagcagctctgagaataggggccttgggtcggagctgagtaagcctggcgtgctggcatcccaggtagacagcccgttctcgggctgcttcgaggatcttgccatcagtgccagcacctccttgggcatggggccctgccatggcccagaggagaatgagtataagtccgagggcacctttgggatccacgtggctgagaaccccagcatccagctcctggagggcaaccctgggccacctgcggacccggatggcggccccaggccacaagccgaccggaagttccaggagagggaggtgccatgccacaggccctcacctggggctctgtggctccaggtggctgtgacaggggtgctggtagtcacactcctggtggtgctgtaccggcggcgtctgcactagtgaagccctgggctcttcccaccacccatctgttccgttcctgcagtacacctggcccctctccgaagccccttgtccctttcttggggattgtggaggctgggtcagaggggagttaagggactgcaggcctggcagcaggacatgccttggctgaaccaagtcctgagagcagcatctctgtccccacggtgccttgtgtgggtccccgtccttggctttctgggtcctgggctgcccccagtgctccagaccttccccactggcaatccaggttatcatccatgtcctccagaggagcttcctcctccaggcctcagccctgttggcccaggtggagcaggagggaccactggaacatgtggtgcttgggaatgcctctcctgttgcattggtccctgaaggcctcagggcaggtatgtggtgtgtgggcgactccacaagacctgcctcccatcctggcagcccagcctgagaccgttgcattgaggcaggcaggagcggcagggtggctgctctccaggagcccaactgccttgagttcctgccccactgggccccctcccctgctgggcaatcctgggaaggtctggaggttcctgtggacctcagggaagccaggggcagctgtcaggcctgaggaagacctgtggagctcctctccagcctcctctttccctcccctctggtctccattctcttcagctccctacatgggctggggaggagacacctggtgggcagagctcaggcagaggtttggatttcagctccctcacttccggggctgtgtggctttggcagatgtcagacttctggtcttgcttctccacgtggacagtgagtatctggctcattcttcactgggttcttctgagattgaacctacaggtgtttgccaagtgcctggcccagagcaagtggccactgcttctcccatctctctcctgcccaacctggtagagctgagggcatgagaggcagagtgcacagtggtcaagggtgcagctctgcagcacaggcagcctaggcctgcgtcccaacctgcctctcaccagctctgtgaccttgggcaagggatttatctgtctgtcccttagttttctcacctgtaaaaggaggataagtatatatatatatttcccagtgttgtgaagattaaaggagtttatcgatgtaggtcttaggatgagtcctggcatttaccaagggttggatatatgttattatcactattaagtgttgagggtccaggcatgctgggcaacagggaccccatctctacaaaaaagtttaaaaaattagccaggcgtggtggtgcacctgtcgtcttagctacttgggaggctgaggtgggaggatcacttgagcccagaagcttgaagctgcagtgagctaggatcgtgccactgcactccaacctgggtgagagagcgagaccctgtctcaagaaaaagaaaaatgcagagaaacaggagtcttggctactcctttagaggcagactcagaccctcctgcctcacagctttatctttgtatttgccccttactttatcttgtgccttgagaaattgctggggagagaggtatgtccactgggcagctgtacaggatggaggatatagggcgtttccactcccagcagccaggttccctcaccccaagctcacccactgttggggagattatctacaataacaccagaaacacattggggtggattgggggtatccttatgggttcttttcagggaaccattgctggacaaggcacaggagccacctccatttctgagctctgcaagggacaagaactagagccatcaggggctgggctcactgtggccccaccccaagccgtcagcctccagggatctacaccctgccttggctgctacagctttttcactccactgccctaggggagttcagcaacctaatgatctctatctctgaacatctcttcatcccatgctccaagtccagcaacctgcaccctggaaccaggagtggaccctacccgagctgtctgtattaatccccatcccccaccaccaatcttaaaaagccctctgtccccctaccctaaaccccagttaggtacccatgctgggcaggtcagttaacaatttatgcacaggtactagttttattgtattaccgttccagggtagctttgaaaaaagtatctcaaaaaggcaacatgggccgagcgcagtggctcacgcctgtaatcccagcactttgggaggccaaggtgggcagatcgcctgaggtctggagttcaagaccagcctggccaacagggtgaaaccccgtctctacaaaaataagaaaattagccaggtgtagtggcagacgtctgtaatcccagctattcaggaggctgaggcacgagaattccatgaacccaggatgcggaggttgcagtgagccgagattgtgccactgcgctccagcctgggcgacagagtggtattctgtttc

SEQ ID NO: 205506 - DNA, 447 bp, Artificial Sequence
  derived and/or modified sequence
atgcccttcgccgaggacaagacctacaagtacatctgccggaacttttccaacttctgtaatgtcgacgttgtggagatactgccctacctgccttgtcttacagctcgcgaccaagatcggctgcgcgctacatgcacactatccggaaacagagatacgctgtggcatctgttcaacacactccagttaccaacctgggccggagaagaaacaccaggcggtcagtcatccggaaggggccttgacttttcatcactgacatcgggagccgtttggctctggcagatgtctgacttttggtcatgtttctcgacgtggacagtgtcaatctggttgatcctgcattgggtactgctccgcttgaacttgcaggtattcgcgaaatgcctcgctcagagtaagtggccactgcttctgccatccctctcgtgtcctacctggtag

SEQ ID NO: 205507 - DNA, 375 bp, Artificial Sequence
  derived and/or modified sequence
atgcccttcgccgaggacaagacctacaagtacatctgccggaacttcagcaacttttgtaacgtggacgtggtcgagatcctgccttatctgccttgtctgacagcgcgcgatcaggaccgtctgagagcaacctgcaccctgtctggaaaccgggataccttatggcacctcttcaacactcttcaacgacgaccaggctgggtggagtacttcattgccgccctgcggggctgcgagctggtggacttagcagacgaagtcgccagcgtctatcagtcttatcaaccacagttcagggcgtcaccagcagacgcgcagcctcagagccatcctaaggaatcacggtggtggcctcctggagtccttctttag

SEQ ID NO: 205508 - DNA, 1623 bp, Artificial Sequence
  derived and/or modified sequence
atgcccttcgccgaggacaagacctacaagtacatctgccggaactttagtaacttttgtaatgtggacgttgttgagatccttccctatctgccatgcctgacggcacgcgaccaggaccgattgcgtgcgacctgtactctatcgggaaatagggacactctgtggcatctgtttaacactctccagcgtaggccaggctgggtcgagtatttcatcgccgctctgcggggttgtgagctggtggacttagccgatgaagtggcttcagtgtatcagtcttaccaaccgaggacgtccgaccggccacccgacccactggaaccgcctagccttccagccgaaaggcccggccccccaacccctgccgcagcacactctatcccttataattcatgccgtgaaaaggagccctcgtatcctatgccagtgcaggaaacccaagcccccgagtcgcctggtgaaaactcagaacaggcactgcagacactgtctcctagagccatcccacgaaaccccgatggcggacctctcgagagcagcagcgatcttgcagccttgtctccgttgaccagtagtggtcatcaggagcaagataccgaactggggagtacccacacagctggcgctacctcttccctgaccccgagccgggggcccgtgagcccgagcgtgagctttcagccccttgctagaagtacacctagggcctctcggctgcctggcccgactggaagcgtggtgagcacaggtacatcattcagtagctcaagcccaggtcttgcctcagctggagctgccgagggtaaacagggcgctgaaagcgaccaggccgagcctatcatctgctcctcaggcgctgaagctcccgcaaactcactgccttctaaagtgcctacaacactgatgcctgtcaataccgtggccctgaaggtgccagccaaccccgcctctgtgagcaccgtgccttccaagctaccaacctcgtcaaaacccccaggggctgttccgtcaaacgcccttacgaacccggcaccctccaaactgccaatcaattccacacgggccggcatggttccttcaaaagtgcctacgagtatggtactgacgaaagtgtccgcctccaccgtacctaccgatggctcctcaaggaatgaagaaactcccgccgccccgactcccgccggcgccacaggcggttcttccgcctggctggatagctcttccgaaaatagaggtttaggctccgaactgtcgaaacccggcgttttggcctcccaggtcgacagtccattctctggatgttttgaggatttagctattagcgccagtacctcactcgggatgggcccgtgccatggaccagaggaaaatgagtacaaaagcgagggaacttttgggatccatgtggccgaaaatccctccatacagctgttggagggcaatcctgggccacccgcagaccctgacggagggccccgcccgcaagccgataggaaatttcaggaacgagaagtgccctgccacagaccttctcctggagcgctgtggctccaggtggcagttaccggggtcctggttgtaacacttctcgttgtactatatcgtagacggttgcattag

SEQ ID NO: 205509 - DNA, 447 bp, Artificial Sequence
  derived and/or modified sequence
atgcccttcgccgaggacaaaacctataagtacatctgtagaaacttcagcaacttttgtaatgtggacgtcgtggaaatcctgccctatctgccttgccttactgctagagaccaggacaggctgagggcaacttgtacactctccgggaacagagatactctttggcatttgtttaatactctgcagctcccaacttgggcaggcgaggaaacccccggaggacagtcctccggcagagggctggatttctccagtctcacttccggagcagtttggctgtggcagatgtctgacttctggagctgtttctccacttggacagtttcgatctggttaattctgcactgggtgttactgagattaaacttacaagtgttcgctaaatgtctggcccagagcaagtggccactgctactgccatccctctcatgcccaacgtggtag

SEQ ID NO: 205510 - DNA, 375 bp, Artificial Sequence
  derived and/or modified sequence
atgccttttgccgaggataagacgtacaagtatatatgtcgcaatttctcaaatttttgcaatgttgatgtcgtcgagatcttaccgtacctgccttgtctgactgcacgcgaccaagacagactgcgggcaacatgtaccttgagtgggaacagagacacactctggcacctgttcaacaccctgcagcggaggcccggatgggtagaatattttatcgcagcgctgcgaggctgcgaattagtggatctcgccgacgaggttgccagcgtgtatcagagctatcagccacagttcagagcctctccagctgatgcccagccacaatctcacccaaaagagtcaagatggtggccgcctggtgtattactatag

SEQ ID NO: 205511 - DNA, 1623 bp, Artificial Sequence
  derived and/or modified sequence
atgccattcgccgaggataagacctataagtatatctgccgtaatttctcaaatttctgtaacgtggatgtggtggagattctaccctatctgccctgtctgacagccagagatcaggatcgccttagagctacctgcaccctcagtgggaacagggatactctttggcatcttttcaatacattgcaaagaagacccggatgggttgaatatttcattgctgccctgagaggctgcgagttagtggacctggcggacgaggtggcaagcgtttatcagtcctaccaacccagaacatctgatagaccacctgatccactggaaccacccagtctgccagctgaacgaccagggccaccaacccccgcagctgctcactccattccgtacaactcttgccgagaaaaggagccttcgtaccctatgccggtgcaggaaacacaagcgccagaatcacccggagagaattctgagcaggcactgcaaactctcagcccaagggctatccctcgcaacccagatggaggacctttagagagctcaagtgacttggccgcactgagtcctctcacatcaagtggccaccaagagcaggatacggagctgggctccacccatacggccggtgctacgtcatccctcactcctagcagggggccagtttccccaagcgtttcctttcagccgctcgctagatctacacctcgtgccagccgactgcctggtcctacagggtccgtcgtgtctactggtaccagcttctctagttcaagtcctggccttgcttccgccggtgcagctgaggggaagcagggagctgaatccgaccaggcagagcctataatttgcagcagcggcgctgaagcacccgctaactccctcccttctaaggtcccaactactttaatgcccgtaaatacagtcgcattgaaggttccagctaatcccgcttccgtgtcaacagtgcccagtaaattgcccacctcttcaaaacccccaggcgctgtgccatctaatgctctgaccaaccctgcacctagcaagttgcccatcaactctactcgggctggaatggtcccctcaaaggtgccaactagcatggtgctgaccaaagtctcagcttccacggtaccaacggacggctcctctaggaatgaggagacacctgcggcacccacaccagccggagccacaggtgggtcatccgcctggcttgacagctcttccgaaaaccggggtcttgggtccgagctaagtaagccaggtgtcttggcttcccaggtcgactccccatttagcggttgttttgaagacttagccattagcgcctccactagcctcggaatgggcccatgtcatgggccagaggaaaatgagtacaaatcagaagggaccttcggaatccacgtggcagagaaccccagtatccaattgcttgagggtaatccgggaccccctgccgatcccgatggaggaccgcgtccacaggcggaccggaagtttcaggagcgggaagtgccatgccaccgtccctctcctggtgctttgtggctccaggtggctgtaactggggttctagtagtgacactattagtggtgctgtaccggagacgcctgcattag

SEQ ID NO: 205512 - DNA, 447 bp, Artificial Sequence
  derived and/or modified sequence
atgcccttcgccgaggacaagacctacaagtacatctgcagaaacttcagcaacttctgcaacgtggacgtggtggagatcctgccctacctgccctgcctgaccgccagagaccaggacagactgagagccacctgcaccctgagcggcaacagagacaccctgtggcacctgttcaacaccctgcagctgcccacctgggccggcgaggagacccccggcggccagagcagcggcagaggcctggacttcagcagcctgaccagcggcgccgtgtggctgtggcagatgagcgacttctggagctgcttcagcacctggaccgtgagcatctggctgatcctgcactgggtgctgctgagactgaacctgcaggtgttcgccaagtgcctggcccagagcaagtggcccctgctgctgcccagcctgagctgccccacctggtag

SEQ ID NO: 205513 - DNA, 375 bp, Artificial Sequence
  derived and/or modified sequence
atgcccttcgccgaggacaagacctacaagtacatctgcagaaacttcagcaacttctgcaacgtggacgtggtggagatcctgccctacctgccctgcctgaccgccagagaccaggacagactgagagccacctgcaccctgagcggcaacagagacaccctgtggcacctgttcaacaccctgcagagaagacccggctgggtggagtacttcatcgccgccctgagaggctgcgagctggtggacctggccgacgaggtggccagcgtgtaccagagctaccagccccagttcagagccagccccgccgacgcccagccccagagccaccccaaggagagcagatggtggccccccggcgtgctgctgtag

SEQ ID NO: 205514 - DNA, 1623 bp, Artificial Sequence
  derived and/or modified sequence
atgcccttcgccgaggacaagacctacaagtacatctgcagaaacttcagcaacttctgcaacgtggacgtggtggagatcctgccctacctgccctgcctgaccgccagagaccaggacagactgagagccacctgcaccctgagcggcaacagagacaccctgtggcacctgttcaacaccctgcagagaagacccggctgggtggagtacttcatcgccgccctgagaggctgcgagctggtggacctggccgacgaggtggccagcgtgtaccagagctaccagcccagaaccagcgacagaccccccgaccccctggagccccccagcctgcccgccgagagacccggcccccccacccccgccgccgcccacagcatcccctacaacagctgcagagagaaggagcccagctaccccatgcccgtgcaggagacccaggcccccgagagccccggcgagaacagcgagcaggccctgcagaccctgagccccagagccatccccagaaaccccgacggcggccccctggagagcagcagcgacctggccgccctgagccccctgaccagcagcggccaccaggagcaggacaccgagctgggcagcacccacaccgccggcgccaccagcagcctgacccccagcagaggccccgtgagccccagcgtgagcttccagcccctggccagaagcacccccagagccagcagactgcccggccccaccggcagcgtggtgagcaccggcaccagcttcagcagcagcagccccggcctggccagcgccggcgccgccgagggcaagcagggcgccgagagcgaccaggccgagcccatcatctgcagcagcggcgccgaggcccccgccaacagcctgcccagcaaggtgcccaccaccctgatgcccgtgaacaccgtggccctgaaggtgcccgccaaccccgccagcgtgagcaccgtgcccagcaagctgcccaccagcagcaagccccccggcgccgtgcccagcaacgccctgaccaaccccgcccccagcaagctgcccatcaacagcaccagagccggcatggtgcccagcaaggtgcccaccagcatggtgctgaccaaggtgagcgccagcaccgtgcccaccgacggcagcagcagaaacgaggagacccccgccgcccccacccccgccggcgccaccggcggcagcagcgcctggctggacagcagcagcgagaacagaggcctgggcagcgagctgagcaagcccggcgtgctggccagccaggtggacagccccttcagcggctgcttcgaggacctggccatcagcgccagcaccagcctgggcatgggcccctgccacggccccgaggagaacgagtacaagagcgagggcaccttcggcatccacgtggccgagaaccccagcatccagctgctggagggcaaccccggcccccccgccgaccccgacggcggccccagaccccaggccgacagaaagttccaggagagagaggtgccctgccacagacccagccccggcgccctgtggctgcaggtggccgtgaccggcgtgctggtggtgaccctgctggtggtgctgtacagaagaagactgcactag

SEQ ID NO: 205515 - protein, 1512 aa, Artificial Sequence
  derived and/or modified sequence
MSVNISTAGKGVDPNTVDTYDSGDDWEIGVGNLIIDLDADLEKDRQKFEMNNSTTTTSSSNSKDCGGPASSGAGATAALADGLKFASVQASAPQGNSHKETSKSKVKRSKTSKDANKSLPSAALYGIPEISSTGKRQEVQGRPGEATGMNSALGQSVSSGGSGNPNSNSTSTSTSAATAGAGSCGKSKEEKPGKSQSSRGAKRDKDAGKSRKDKHDLLQGHQNGSGSQAPSGGHLYGFGAKSNGGGASPFHCGGTGSGSVAAAGEVSKSAPDSGLMGNSMLVKKEEEEEESHRRIKKLKTEKVDPLFTVPAPPPPISSSLTPQILPSYFSPSSSNIAAPVEQLLVRTRSVGVNTCEVGVVTEPECLGPCEPGTSVNLEGIVWHETEEGVLVVNVTWRNKTYVGTLLDCTKHDWAPPRFCESPTSDLEMRGGRGRGKRARSAAAAPGSEASFTESRGLQNKNRGGANGKGRRGSLNASGRRTPPNCAAEDIKASPSSTNKRKNKPPMELDLNSSSEDNKPGKRVRTNSRSTPTTPQGKPETTFLDQGCSSPVLIDCPHPNCNKKYKHINGLRYHQAHAHLDPENKLEFEPDSEDKISDCEEGLSNVALECSEPSTSVSAYDQLKAPASPGAGNPPGTPKGKRELMSNGPGSIIGAKAGKNSGKKKGLNNELNNLPVISNMTAALDSCSAADGSLAAEMPKLEAEGLIDKKNLGDKEKGKKATNCKTDKNLSKLKSARPIAPAPAPTPPQLIAIPTATFTTTTTGTIPGLPSLTTTVVQATPKSPPLKPIQPKPTIMGEPITVNPALVSLKDKKKKEKRKLKDKEGKETGSPKMDAKLGKLEDSKGASKDLPGHFLKDHLNKNEGLANGLSESQESRMASIKAEADKVYTFTDNAPSPSIGSASRLECSTLVNGQAPMAPLHVLTQNGAESSAAKTSSPAYSDISDAADDGGSDSRSEGMRSKASSPSDIISSKDSVVKGHSSTTAQSSQLKESHSPYYHSYDPYYSPSYMHPGQVGAPAAGNSGSTQGMKIKKESEEDAEKKDKAEQLDSKKVDHNSASLQPQHQSVITQRHPALAQSLYYGQYAYGLYMDQKSLMATSPAYRQQYEKYYEDQRLAEQKMAQTGRGDCERKSELPLKELGKEETKQKNMPSATISKAPSTPEPNKNHSKLGPSVPNKTEETGKSQLLSNHQQQLQADSFKAKQMENHQLIKEAVEMKSVMDSMKQTGVDPTSRFKQDPDSRTWHHYVYQPKYLDQQKSEELDREKKLKEDSPRKTPNKESGVPSLPVSLTSIKEEPKEAKHPDSQSMEESKLKNDDRKTPVNWKDSRGTRVAVSSPMSQHQSYIQYLHAYPYPQMYDPSHPAYRAVSPVLMHSYPGAYLSPGFHYPVYGKMSGREETEKVNTSPSVNTKTTTESKALDLLQQHANQYRSKSPAPVEKATAEREREAERERDRHSPFGQRHLHTHHHTHVGMGYPLIPGQYDPFQGLTSAALVASQQVAAQASASGMFPGQRRE

SEQ ID NO: 205516 - protein, 1085 aa, Artificial Sequence
  derived and/or modified sequence
MRGGRGRGKRARSAAAAPGSEASFTESRGLQNKNRGGANGKGRRGSLNASGRRTPPNCAAEDIKASPSSTNKRKNKPPMELDLNSSSEDNKPGKRVRTNSRSTPTTPQGKPETTFLDQGCSSPVLIDCPHPNCNKKYKHINGLRYHQAHAHLDPENKLEFEPDSEDKISDCEEGLSNVALECSEPSTSVSAYDQLKAPASPGAGNPPGTPKGKRELMSNGPGSIIGAKAGKNSGKKKGLNNELNNLPVISNMTAALDSCSAADGSLAAEMPKLEAEGLIDKKNLGDKEKGKKATNCKTDKNLSKLKSARPIAPAPAPTPPQLIAIPTATFTTTTTGTIPGLPSLTTTVVQATPKSPPLKPIQPKPTIMGEPITVNPALVSLKDKKKKEKRKLKDKEGKETGSPKMDAKLGKLEDSKGASKDLPGHFLKDHLNKNEGLANGLSESQESRMASIKAEADKVYTFTDNAPSPSIGSASRLECSTLVNGQAPMAPLHVLTQNGAESSAAKTSSPAYSDISDAADDGGSDSRSEGMRSKASSPSDIISSKDSVVKGHSSTTAQSSQLKESHSPYYHSYDPYYSPSYMHPGQVGAPAAGNSGSTQGMKIKKESEEDAEKKDKAEQLDSKKVDHNSASLQPQHQSVITQRHPALAQSLYYGQYAYGLYMDQKSLMATSPAYRQQYEKYYEDQRLAEQKMAQTGRGDCERKSELPLKELGKEETKQKNMPSATISKAPSTPEPNKNHSKLGPSVPNKTEETGKSQLLSNHQQQLQADSFKAKQMENHQLIKEAVEMKSVMDSMKQTGVDPTSRFKQDPDSRTWHHYVYQPKYLDQQKSEELDREKKLKEDSPRKTPNKESGVPSLPVSLTSIKEEPKEAKHPDSQSMEESKLKNDDRKTPVNWKDSRGTRVAVSSPMSQHQSYIQYLHAYPYPQMYDPSHPAYRAVSPVLMHSYPGAYLSPGFHYPVYGKMSGREETEKVNTSPSVNTKTTTESKALDLLQQHANQYRSKSPAPVEKATAEREREAERERDRHSPFGQRHLHTHHHTHVGMGYPLIPGQYDPFQGLTSAALVASQQVAAQASASGMFPGQRRE

SEQ ID NO: 205517 - DNA, 4539 bp, Artificial Sequence
  derived and/or modified sequence
atgagcgtgaacatcagcaccgccggcaagggcgtggaccccaacaccgtggacacctacgacagcggcgacgactgggagatcggcgtgggcaacctgatcatcgacctggacgccgacctggagaaggacagacagaagttcgagatgaacaacagcaccaccaccaccagcagcagcaacagcaaggactgcggcggccccgccagcagcggcgccggcgccaccgccgccctggccgacggcctgaagttcgccagcgtgcaggccagcgccccccagggcaacagccacaaggagaccagcaagagcaaggtgaagagaagcaagaccagcaaggacgccaacaagagcctgcccagcgccgccctgtacggcatccccgagatcagcagcaccggcaagagacaggaggtgcagggcagacccggcgaggccaccggcatgaacagcgccctgggccagagcgtgagcagcggcggcagcggcaaccccaacagcaacagcaccagcaccagcaccagcgccgccaccgccggcgccggcagctgcggcaagagcaaggaggagaagcccggcaagagccagagcagcagaggcgccaagagagacaaggacgccggcaagagcagaaaggacaagcacgacctgctgcagggccaccagaacggcagcggcagccaggcccccagcggcggccacctgtacggcttcggcgccaagagcaacggcggcggcgccagccccttccactgcggcggcaccggcagcggcagcgtggccgccgccggcgaggtgagcaagagcgcccccgacagcggcctgatgggcaacagcatgctggtgaagaaggaggaggaggaggaggagagccacagaagaatcaagaagctgaagaccgagaaggtggaccccctgttcaccgtgcccgccccccccccccccatcagcagcagcctgaccccccagatcctgcccagctacttcagccccagcagcagcaacatcgccgcccccgtggagcagctgctggtgagaaccagaagcgtgggcgtgaacacctgcgaggtgggcgtggtgaccgagcccgagtgcctgggcccctgcgagcccggcaccagcgtgaacctggagggcatcgtgtggcacgagaccgaggagggcgtgctggtggtgaacgtgacctggagaaacaagacctacgtgggcaccctgctggactgcaccaagcacgactgggccccccccagattctgcgagagccccaccagcgacctggagatgagaggcggcagaggcagaggcaagagagccagaagcgccgccgccgcccccggcagcgaggccagcttcaccgagagcagaggcctgcagaacaagaacagaggcggcgccaacggcaagggcagaagaggcagcctgaacgccagcggcagaagaaccccccccaactgcgccgccgaggacatcaaggccagccccagcagcaccaacaagagaaagaacaagccccccatggagctggacctgaacagcagcagcgaggacaacaagcccggcaagagagtgagaaccaacagcagaagcacccccaccaccccccagggcaagcccgagaccaccttcctggaccagggctgcagcagccccgtgctgatcgactgcccccaccccaactgcaacaagaagtacaagcacatcaacggcctgagataccaccaggcccacgcccacctggaccccgagaacaagctggagttcgagcccgacagcgaggacaagatcagcgactgcgaggagggcctgagcaacgtggccctggagtgcagcgagcccagcaccagcgtgagcgcctacgaccagctgaaggcccccgccagccccggcgccggcaacccccccggcacccccaagggcaagagagagctgatgagcaacggccccggcagcatcatcggcgccaaggccggcaagaacagcggcaagaagaagggcctgaacaacgagctgaacaacctgcccgtgatcagcaacatgaccgccgccctggacagctgcagcgccgccgacggcagcctggccgccgagatgcccaagctggaggccgagggcctgatcgacaagaagaacctgggcgacaaggagaagggcaagaaggccaccaactgcaagaccgacaagaacctgagcaagctgaagagcgccagacccatcgcccccgcccccgcccccacccccccccagctgatcgccatccccaccgccaccttcaccaccaccaccaccggcaccatccccggcctgcccagcctgaccaccaccgtggtgcaggccacccccaagagcccccccctgaagcccatccagcccaagcccaccatcatgggcgagcccatcaccgtgaaccccgccctggtgagcctgaaggacaagaagaagaaggagaagagaaagctgaaggacaaggagggcaaggagaccggcagccccaagatggacgccaagctgggcaagctggaggacagcaagggcgccagcaaggacctgcccggccacttcctgaaggaccacctgaacaagaacgagggcctggccaacggcctgagcgagagccaggagagcagaatggccagcatcaaggccgaggccgacaaggtgtacaccttcaccgacaacgcccccagccccagcatcggcagcgccagcagactggagtgcagcaccctggtgaacggccaggcccccatggcccccctgcacgtgctgacccagaacggcgccgagagcagcgccgccaagaccagcagccccgcctacagcgacatcagcgacgccgccgacgacggcggcagcgacagcagaagcgagggcatgagaagcaaggccagcagccccagcgacatcatcagcagcaaggacagcgtggtgaagggccacagcagcaccaccgcccagagcagccagctgaaggagagccacagcccctactaccacagctacgacccctactacagccccagctacatgcaccccggccaggtgggcgcccccgccgccggcaacagcggcagcacccagggcatgaagatcaagaaggagagcgaggaggacgccgagaagaaggacaaggccgagcagctggacagcaagaaggtggaccacaacagcgccagcctgcagccccagcaccagagcgtgatcacccagagacaccccgccctggcccagagcctgtactacggccagtacgcctacggcctgtacatggaccagaagagcctgatggccaccagccccgcctacagacagcagtacgagaagtactacgaggaccagagactggccgagcagaagatggcccagaccggcagaggcgactgcgagagaaagagcgagctgcccctgaaggagctgggcaaggaggagaccaagcagaagaacatgcccagcgccaccatcagcaaggcccccagcacccccgagcccaacaagaaccacagcaagctgggccccagcgtgcccaacaagaccgaggagaccggcaagagccagctgctgagcaaccaccagcagcagctgcaggccgacagcttcaaggccaagcagatggagaaccaccagctgatcaaggaggccgtggagatgaagagcgtgatggacagcatgaagcagaccggcgtggaccccaccagcagattcaagcaggaccccgacagcagaacctggcaccactacgtgtaccagcccaagtacctggaccagcagaagagcgaggagctggacagagagaagaagctgaaggaggacagccccagaaagacccccaacaaggagagcggcgtgcccagcctgcccgtgagcctgaccagcatcaaggaggagcccaaggaggccaagcaccccgacagccagagcatggaggagagcaagctgaagaacgacgacagaaagacccccgtgaactggaaggacagcagaggcaccagagtggccgtgagcagccccatgagccagcaccagagctacatccagtacctgcacgcctacccctacccccagatgtacgaccccagccaccccgcctacagagccgtgagccccgtgctgatgcacagctaccccggcgcctacctgagccccggcttccactaccccgtgtacggcaagatgagcggcagagaggagaccgagaaggtgaacaccagccccagcgtgaacaccaagaccaccaccgagagcaaggccctggacctgctgcagcagcacgccaaccagtacagaagcaagagccccgcccccgtggagaaggccaccgccgagagagagagagaggccgagagagagagagacagacacagccccttcggccagagacacctgcacacccaccaccacacccacgtgggcatgggctaccccctgatccccggccagtacgaccccttccagggcctgaccagcgccgccctggtggccagccagcaggtggccgcccaggccagcgccagcggcatgttccccggccagagaagagagtag

SEQ ID NO: 205518 - DNA, 3258 bp, Artificial Sequence
  derived and/or modified sequence
atgagaggcggcagaggcagaggcaagagagccagaagcgccgccgccgcccccggcagcgaggccagcttcaccgagagcagaggcctgcagaacaagaacagaggcggcgccaacggcaagggcagaagaggcagcctgaacgccagcggcagaagaaccccccccaactgcgccgccgaggacatcaaggccagccccagcagcaccaacaagagaaagaacaagccccccatggagctggacctgaacagcagcagcgaggacaacaagcccggcaagagagtgagaaccaacagcagaagcacccccaccaccccccagggcaagcccgagaccaccttcctggaccagggctgcagcagccccgtgctgatcgactgcccccaccccaactgcaacaagaagtacaagcacatcaacggcctgagataccaccaggcccacgcccacctggaccccgagaacaagctggagttcgagcccgacagcgaggacaagatcagcgactgcgaggagggcctgagcaacgtggccctggagtgcagcgagcccagcaccagcgtgagcgcctacgaccagctgaaggcccccgccagccccggcgccggcaacccccccggcacccccaagggcaagagagagctgatgagcaacggccccggcagcatcatcggcgccaaggccggcaagaacagcggcaagaagaagggcctgaacaacgagctgaacaacctgcccgtgatcagcaacatgaccgccgccctggacagctgcagcgccgccgacggcagcctggccgccgagatgcccaagctggaggccgagggcctgatcgacaagaagaacctgggcgacaaggagaagggcaagaaggccaccaactgcaagaccgacaagaacctgagcaagctgaagagcgccagacccatcgcccccgcccccgcccccacccccccccagctgatcgccatccccaccgccaccttcaccaccaccaccaccggcaccatccccggcctgcccagcctgaccaccaccgtggtgcaggccacccccaagagcccccccctgaagcccatccagcccaagcccaccatcatgggcgagcccatcaccgtgaaccccgccctggtgagcctgaaggacaagaagaagaaggagaagagaaagctgaaggacaaggagggcaaggagaccggcagccccaagatggacgccaagctgggcaagctggaggacagcaagggcgccagcaaggacctgcccggccacttcctgaaggaccacctgaacaagaacgagggcctggccaacggcctgagcgagagccaggagagcagaatggccagcatcaaggccgaggccgacaaggtgtacaccttcaccgacaacgcccccagccccagcatcggcagcgccagcagactggagtgcagcaccctggtgaacggccaggcccccatggcccccctgcacgtgctgacccagaacggcgccgagagcagcgccgccaagaccagcagccccgcctacagcgacatcagcgacgccgccgacgacggcggcagcgacagcagaagcgagggcatgagaagcaaggccagcagccccagcgacatcatcagcagcaaggacagcgtggtgaagggccacagcagcaccaccgcccagagcagccagctgaaggagagccacagcccctactaccacagctacgacccctactacagccccagctacatgcaccccggccaggtgggcgcccccgccgccggcaacagcggcagcacccagggcatgaagatcaagaaggagagcgaggaggacgccgagaagaaggacaaggccgagcagctggacagcaagaaggtggaccacaacagcgccagcctgcagccccagcaccagagcgtgatcacccagagacaccccgccctggcccagagcctgtactacggccagtacgcctacggcctgtacatggaccagaagagcctgatggccaccagccccgcctacagacagcagtacgagaagtactacgaggaccagagactggccgagcagaagatggcccagaccggcagaggcgactgcgagagaaagagcgagctgcccctgaaggagctgggcaaggaggagaccaagcagaagaacatgcccagcgccaccatcagcaaggcccccagcacccccgagcccaacaagaaccacagcaagctgggccccagcgtgcccaacaagaccgaggagaccggcaagagccagctgctgagcaaccaccagcagcagctgcaggccgacagcttcaaggccaagcagatggagaaccaccagctgatcaaggaggccgtggagatgaagagcgtgatggacagcatgaagcagaccggcgtggaccccaccagcagattcaagcaggaccccgacagcagaacctggcaccactacgtgtaccagcccaagtacctggaccagcagaagagcgaggagctggacagagagaagaagctgaaggaggacagccccagaaagacccccaacaaggagagcggcgtgcccagcctgcccgtgagcctgaccagcatcaaggaggagcccaaggaggccaagcaccccgacagccagagcatggaggagagcaagctgaagaacgacgacagaaagacccccgtgaactggaaggacagcagaggcaccagagtggccgtgagcagccccatgagccagcaccagagctacatccagtacctgcacgcctacccctacccccagatgtacgaccccagccaccccgcctacagagccgtgagccccgtgctgatgcacagctaccccggcgcctacctgagccccggcttccactaccccgtgtacggcaagatgagcggcagagaggagaccgagaaggtgaacaccagccccagcgtgaacaccaagaccaccaccgagagcaaggccctggacctgctgcagcagcacgccaaccagtacagaagcaagagccccgcccccgtggagaaggccaccgccgagagagagagagaggccgagagagagagagacagacacagccccttcggccagagacacctgcacacccaccaccacacccacgtgggcatgggctaccccctgatccccggccagtacgaccccttccagggcctgaccagcgccgccctggtggccagccagcaggtggccgcccaggccagcgccagcggcatgttccccggccagagaagagagtag

SEQ ID NO: 205519 - DNA, 2148 bp, Artificial Sequence
  derived and/or modified sequence
atgagcgtgaacatcagcaccgccggcaagggcgtggaccccaacaccgtggacacctacgacagcggcgacgactgggagatcggcgtgggcaacctgatcatcgacctggacgccgacctggagaaggacagacagaagttcgagatgaacaacagcaccaccaccaccagcagcagcaacagcaaggactgcggcggccccgccagcagcggcgccggcgccaccgccgccctggccgacggcctgaagttcgccagcgtgcaggccagcgccccccagggcaacagccacaaggagaccagcaagagcaaggtgaagagaagcaagaccagcaaggacgccaacaagagcctgcccagcgccgccctgtacggcatccccgagatcagcagcaccggcaagagacaggaggtgcagggcagacccggcgaggccaccggcatgaacagcgccctgggccagagcgtgagcagcggcggcagcggcaaccccaacagcaacagcaccagcaccagcaccagcgccgccaccgccggcgccggcagctgcggcaagagcaaggaggagaagcccggcaagagccagagcagcagaggcgccaagagagacaaggacgccggcaagagcagaaaggacaagcacgacctgctgcagggccaccagaacggcagcggcagccaggcccccagcggcggccacctgtacggcttcggcgccaagagcaacggcggcggcgccagccccttccactgcggcggcaccggcagcggcagcgtggccgccgccggcgaggtgagcaagagcgcccccgacagcggcctgatgggcaacagcatgctggtgaagaaggaggaggaggaggaggagagccacagaagaatcaagaagctgaagaccgagaaggtggaccccctgttcaccgtgcccgccccccccccccccatcagcagcagcctgaccccccagatcctgcccagctacttcagccccagcagcagcaacatcgccgcccccgtggagcagctgctggtgagaaccagaagcgtgggcgtgaacacctgcgaggtgggcgtggtgaccgagcccgagtgcctgggcccctgcgagcccggcaccagcgtgaacctggagggcatcgtgtggcacgagaccgaggagggcgtgctggtggtgaacgtgacctggagaaacaagacctacgtgggcaccctgctggactgcaccaagcacgactgggccccccccagattctgcgagagccccaccagcgacctggagatgagaggcggcagaggcagaggcaagagagccagaagcgccgccgccgcccccggcagcgaggccagcttcaccgagagcagaggcctgcagaacaagaacagaggcggcgccaacggcaagggcagaagaggcagcctgaacgccagcggcagaagaaccccccccaactgcgccgccgaggacatcaaggccagccccagcagcaccaacaagagaaagaacaagccccccatggagctggacctgaacagcagcagcgaggacaacaagcccggcaagagagtgagaaccaacagcagaagcacccccaccaccccccagggcaagcccgagaccaccttcctggaccagggctgcagcagccccgtgctgatcgactgcccccaccccaactgcaacaagaagtacaagcacatcaacggcctgagataccaccaggcccacgcccacctggaccccgagaacaagctggagttcgagcccgacagcgaggacaagatcagcgactgcgaggagggcctgagcaacgtggccctggagtgcagcgagcccagcaccagcgtgagcgcctacgaccagctgaaggcccccgccagccccggcgccggcaacccccccggcacccccaagggcaagagagagctgatgagcaacggccccggcagcatcatcggcgccaaggccggcaagaacagcggcaagaagaagggcctgaacaacgagctgaacaacctgcccgtgatcagcaacatgaccgccgccctggacagctgcagcgccgccgacggcagcctggccgccgagatgcccaagctggaggccgagggcctgatcgacaagaagaacctgggcgacaaggagtag

SEQ ID NO: 205520 - DNA, 2124 bp, Artificial Sequence
  derived and/or modified sequence
atgagcgtgaacatcagcaccgccggcaagggcgtggaccccaacaccgtggacacctacgacagcggcgacgactgggagatcggcgtgggcaacctgatcatcgacctggacgccgacctggagaaggacagacagaagttcgagatgaacaacagcaccaccaccaccagcagcagcaacagcaaggactgcggcggccccgccagcagcggcgccggcgccaccgccgccctggccgacggcctgaagttcgccagcgtgcaggccagcgccccccagggcaacagccacaaggagaccagcaagagcaaggtgaagagaagcaagaccagcaaggacgccaacaagagcctgcccagcgccgccctgtacggcatccccgagatcagcagcaccggcaagagacaggaggtgcagggcagacccggcgaggccaccggcatgaacagcgccctgggccagagcgtgagcagcggcggcagcggcaaccccaacagcaacagcaccagcaccagcaccagcgccgccaccgccggcgccggcagctgcggcaagagcaaggaggagaagcccggcaagagccagagcagcagaggcgccaagagagacaaggacgccggcaagagcagaaaggacaagcacgacctgctgcagggccaccagaacggcagcggcagccaggcccccagcggcggccacctgtacggcttcggcgccaagagcaacggcggcggcgccagccccttccactgcggcggcaccggcagcggcagcgtggccgccgccggcgaggtgagcaagagcgcccccgacagcggcctgatgggcaacagcatgctggtgaagaaggaggaggaggaggaggagagccacagaagaatcaagaagctgaagaccgagaaggtggaccccctgttcaccgtgcccgccccccccccccccatcagcagcagcctgaccccccagatcctgcccagctacttcagccccagcagcagcaacatcgccgcccccgtggagcagctgctggtgagaaccagaagcgtgggcgtgaacacctgcgaggtgggcgtggtgaccgagcccgagtgcctgggcccctgcgagcccggcaccagcgtgaacctggagggcatcgtgtggcacgagaccgaggagggcgtgctggtggtgaacgtgacctggagaaacaagacctacgtgggcaccctgctggactgcaccaagcacgactgggccccccccagattctgcgagagccccaccagcgacctggagatgagaggcggcagaggcagaggcaagagagccagaagcgccgccgccgcccccggcagcgaggccagcttcaccgagagcagaggcctgcagaacaagaacagaggcggcgccaacggcaagggcagaagaggcagcctgaacgccagcggcagaagaaccccccccaactgcgccgccgaggacatcaaggccagccccagcagcaccaacaagagaaagaacaagccccccatggagctggacctgaacagcagcagcgaggacaacaagcccggcaagagagtgagaaccaacagcagaagcacccccaccaccccccagggcaagcccgagaccaccttcctggaccagggctgcagcagccccgtgctgatcgactgcccccaccccaactgcaacaagaagtacaagcacatcaacggcctgagataccaccaggcccacgcccacctggaccccgagaacaagctggagttcgagcccgacagcgaggacaagatcagcgactgcgaggagggcctgagcaacgtggccctggagtgcagcgagcccagcaccagcgtgagcgcctacgaccagctgaaggcccccgccagccccggcgccggcaacccccccggcacccccaagggcaagagagagctgatgagcaacggccccggcagcatcatcggcgccaaggccggcaagaacagcggcaagaagaagggcctgaacaacgagctgaacaacctgcccgtgatcagcaacatgaccgccgccctggacagctgcagcgccgccgacggcagcctggccgccgagatgcccaagctggaggccgagggcctgatcgactag

SEQ ID NO: 205521 - DNA, 4539 bp, Artificial Sequence
  derived and/or modified sequence
atgtctgtcaacatcagcaccgctggaaagggagtggatcccaataccgtggatacttatgactccggggacgactgggagatcggagttggcaacctgatcatcgatctggatgctgatctggagaaagacaggcagaaattcgaaatgaacaactcaactacaacaacctcatcaagtaacagtaaggattgcggcggtccagcttcatctggggccggcgccaccgccgctctggcagacggcctcaagttcgcctccgtgcaggccagcgccccccagggaaactcccacaaggagacaagcaaatctaaagtgaaacgctctaagacttctaaggacgctaataaatctcttccgtccgctgccctatacggtatccccgaaatctcctctactggtaagcgacaggaggtccagggacgcccgggtgaggccaccggcatgaactccgctctagggcaatccgtaagttctggtggatctggcaaccccaattcaaattcaacaagtacgtcgaccagtgctgcaaccgctggcgctggctcctgcggaaagtccaaggaagagaagcccggaaagagtcagagctcccgcggtgccaaacgcgataaagacgcaggaaagtctaggaaagacaagcacgacctgcttcagggccaccagaatggtagcggcagccaagcaccctcaggaggccacctgtatggttttggtgcgaaatccaacggcggtggcgcctctccttttcactgtggcggaacaggaagcggcagtgtcgccgcagccggggaagtctccaaatctgctcccgactccgggctgatggggaactcaatgttagtaaaaaaggaggaggaggaggaagagagccataggagaatcaaaaaattgaaaacagaaaaggtggatcccctgttcactgtaccagctcctcctcctcccatcagttcttcgctgacccctcagatcctgccatcatatttttccccatcatcgagcaacattgccgcccctgtggagcaattgctggtgagaacgaggtcagtaggagtgaacacatgcgaggttggagtggtcacagagcccgaatgtctgggcccgtgcgagccagggacatcggtgaacttagaaggcatcgtgtggcacgagacagaagaaggagttcttgtcgtaaacgtcacctggaggaacaaaacctatgtcgggacactgctggattgtacaaagcacgactgggcaccacccagattctgcgagtctccgacgtctgatctagagatgcggggcggacgggggcgcgggaaacgcgccaggtctgctgccgccgcacccggtagcgaggcctcctttacagagtcacgcggtctgcagaacaaaaatcgcggaggggccaacggcaaagggaggagaggttcactgaatgcttctgggcgtagaactccaccgaattgcgcagctgaagacatcaaagcgtccccctccagcacgaacaagagaaagaataagcccccgatggagttggacttgaatagtagctccgaggacaataaacctggcaaaagagttagaacgaactccaggagcaccccaaccacccctcagggtaaaccggagacgacatttctggaccaaggctgttcatccccagtcttaatcgactgtccacaccccaattgtaataagaagtacaaacacattaatggacttagataccatcaggctcatgcccatcttgatcctgaaaataaactcgagttcgaacctgatagtgaagataaaataagcgattgcgaggaagggctctctaacgtcgctctggagtgttccgagccatctacctccgtttcagcatacgaccagctgaaggcacctgcgtcgcctggcgccgggaacccacccggaacacccaagggcaaacgcgagctcatgagtaacggcccaggatctatcatcggagctaaagccggaaagaacagtggcaagaagaagggactgaataatgagttgaacaacctgcccgtgatctccaacatgacggccgctctggattcctgcagcgctgccgatggcagcctggcagcggaaatgcccaagctggaggctgaagggctgatcgataagaagaatctgggagacaaggaaaaaggcaagaaggctacgaactgtaagaccgacaaaaatctttccaagctgaaatcagctcgacccatagcccctgcccccgctcccacacctccacagttgatagccatccccacagctacgttcaccaccaccacaactgggacgatccccggcctgccatccctgactaccacagttgtacaggcgactccgaaatccccgcctcttaagccaattcagcccaaacccacgataatgggtgagcctatcacggtgaatcccgcgctcgtgtcccttaaagataagaaaaagaaagagaagcggaaactgaaggacaaggaaggaaaggagactggctcccctaagatggatgcaaaactagggaagctggaggatagtaaaggcgcatcaaaagatctgcctgggcactttttaaaggatcatctgaacaagaatgaggggttagccaatggtctctctgaatctcaggagtcccgcatggccagcatcaaggcagaagctgataaagtctacaccttcaccgacaatgctccatcaccgtccatcggcagcgcctctcggctggagtgtagtacattagtcaacggccaagccccaatggctccgctgcacgtgctgactcagaacggcgctgagtccagtgcagccaagacctcaagcccagcttactctgatatctccgatgctgccgatgacggggggagcgattcacggtcagaaggtatgcgctccaaggcctcaagcccttccgatattatcagctccaaagatagcgttgtcaaagggcactccagtactactgcccagtcatcccaactcaaggagagccacagcccttattaccattcctacgacccttactactcgccctcctacatgcacccggggcaagtaggtgctcctgccgccgggaatagtggctctacgcagggaatgaagatcaaaaaagaatccgaggaagatgccgaaaagaaagacaaagctgagcagctagacagcaagaaagtggaccataactctgcttctttgcagcctcagcaccaaagtgtaataactcagcggcaccctgcacttgcccagtccctctattatgggcagtatgcttacggattatatatggatcagaagagtctgatggccacctcccccgcttacagacagcagtacgagaagtactatgaggatcaacgcctggcagagcagaagatggcacaaacagggagaggagactgcgagcgaaagtctgagctgcctctgaaagaactgggcaaggaagaaaccaagcaaaaaaacatgccctccgcgaccatttctaaggctccaagtacaccagaacccaataagaaccactctaagctggggcccagcgtgccaaataagactgaggaaaccggcaagagtcagctattaagcaaccaccaacagcagctgcaagcagattcttttaaggccaagcagatggagaaccatcagctgattaaagaggctgtggaaatgaagagcgttatggatagcatgaaacagacaggagtagacccaacctcccgcttcaaacaggaccccgactcacgcacatggcaccattatgtctaccagcctaaataccttgaccaacaaaaatcagaagagttggaccgggagaagaagctgaaagaggacagccctaggaagacccccaataaggaatctggagtgcctagccttccggtgagccttacttccattaaagaagaaccaaaagaggcaaagcaccccgactctcaaagcatggaggaatcaaaattgaagaacgacgatcgtaaaaccccagtcaactggaaagatagcaggggaaccagagtggctgtctctagccctatgagtcaacaccaatcatacattcagtacctgcacgcctatccctatccccagatgtacgacccttcccaccctgcctatagggcagtcagtcccgtgctgatgcacagctaccccggtgcatatctttctcccggctttcactacccagtgtatggcaagatgagtggacgggaagagacggagaaggtgaacacatctccatcggttaacaccaagactaccactgagtccaaagcgttggacctgttgcaacagcatgccaatcagtaccggtcgaaatcacccgcacccgtggagaaggctaccgcagagcgggaaagggaagccgagcgtgagagggatcgccactcccccttcggccagcggcatctccatacccaccaccacacccatgttggcatgggatatcctctcatacccggacaatacgatcctttccagggcttaacttcggcggctctggtggcttcccagcaggtcgccgcccaggcatccgcttccggcatgtttcccggccagcggcgcgaatag

SEQ ID NO: 205522 - DNA, 3258 bp, Artificial Sequence
  derived and/or modified sequence
atgaggggtgggagggggcggggcaagcgggctaggtcagctgccgcagctcccggttcagaagcaagctttaccgagtccaggggactacagaacaaaaaccgcggcggcgccaatggaaaaggtagaagaggctccctgaacgcctcgggcagacgcacaccaccaaattgtgcagcagaggacatcaaagcatcccccagctccaccaataagcgcaagaacaagccacctatggaattggatttgaatagttcttccgaggacaacaagccaggcaagcgcgttcggaccaattctcgcagcacgcctacaaccccacagggcaaacctgagactacctttctggaccagggttgttcgagccctgtgcttattgactgtccccaccccaactgcaacaagaaatacaagcacatcaacggcctgagataccaccaggcccacgcacatctggatcccgagaacaaactcgagtttgaaccagattcagaggacaaaatctcggactgcgaggagggcctgagcaacgtggcgctggagtgttcggagcctagtacatccgtatcagcgtatgatcagctgaaggcccccgccagccccggcgccgggaatccaccaggaacccctaagggcaagcgagaactgatgtcaaacggacctggttcaatcattggcgccaaggccgggaaaaacagtggcaaaaagaaaggactgaataacgaactcaataacctgcctgtgatcagtaacatgacagccgccctagattcttgcagcgcggcagacggatcactcgctgctgaaatgcccaaactggaggccgaagggctcatagataaaaaaaacctgggggataaggaaaagggaaagaaggccactaactgcaaaacggacaaaaatttaagtaagcttaagtcagcaagaccaatcgcccctgcaccagcccccactccaccacaattaatagctattcctacagccactttcacgacaaccacgacaggcacaatccctggcctcccatcactaacaacaaccgtggttcaggctacccctaagtcacctcccctgaaaccaatacagccgaaaccaactattatgggcgaaccaataaccgtgaaccctgctcttgtctccctcaaggataagaaaaagaaagagaaacgcaaacttaaagacaaggagggcaaggaaaccgggtcgccaaaaatggacgcgaaactgggaaagctcgaagactctaaaggcgcctctaaggatttacccggtcatttcctgaaagatcacctcaacaagaacgaggggcttgctaacgggctgtccgagagccaggagtctcgaatggctagcatcaaggcagaagccgataaagtgtatacatttacggataacgcccctagtcccagcatcgggagtgcaagccgtctcgagtgttccaccctagtcaacgggcaggctcctatggccccactgcacgtattaacccagaatggagccgagagttcagcggctaagacatcgtctccagcgtattccgacatctcagatgcagccgacgacggggggtcagattccagatccgaagggatgcggtccaaagccagctcgccttcagatatcatctccagcaaagattctgtggtgaaagggcatagttcaaccacagcccagtcttcacagctgaaggagtctcattccccctattatcattcctatgatccctattacagtccttcctatatgcaccccggccaagttggcgcccctgctgccggcaattccggatcaactcagggcatgaagatcaagaaagagtctgaggaggacgccgagaaaaaggataaggccgagcagcttgacagcaagaaagtcgatcacaactccgcaagcctccagccacagcatcagtcggttatcacccaaagacacccagcactcgcccagtcactgtactacggtcaatacgcttacggcctgtacatggaccagaagagcctcatggctactagcccagcatacaggcagcagtatgaaaagtattacgaagaccagaggctagcagagcaaaagatggcccagaccggccgtggcgattgcgaacggaaatccgagctaccattgaaagaactgggaaaagaagaaactaagcaaaagaatatgccttctgcaactatctccaaagctccttcaactccagaacccaacaaaaaccatagcaagctaggtccgtctgtccccaacaaaaccgaggaaaccggcaagtcacagctgttgagcaatcaccagcaacaactccaagcagacagttttaaggcaaaacagatggagaatcatcagctgattaaagaggccgtagagatgaagtctgtaatggacagtatgaagcagacgggggtggatcctacgagcagattcaaacaggacccagactcaaggacttggcatcactacgtatatcagccgaaatacttagatcagcaaaagtccgaggagcttgatagagagaaaaagctgaaggaggacagcccaagaaagacgcctaacaaagagtctggagttccgtctctgccagtgtcgctaacaagtatcaaagaagagcccaaagaggccaagcatcctgacagtcagagcatggaagaatcgaaacttaaaaacgacgatagaaagacacccgtaaattggaaagacagcagaggaacaagggtcgcagtgagcagccccatgagccagcaccagagctacattcagtacctgcacgcttacccttatccccaaatgtacgaccccagccaccccgcctaccgcgcggtctcccccgtgttgatgcattcctatccaggggcgtatctatcacccgggtttcattacccagtttacgggaaaatgagcgggagagaagagactgagaaagtcaatacttcgccctcagtgaacacgaagacaactactgagagtaaggcgctcgacctgcttcagcagcacgcgaaccagtatcgctcaaaatcccccgctccagtagagaaagcgactgcagaacgcgagagagaggcggagagggaacgcgaccgccattctccttttggacagcggcatctccatacacaccatcacacacatgtggggatgggatacccactcatccctgggcagtacgatccatttcaaggactgacaagcgccgccctggtggccagccaacaggttgccgctcaagcaagtgcctcggggatgtttcccggacagcgaagggagtag

SEQ ID NO: 205523 - DNA, 2148 bp, Artificial Sequence
  derived and/or modified sequence
atgtcagtcaacatttccaccgccgggaaaggcgtggacccgaacacagtggacacctatgactcaggagatgactgggaaattggcgtggggaacctgattatcgatctggatgctgacctggagaaggatcggcaaaagtttgagatgaacaattcaactactaccacatcctcttctaactccaaagattgcggaggacccgccagcagcggcgccggcgctaccgccgccttagcagacggccttaagtttgcatccgttcaggcctccgctccacaaggcaattcccacaaagaaacttccaaatccaaggtgaagaggagtaagacctctaaagacgcgaacaagtcactcccaagcgctgccctctacggaattccagaaatatcgagtaccgggaaacggcaagaggtacagggacgtccaggggaggcaacaggaatgaactctgctctgggacagtcggtgtcgtcagggggctcaggcaatccaaactctaattcaaccagtacatccacatccgccgccacagccggagctggatcctgtggcaaatccaaggaggagaagcccggcaagagccagagttcacgcggcgccaaacgagacaaggatgccggaaaaagtaggaaggataagcacgacctgttacagggacatcaaaacggcagcggatctcaagctccatccggaggccatctctatggattcggagcaaagtcaaacggcggcggtgcaagtccattccattgcggaggtactggatctgggagtgtggcagctgccggggaggtttcaaaatcggccccagattccgggctcatggggaactccatgctggtgaaaaaggaggaagaagaagaggagagccaccgccgtattaaaaagctcaaaacggagaaagtagaccccctttttacggttcccgcaccgcccccaccaatctctagttctctgacaccccagattctgcccagttactttagccctagctcttctaatattgcggcaccagtcgagcagctcctggttcgtacacgaagcgtcggagtgaatacgtgcgaagtgggcgttgtcaccgagcccgagtgtctgggtccttgcgaacccggcacttcagtgaatcttgagggcatcgtgtggcacgagacagaagagggggtccttgttgttaatgttacatggcgaaacaagacgtacgttggaacgctccttgactgcacaaagcacgattgggccccgccccgattttgtgagtctccaacaagcgatctagaaatgcgaggggggcgcggaaggggtaagagggcgaggtccgcagcggctgctccgggttctgaagccagcttcaccgaaagccgcggcctgcagaacaaaaatagagggggggccaatgggaaagggcgtcggggttctctaaacgccagcgggcgcagaaccccccctaactgcgctgctgaagacatcaaggcatctccttcttccaccaataagcgtaaaaacaaacctcccatggaactggatctcaactccagctccgaggataacaagcccgggaaacgagtccggacaaactctaggtcgacacccacgacacctcagggtaagcctgagaccaccttcctggatcaggggtgtagtagccccgtccttatagattgcccccaccccaactgcaataaaaagtacaagcatatcaatggccttagataccatcaagcccacgcccatcttgatccagagaataaactggaattcgaacctgattcagaggataagatatcagactgcgaagaaggcctgagcaatgtcgcattggagtgcagtgaaccaagtacaagcgtaagcgcctacgaccagctgaaagcccctgcctcgccaggtgccggaaaccctcccgggacgcctaagggcaaacgagaactaatgagcaacggcccgggctctattattggcgctaaggccggaaagaattctggcaaaaagaaaggcctcaacaacgagctcaataacttacccgtgatcagtaacatgacagcagccctcgatagctgctctgctgctgacggctccttagcagctgagatgcccaagctggaagccgaggggctcattgacaaaaagaatctgggcgacaaggagtag

SEQ ID NO: 205524 - DNA, 2124 bp, Artificial Sequence
  derived and/or modified sequence
atgtccgtgaatattagcaccgccggcaaaggggtagaccccaatacagtggacacatatgattcaggggatgattgggaaatcggagtgggtaatcttattattgacctcgatgcagatttggaaaaagaccgacagaagttcgaaatgaacaacagtactacaaccaccagctcatcaaatagcaaagactgtggtggcccagcttccagcggcgccggcgctacggcggcgctagcagacggcctgaaattcgccagtgttcaggcttcagcacctcagggcaactctcataaggagaccagcaaaagtaaagtcaaacggtcaaaaacctctaaggatgcgaataagtccctgccatctgccgccctttacggaatccctgagatttccagcacaggcaagcgccaggaagtgcaaggacgacctggagaggctacaggcatgaacagtgctcttggacagagcgtgtctagtggaggaagcggtaacccgaactcaaattccactagcacaagcacctctgcagctacggctggagctggcagttgtggcaagagcaaggaggagaagcccggtaagtcacagagctctcggggcgccaagcgggataaagatgccggcaaatctaggaaagacaagcacgacctcttgcaggggcaccagaacggctccggctcccaggctccatccggggggcatctgtatggatttggagcaaagagcaatggcggcggcgcatctcctttccattgcggggggaccggctctggttccgtggccgcagcaggggaggtgagcaagtctgcccccgactctggtctgatgggcaatagtatgttggtaaaaaaggaggaggaagaggaggaaagccatcgcagaattaagaaactgaaaacagagaaggttgacccactgttcacggttccggcccctccaccaccgatctcaagcagcctgacaccccagatactgcccagttacttctcgccatcttcaagcaacatcgcagcccccgtggagcagctgttagtgcgcacacgcagcgtaggggttaacacctgcgaagtgggcgtcgtgactgaaccggaatgtctcgggccttgtgagcctggcacctcagttaacttagaaggtatcgtatggcatgaaacagaggagggggtcctggtggtcaatgtgacctggagaaacaagacctacgtcggcaccctcctggattgcaccaaacatgactgggcacccccgcggttctgcgagtcccccacgtcggatctcgagatgaggggtggacgcggacggggtaagagggctcgctctgcggcagctgctcctggtagcgaagcaagtttcacagagtcccggggccttcagaacaaaaaccgggggggcgccaacggcaaaggacgcagagggagtctcaacgcttccggaagaagaacaccacctaattgcgccgcggaagacataaaggccagcccatctagtactaataagagaaagaataaaccccccatggaactggacttgaattcctcctccgaggataataagcccggcaaaagggtacgtaccaactccagatctactccaaccacaccacagggcaaacctgaaacgactttcttggatcaaggatgctcaagtcccgtactaatagattgtccacatccaaactgcaataaaaaatataagcacatcaacggactccggtatcatcaggcccacgcacacctggaccccgaaaacaagcttgaatttgaaccagatagcgaggacaagatttcggattgtgaggagggtctgtctaatgtggcgcttgagtgttcagagccgtctaccagcgtgtccgcttatgaccagctgaaagcccctgccagtcccggagccgggaaccctcccgggacacccaagggcaaaagggaactgatgagcaacggccctggatctatcattggggcaaaggcaggcaaaaattcagggaagaagaaagggcttaacaatgagctgaacaacctcccggtgatcagcaatatgacagccgcattagactcttgcagcgcggccgacggcagcctggctgctgagatgcctaagctcgaggccgaagggcttatcgactag

SEQ ID NO: 205525 - DNA, 4539 bp, Artificial Sequence
  derived and/or modified sequence
atgtctgtgaacatcagcacagctgggaagggcgtggaccccaacacagtggacacctatgacagcggagatgactgggagattggagtgggcaacctgatcatcgacctggatgctgacctggagaaggaccggcagaagtttgagatgaacaacagcaccaccaccaccagcagcagcaacagcaaggactgtggcggccctgccagcagtggagctggggccacagctgccctggctgatggcctgaagtttgcctctgtgcaggccagcgccccccagggcaacagccacaaggagaccagcaagagcaaggtgaagaggagcaagaccagcaaggatgccaacaagagcctgcccagcgctgccctgtatggcatccctgagatcagcagcacaggcaagaggcaggaggtgcagggccggcctggagaggccaccggcatgaacagcgccctgggccagagcgtgtcctctgggggcagcggcaaccccaacagcaacagcaccagcaccagcaccagcgctgccacagctggagctggcagctgtgggaagagcaaggaggagaagccaggcaagagccagagcagcagaggagccaagagggacaaggatgctgggaagagcaggaaggacaagcatgacctgctgcagggccaccagaatggaagtggcagccaggcccccagcggcggccacctgtatggctttggagccaagagcaatggaggaggagccagccccttccactgcggcggcactggaagtggctctgtggccgctgctggggaggtgtccaagagcgccccagattctggcctgatgggcaacagcatgctggtgaagaaggaggaggaggaggaggagagccaccggcgcatcaagaagctgaagacagagaaggtggaccccctcttcaccgtgcctgcccctcctccacccatcagcagcagcctgaccccccagatcctgcccagctacttcagccccagcagcagcaacattgctgcccctgtggagcagctgctggtgaggaccaggtctgtgggcgtgaacacctgtgaggtgggcgtggtgacagagcctgagtgcctgggcccctgtgagcccggcacctctgtgaacctggagggcatcgtgtggcatgaaacagaggagggcgtgctggtggtgaatgtgacctggaggaacaagacctacgtgggcaccctgctggactgcaccaagcatgactgggccccaccccgcttctgtgagagccccaccagtgacctggagatgaggggcggccggggccggggcaagagggcccggtctgctgctgctgcccctggcagcgaggccagcttcacagagagccggggcctgcagaacaagaacagaggaggagccaacgggaagggccggcggggcagcctgaatgccagcggccgccgcaccccacccaactgtgccgctgaggacatcaaggccagccccagcagcaccaacaagaggaagaacaagccacccatggagctggacctgaacagcagcagcgaggacaacaagccaggcaagagggtgaggaccaacagccgcagcacccccaccaccccccagggcaagccagagaccaccttcctggaccagggctgcagcagccctgtgctgattgactgcccccaccccaactgcaacaagaagtacaagcacatcaatggcctgcgctaccaccaggcccacgcccacctggaccctgagaacaagctggagtttgagccagattctgaggacaagatcagtgactgtgaggagggcctgagcaatgtggccctggagtgcagcgagcccagcacctctgtgtctgcctatgaccagctgaaggccccagccagccctggggccggcaaccccccaggcacccccaagggcaagcgggagctgatgagcaatggacctggcagcatcatcggggccaaggccggcaagaacagcggcaagaagaagggcctgaacaatgagctgaacaacctgcccgtcatcagcaacatgacagctgccctggacagctgcagcgctgctgatggcagcctggccgctgagatgcccaagctggaggccgagggcctgattgacaagaagaacctgggggacaaggagaagggcaagaaggccaccaactgcaagacagacaagaacctgagcaagctgaagagcgcccggcccatcgccccagccccagcccccaccccaccccagctgattgccatccccacagccaccttcaccaccaccaccaccggcaccatccctggcctgcccagcctgaccaccaccgtggtgcaggccacccccaagagcccccccctgaagcccatccagcccaagcccaccatcatgggagagcccatcaccgtgaacccagccctggtgtccctgaaggacaagaagaagaaggagaagaggaagctgaaggacaaggagggcaaggagaccggcagccccaagatggatgccaagctgggcaagctggaggacagcaaaggagccagcaaggacctgcccggccacttcctgaaggaccacctgaacaagaatgaaggcctggccaacggcctgtctgagagccaggagagcaggatggccagcatcaaggccgaggccgacaaggtgtacaccttcacagacaatgcccccagccccagcatcggcagcgccagccggctggagtgcagcaccctggtgaatggccaggcccccatggcccccctgcacgtgctgacccagaatggagctgagagcagcgctgccaagaccagcagccctgcctacagcgacatcagtgatgctgctgatgatggcggcagtgacagccgctctgagggcatgaggagcaaggccagcagccccagcgacatcatcagcagcaaggacagcgtggtgaagggccacagcagcaccacagcccagagcagccagctgaaggagagccacagcccctactaccacagctatgacccctactacagccccagctacatgcaccctggccaggtgggcgccccagctgctggcaacagcggcagcacccagggcatgaagatcaagaaggagagcgaggaggatgctgagaagaaggacaaggccgagcagctggacagcaagaaggtggaccacaacagcgccagcctgcagccccagcaccagagcgtcatcacccagaggcacccagccctggcccagagcctgtactacggccagtatgcctacggcctgtacatggaccagaagagcctgatggccaccagccctgcctaccggcagcagtatgagaagtactatgaggaccagaggctggccgagcagaagatggcccagacaggccgcggggactgtgagaggaagtctgagctgcccctgaaggagctgggcaaggaggagaccaagcagaagaacatgcccagcgccaccatcagcaaggcccccagcaccccagagcccaacaagaaccacagcaagctgggccccagcgtgcccaacaagacagaggagaccgggaagagccagctgctgagcaaccaccagcagcagctgcaggccgacagcttcaaggccaagcagatggagaaccaccagctgatcaaggaggccgtggagatgaagtctgtgatggacagcatgaagcagacaggagtggaccccaccagccgcttcaagcaggaccctgacagcaggacctggcaccactacgtgtaccagcccaagtacctggaccagcagaagtctgaggagctggaccgggagaagaagctgaaggaggacagccccaggaagacccccaacaaggagagcggcgtgcccagcctgcctgtgtccctgaccagcatcaaggaggagcccaaggaggccaagcacccagacagccagagcatggaggagagcaagctgaagaatgatgacaggaagacccctgtgaactggaaggacagccggggcaccagggtggccgtgagcagccccatgagccagcaccagagctacatccagtacctgcacgcctacccctacccccagatgtatgaccccagccacccagcctacagagctgtgtcccctgtgctgatgcacagctacccaggggcctacctgagccctggcttccactaccctgtgtatggcaagatgagcggccgggaggagacagagaaggtgaacaccagccccagcgtgaacaccaagaccaccacagagagcaaggccctggacctgctgcagcagcacgccaaccagtaccgcagcaagagccctgcccctgtggagaaggccacagctgagcgggagcgggaggccgagcgggagcgggacagacacagccccttcggccagaggcacctgcacacccaccaccacacccacgtgggcatgggctaccccctcatccctggccagtatgaccccttccagggcctgaccagcgctgccctggtggccagccagcaggtggccgcccaggccagcgccagcggcatgtttcctggccagaggcgggagtag

SEQ ID NO: 205526 - DNA, 3258 bp, Artificial Sequence
  derived and/or modified sequence
atgagaggaggccggggccggggcaagagggcccggtctgctgctgctgcccctggcagcgaggccagcttcacagagagccggggcctgcagaacaagaacagaggaggagccaatggaaaaggaagaagaggcagcctgaatgccagcggccgccgcaccccacccaactgtgccgctgaggacatcaaggccagccccagcagcaccaacaagaggaagaacaagccacccatggagctggacctgaacagcagcagcgaggacaacaagccaggcaagagggtgaggaccaacagccgcagcacccccaccaccccccagggcaagccagagaccaccttcctggaccagggctgcagcagccctgtgctgattgactgcccccaccccaactgcaacaagaagtacaagcacatcaatggcctgcgctaccaccaggcccacgcccacctggaccctgagaacaagctggagtttgagccagacagcgaggacaagatcagtgactgtgaggagggcctgagcaatgtggccctggagtgcagcgagcccagcacctctgtgtctgcctatgaccagctgaaggccccagccagccctggagctggcaaccccccaggcacccccaagggcaagcgggagctgatgagcaatggacctggcagcatcattggagccaaggccggcaagaacagcggcaagaagaagggcctgaacaatgagctgaacaacctgcctgtgatcagcaacatgacagctgccctggacagctgcagcgctgctgatggcagcctggccgctgagatgcccaagctggaggccgagggcctgattgacaagaagaacctgggggacaaggagaagggcaagaaggccaccaactgcaagacagacaagaacctgagcaagctgaagagcgcccggcccatcgccccagccccagcccccaccccaccccagctgattgccatccccacagccaccttcaccaccaccaccaccggcaccatccctggcctgcccagcctgaccaccaccgtggtgcaggccacccccaagagcccccccctgaagcccatccagcccaagcccaccatcatgggagagcccatcaccgtgaacccagccctggtgtccctgaaggacaagaagaagaaggagaagaggaagctgaaggacaaggagggcaaggagaccggcagccccaagatggatgccaagctgggcaagctggaggacagcaagggggccagcaaggacctgcccggccacttcctgaaggaccacctgaacaagaatgaaggcctggccaacggcctgtctgagagccaggagagcaggatggccagcatcaaggccgaggccgacaaggtgtacaccttcacagacaatgcccccagccccagcatcggcagcgccagccggctggagtgcagcaccctggtgaatggccaggcccccatggcccccctgcacgtgctgacccagaatggagctgagagcagcgctgccaagaccagcagccctgcctacagcgacatcagtgatgctgctgatgatggcggcagtgacagccgctctgagggcatgaggagcaaggccagcagccccagcgacatcatcagcagcaaggacagcgtggtgaagggccacagcagcaccacagcccagagcagccagctgaaggagagccacagcccctactaccacagctatgacccctactacagccccagctacatgcaccctggccaggtgggcgccccagctgctggcaacagcggcagcacccagggcatgaagatcaagaaggagagtgaagaagatgctgagaagaaggacaaggccgagcagctggacagcaagaaggtggaccacaacagcgccagcctgcagccccagcaccagagcgtcatcacccagaggcacccagccctggcccagagcctgtactacggccagtatgcctacggcctgtacatggaccagaagagcctgatggccaccagccctgcctaccggcagcagtatgagaagtactatgaggaccagaggctggccgagcagaagatggcccagacaggccgcggggactgtgagaggaagtctgagctgcccctgaaggagctgggcaaggaggagaccaagcagaagaacatgcccagcgccaccatcagcaaggcccccagcaccccagagcccaacaagaaccacagcaagctgggccccagcgtgcccaacaagacagaggagaccgggaagagccagctgctgagcaaccaccagcagcagctgcaggccgacagcttcaaggccaagcagatggagaaccaccagctgatcaaggaggccgtggagatgaagtctgtgatggacagcatgaagcagacaggagtggaccccaccagccgcttcaagcaggaccctgacagcaggacctggcaccactacgtgtaccagcccaagtacctggaccagcagaagtctgaggagctggaccgggagaagaagctgaaggaggacagccccaggaagacccccaacaaggagagcggcgtgcccagcctgcctgtgtccctgaccagcatcaaggaggagcccaaggaggccaagcacccagacagccagagcatggaggagagcaagctgaagaatgatgacaggaagacccctgtgaactggaaggacagccggggcaccagggtggccgtgagcagccccatgagccagcaccagagctacatccagtacctgcacgcctacccctacccccagatgtatgaccccagccacccagcctacagagctgtgtcccctgtgctgatgcacagctacccaggggcctacctgagccctggcttccactaccctgtgtatggcaagatgagcggccgggaggagacagagaaggtgaacaccagccccagcgtgaacaccaagaccaccacagagagcaaggccctggacctgctgcagcagcacgccaaccagtaccgcagcaagagccctgcccctgtggagaaggccacagctgagcgggagcgggaggccgagcgggagcgggacagacacagccccttcggccagaggcacctgcacacccaccaccacacccacgtgggcatgggctaccccctcatccctggccagtatgaccccttccagggcctgaccagcgctgccctggtggccagccagcaggtggccgcccaggccagcgccagcggcatgtttcctggccagaggcgggagtag

SEQ ID NO: 205527 - DNA, 2148 bp, Artificial Sequence
  derived and/or modified sequence
atgtctgtgaacatcagcacagctgggaagggcgtggaccccaacacagtggacacctatgacagcggagatgactgggagattggagtgggcaacctgatcatcgacctggatgctgacctggagaaggaccggcagaagtttgagatgaacaacagcaccaccaccaccagcagcagcaacagcaaggactgtggcggccctgccagcagtggagctggggccacagctgccctggctgatggcctgaagtttgcctctgtgcaggccagcgccccccagggcaacagccacaaggagaccagcaagagcaaggtgaagaggagcaagaccagcaaggatgccaacaagagcctgcccagcgctgccctgtatggcatccctgagatcagcagcacaggcaagaggcaggaggtgcagggccggcctggagaggccaccggcatgaacagcgccctgggccagagcgtgtcctctgggggcagcggcaaccccaacagcaacagcaccagcaccagcaccagcgctgccacagctggagctggcagctgtgggaagagcaaggaggagaagccaggcaagagccagagcagcagaggagccaagagggacaaggatgctgggaagagcaggaaggacaagcatgacctgctgcagggccaccagaatggaagtggcagccaggcccccagcggcggccacctgtatggctttggagccaagagcaatggaggaggagccagccccttccactgcggcggcactggaagtggctctgtggccgctgctggggaggtgtccaagagcgccccagattctggcctgatgggcaacagcatgctggtgaagaaggaggaggaggaggaggagagccaccggcgcatcaagaagctgaagacagagaaggtggaccccctcttcaccgtgcctgcccctcctccacccatcagcagcagcctgaccccccagatcctgcccagctacttcagccccagcagcagcaacattgctgcccctgtggagcagctgctggtgaggaccaggtctgtgggcgtgaacacctgtgaggtgggcgtggtgacagagcctgagtgcctgggcccctgtgagcccggcacctctgtgaacctggagggcatcgtgtggcatgaaacagaggagggcgtgctggtggtgaatgtgacctggaggaacaagacctacgtgggcaccctgctggactgcaccaagcatgactgggccccaccccgcttctgtgagagccccaccagtgacctggagatgaggggcggccggggccggggcaagagggcccggtctgctgctgctgcccctggcagcgaggccagcttcacagagagccggggcctgcagaacaagaacagaggaggagccaacgggaagggccggcggggcagcctgaatgccagcggccgccgcaccccacccaactgtgccgctgaggacatcaaggccagccccagcagcaccaacaagaggaagaacaagccacccatggagctggacctgaacagcagcagcgaggacaacaagccaggcaagagggtgaggaccaacagccgcagcacccccaccaccccccagggcaagccagagaccaccttcctggaccagggctgcagcagccctgtgctgattgactgcccccaccccaactgcaacaagaagtacaagcacatcaatggcctgcgctaccaccaggcccacgcccacctggaccctgagaacaagctggagtttgagccagattctgaggacaagatcagtgactgtgaggagggcctgagcaatgtggccctggagtgcagcgagcccagcacctctgtgtctgcctatgaccagctgaaggccccagccagccctggggccggcaaccccccaggcacccccaagggcaagcgggagctgatgagcaatggacctggcagcatcatcggggccaaggccggcaagaacagcggcaagaagaagggcctgaacaatgagctgaacaacctgcccgtcatcagcaacatgacagctgccctggacagctgcagcgctgctgatggcagcctggccgctgagatgcccaagctggaggccgagggcctgattgacaagaagaacctgggggacaaggagtag

SEQ ID NO: 205528 - DNA, 2124 bp, Artificial Sequence
  derived and/or modified sequence
atgtctgtgaacatcagcacagctgggaagggcgtggaccccaacacagtggacacctatgacagcggagatgactgggagattggagtgggcaacctgatcatcgacctggatgctgacctggagaaggaccggcagaagtttgagatgaacaacagcaccaccaccaccagcagcagcaacagcaaggactgtggcggccctgccagcagtggagctggggccacagctgccctggctgatggcctgaagtttgcctctgtgcaggccagcgccccccagggcaacagccacaaggagaccagcaagagcaaggtgaagaggagcaagaccagcaaggatgccaacaagagcctgcccagcgctgccctgtatggcatccctgagatcagcagcacaggcaagaggcaggaggtgcagggccggcctggagaggccaccggcatgaacagcgccctgggccagagcgtgtcctctgggggcagcggcaaccccaacagcaacagcaccagcaccagcaccagcgctgccacagctggagctggcagctgtgggaagagcaaggaggagaagccaggcaagagccagagcagcagaggagccaagagggacaaggatgctgggaagagcaggaaggacaagcatgacctgctgcagggccaccagaatggaagtggcagccaggcccccagcggcggccacctgtatggctttggagccaagagcaatggaggaggagccagccccttccactgcggcggcactggaagtggctctgtggccgctgctggggaggtgtccaagagcgccccagattctggcctgatgggcaacagcatgctggtgaagaaggaggaggaggaggaggagagccaccggcgcatcaagaagctgaagacagagaaggtggaccccctcttcaccgtgcctgcccctcctccacccatcagcagcagcctgaccccccagatcctgcccagctacttcagccccagcagcagcaacattgctgcccctgtggagcagctgctggtgaggaccaggtctgtgggcgtgaacacctgtgaggtgggcgtggtgacagagcctgagtgcctgggcccctgtgagcccggcacctctgtgaacctggagggcatcgtgtggcatgaaacagaggagggcgtgctggtggtgaatgtgacctggaggaacaagacctacgtgggcaccctgctggactgcaccaagcatgactgggccccaccccgcttctgtgagagccccaccagtgacctggagatgaggggcggccggggccggggcaagagggcccggtctgctgctgctgcccctggcagcgaggccagcttcacagagagccggggcctgcagaacaagaacagaggaggagccaacgggaagggccggcggggcagcctgaatgccagcggccgccgcaccccacccaactgtgccgctgaggacatcaaggccagccccagcagcaccaacaagaggaagaacaagccacccatggagctggacctgaacagcagcagcgaggacaacaagccaggcaagagggtgaggaccaacagccgcagcacccccaccaccccccagggcaagccagagaccaccttcctggaccagggctgcagcagccctgtgctgattgactgcccccaccccaactgcaacaagaagtacaagcacatcaatggcctgcgctaccaccaggcccacgcccacctggaccctgagaacaagctggagtttgagccagattctgaggacaagatcagtgactgtgaggagggcctgagcaatgtggccctggagtgcagcgagcccagcacctctgtgtctgcctatgaccagctgaaggccccagccagccctggggccggcaaccccccaggcacccccaagggcaagcgggagctgatgagcaatggacctggcagcatcatcggggccaaggccggcaagaacagcggcaagaagaagggcctgaacaatgagctgaacaacctgcccgtcatcagcaacatgacagctgccctggacagctgcagcgctgctgatggcagcctggccgctgagatgcccaagctggaggccgagggcctgattgattag

SEQ ID NO: 205529 - DNA, 4539 bp, Artificial Sequence
  derived and/or modified sequence
atgagcgtgaacatcagcaccgccggcaagggcgtggaccccaacacggtcgatacctacgactcaggcgatgactgggagatcggggtcggcaacctgatcattgatttggacgccgatctggaaaaggatcgccagaagttcgagatgaacaactctacaacaaccaccagctcaagtaattcaaaggactgtggtggcccagccagtagtggagcaggtgcgacagctgccctggcagatggcctgaaattcgccagcgtacaggccagcgcacctcagggtaactctcataaggaaacatctaagtctaaggttaaacggtcaaagacgtctaaagatgcgaacaagagcctgccttcagccgctctatacggcatccccgagatttcctccactggtaagcgtcaggaagtgcagggacgccctggcgaagccaccggtatgaatagcgctttggggcagtcggtgagctctggcgggtctgggaacccgaactctaatagcacaagcacctcaaccagcgcagccaccgcaggagctggctcttgcggaaagagcaaggaagagaagcctgggaagtctcaaagttcgcgtggagccaagcgtgataaggacgcaggtaaatctagaaaggataagcatgacctgttgcaggggcaccagaatggatccggatcacaggctccatctgggggccatctgtatggtttcggggcaaagtctaacggcggcggtgcaagcccctttcactgtggtggaactggttccggatcagtggccgcagcgggagaagtctctaaaagtgctcctgactctggcctgatgggcaactcaatgctggtcaaaaaagaagaagaggaagaggagagtcaccgccgaatcaaaaagctcaagacagaaaaggtcgatccattgtttaccgtacctgcgcccccccctccgatcagtagctctctcacccctcagatcctgccctcttacttttctccctcctcctccaatattgccgctccagtggaacagctacttgttcgcactcgctctgtgggggtcaacacctgcgaagtcggagtagtaactgaacccgagtgtcttggcccttgcgaacctggtacatctgtgaacctggaaggtatcgtctggcacgaaacggaggagggggttctagtcgttaacgttacatggcgaaacaagacttacgtggggacgttgctcgattgtaccaagcacgattgggcccccccccgtttttgtgaatccccaacatcagacctggagatgcgcggggggagaggccgtgggaagcgcgctaggagtgcggccgctgcacccggcagcgaagcaagtttcacagagtcacgtggattgcagaacaaaaacagaggaggagcaaacggcaaagggcggcgcgggagcttaaatgccagtggacggagaacacccccgaattgcgcagccgaagatatcaaagctagccctagttctactaacaagcgtaagaataagccccccatggagctggacctaaattcaagctctgaggacaacaagcctggcaaaagagtgcggaccaactccagatctacgcctacaacgccccaaggtaaaccggaaaccacattcttggatcagggatgctcgagcccagtcttgattgactgcccacaccctaactgtaataaaaagtataagcacatcaatggtctaaggtaccaccaagcccatgcccacctggaccccgagaataaactggaatttgagccagacagtgaggacaagataagcgattgcgaggagggactttccaacgtagcactcgagtgctcggagccttccacctcggtctcagcgtacgatcaactgaaggcaccagcttccccgggagccgggaatccgccaggtactccaaaagggaaacgagaacttatgtctaatggcccaggttccataatcggtgccaaggctgggaaaaactccggcaagaagaagggactgaacaatgaactaaacaacctgcccgtgatctcgaatatgacagccgcacttgattcttgctctgctgccgatggcagtcttgccgccgagatgccgaagctggaggccgagggtttgatagacaagaagaatttgggtgataaggaaaagggcaagaaagctacaaattgcaagactgataaaaatctctctaagctaaaatcggccagaccaattgcgcctgctcccgcccctacccctccccaactgatcgccatcccaacagccacttttactaccaccactactgggacaatccctgggctgccctcattgactacaaccgtggtgcaagcgacacccaagtctccacctctgaaacccattcagcccaagccaactattatgggtgaacccatcacagtgaatccggctctggtgtcccttaaagataagaagaagaaggagaagcgcaagctaaaggataaggagggaaaggaaaccggctccccaaaaatggacgctaagttaggaaaactcgaggactcaaagggggcttctaaggacttacctggtcatttcctgaaagaccatttgaacaagaacgagggcctggctaacggcctgtcggagagtcaggagagcaggatggcctccattaaagccgaggcagataaagtgtacaccttcaccgataatgccccgagcccttcaatagggagcgcaagcaggttagaatgctccaccctggtcaatgggcaagcccctatggcccccctgcatgtgctaactcaaaatggcgccgaaagcagcgcagcgaagacatctagcccagcttactctgatatctctgatgcggccgatgatggtggctccgacagcaggtccgaaggcatgagaagcaaagcctcaagcccctctgatattatctcctccaaggactctgtggtcaaaggacattctagcacgactgcacagagttcacaactgaaagaatcacactcgccatactaccatagctatgacccctattattcaccctcctacatgcaccctggacaagtgggcgccccggccgctggcaacagcggctctacacaaggcatgaaaataaagaaggagtccgaagaggatgccgaaaaaaaagacaaagctgaacagcttgatagtaagaaggtcgaccacaacagtgcgtccctgcagccacaacatcagtccgtaattacacaaagacatccagcactggcacagtcactctactatggtcagtatgcttacggtctgtacatggatcaaaaatcgctcatggccacctctcccgcttaccgccagcaatatgagaaatattacgaggaccagcgcctggcggagcaaaaaatggcccaaacaggtagaggcgattgcgagcgcaagtcggagctccctcttaaggaactgggcaaagaggaaacgaaacaaaaaaacatgccttccgcaacaatttctaaagcacctagtacacccgagcccaataagaatcattcaaagctagggccgagtgttcccaataaaaccgaggagactggcaaatcccagctattgagtaatcaccagcagcagctgcaggccgattctttcaaagccaaacagatggagaatcaccagcttatcaaggaggctgtggagatgaagagtgttatggattcaatgaaacaaacaggcgtcgaccccacctccagattcaagcaagaccccgatagtagaacatggcaccactacgtgtatcagcccaagtatttagaccagcagaaaagcgaagaactggaccgtgagaagaagctgaaggaggactcaccccggaaaactcccaataaagagagcggggtcccctctctgccagtttctcttacctccataaaggaggaaccaaaggaagctaaacacccagactcccagagcatggaggaatctaaattaaaaaatgacgatcgcaagacccctgttaactggaaggactcccggggcacaagggtagctgtcagctccccaatgtctcaacatcagtcctatatccagtatctgcatgcatacccatatccacaaatgtatgatccctctcatccggcatatagggccgtgtctccagtgctcatgcacagctatccaggcgcttacctgagcccaggtttccattaccccgtgtacgggaagatgtccgggagggaggagacagagaaggttaacacaagcccgtccgtgaacaccaagaccacaactgagagtaaagcactggacttactgcaacagcatgccaaccagtatagatccaagagcccagcaccagtcgaaaaggcgaccgccgaaagagagagagaggcagagcgggagagagatcgccacagcccattcgggcagaggcatcttcacacacatcatcatacgcacgtgggcatgggttatcctttaatcccaggacaatacgaccctttccagggactgacaagtgcagccctagtcgcaagtcaacaggtagctgcacaggctagcgccagcggaatgttcccaggccagcgccgggagtag

SEQ ID NO: 205530 - DNA, 3258 bp, Artificial Sequence
  derived and/or modified sequence
atgcggggcggccggggccggggcaagcgggcccggagcgccgccgctgcgccaggctccgaagcctcttttaccgaaagtagggggctccagaataagaatcgggggggcgctaatggcaagggcagacgcggctccctgaatgcctctggtaggaggaccccgccaaattgcgcggcggaggatatcaaggccagtccgtctagcaccaataagcgcaaaaacaagcctcctatggaattagacctgaactcctcctccgaggacaataagccaggcaagagagtgcggacaaactccaggtccacacctaccacgccccaaggtaagcccgagactacatttctggatcagggctgctcctctccggtgcttatcgactgcccacaccctaattgcaacaaaaagtacaaacatatcaatggattgaggtatcatcaggcccacgctcatttggatcctgaaaataagttggagtttgagccggacagcgaggacaaaatttctgactgtgaagaagggctgtccaatgtcgccctggagtgctcagaaccaagtactagcgtctctgcctatgaccagctcaaagcccctgcatctcctggcgcagggaatcctcccggcacacccaagggcaaaagggaactgatgtcgaacggccccggtagtattatcggcgccaaagccggaaaaaacagtggaaaaaaaaagggcttaaacaatgaactcaacaacctgccggtgatctctaatatgaccgccgctctcgacagttgcagcgctgcagatggatctctagctgcagagatgcctaaactggaagcggaggggttgatagacaaaaaaaacctcggcgacaaggagaaaggcaaaaaggccaccaattgcaaaaccgataagaatctgagcaaactgaagtctgctcgccctatagccccagcgccagctccgacaccaccccagctaatcgccattcctaccgccacgttcaccacgactacgaccggaaccatccccgggctcccttctctgactacaacggttgtacaggcgaccccgaaatctcctccgctgaaacccattcagcccaaacctactattatgggcgagccaatcacggttaatcccgcgctcgtgtccttaaaagataaaaagaaaaaggaaaaacggaaattgaaagataaagaaggaaaggaaactggctccccgaagatggatgcgaagcttggcaagttggaggatagtaagggcgcatccaaagatctgccagggcacttcttgaaggaccaccttaataaaaatgaagggctggctaacgggctctcagagagccaggagtcaagaatggccagcataaaagcagaagcagacaaggtctatactttcaccgacaacgcacctagccccagtattggaagcgcgtccaggctggaatgttccacgctggtgaacggccaggcgcccatggctcctctgcacgtgctgacccaaaacggtgccgagtcctcggcggctaaaacatcgtccccagcatacagtgatatctcagacgccgcagacgatggcgggagcgactcccgctcagagggaatgcggtctaaggccagctcccctagcgacataatatccagcaaggacagcgtggtgaaaggtcacagctccacgacagcccaatcgagtcagctgaaggaatctcactcaccatattatcactcctatgacccatattacagtccaagttatatgcacccaggacaggtcggcgcacctgcggctggcaacagcggtagcacacagggaatgaagataaagaaggagtcagaggaggatgcagaaaagaaagacaaagcagaacagttggattctaaaaaggtcgatcacaatagcgcttctctgcagccccaacaccagtccgtaataacccagcgacacccagccttggcccagagcttgtattatggacagtacgcctatggcctgtacatggaccaaaagagcctaatggccacgtcgccagcatatcgccagcaatacgagaagtactatgaggatcaacgcctggctgagcaaaaaatggcccaaaccgggcggggagactgtgaacgcaagagcgaactgcctctcaaggagctggggaaagaggagaccaaacagaaaaacatgcctagcgccacaatcagcaaagcaccgagcacaccagaacccaataaaaaccactcgaaattaggtccgtccgtgcctaataagactgaggaaaccgggaaatctcagctgcttagtaaccaccagcagcaattgcaggccgatagctttaaggcaaagcagatggagaaccatcagttgattaaagaggctgtggagatgaagtcggtaatggatagtatgaagcagacgggggtagatcctactagtcggttcaagcaggacccagactctagaacatggcatcactacgtgtaccagccaaaatacctcgatcaacaaaaaagcgaagagttggatagggagaagaagttgaaggaggactctcctcgcaagacccctaataaagagtcaggcgttccttctctgcccgtgagtctgactagtattaaggaagagccaaaggaggctaaacatccggactctcagtctatggaagagtccaaactgaaaaatgatgaccgaaaaactccggtgaactggaaggattctcgcggcacacgcgtcgctgttagctcccccatgagccagcaccaatcctatatacaatacctgcatgcttacccttatccccaaatgtatgacccttcccaccccgcgtacagggcagttagcccagtgctcatgcactcttacccaggcgcttatctgtcccccggattccactacccagtctacggcaagatgagcggcagggaagaaacagaaaaagtaaacacctcaccttcggtgaacacaaagacgacgaccgagagcaaggcgctggacttgctccagcaacacgcaaatcagtaccgctcaaagtctcccgcaccggtagaaaaagccactgcggaaagagagagggaggccgagcgggaacgggatcggcactctccctttggccagagacatcttcacacgcaccaccacactcatgtgggtatggggtatcccctcatacctgggcagtacgaccccttccagggcctaacaagtgccgcacttgtggcgagtcagcaagtagctgcacaggcgtcagcctccggtatgttccctgggcaacgacgcgagtag

SEQ ID NO: 205531 - DNA, 2148 bp, Artificial Sequence
  derived and/or modified sequence
atgagcgtgaacatcagcaccgccggcaagggcgtggaccccaacactgtagatacatacgattctggtgacgactgggagataggagtgggaaatctgattattgacctcgatgcagatttggaaaaagatcggcagaagttcgagatgaacaactctactacaactacgtccagtagcaactccaaagattgtggtggtcctgcgagctccggtgccggtgccaccgccgcactggctgatgggctgaagtttgcctctgtgcaggcctctgctccccaagggaactcccacaaggagacaagtaaatccaaagtgaaacgctccaagacttcaaaagatgctaacaagtcactgccctcggccgcattgtacggcatccctgaaattagttcaaccggaaaacgccaagaagtgcaggggcgtccgggcgaagcaaccggaatgaacagcgccctaggccagtctgtcagttccggcggctccggcaaccccaacagtaattcaacatccacaagcaccagcgcagccaccgcaggcgccggctcatgtggcaagtcaaaggaggagaagcccggaaagagccaatcctctaggggggcgaagagagacaaagatgccggaaagagtcgcaaggataaacatgatctgttgcaaggccatcagaacggctctggaagtcaagccccttccggaggccacctgtacgggttcggcgccaaatcaaacggaggcggagcaagtcctttccattgcggaggaaccggctctggatctgtggcagccgccggtgaggtcagtaaaagcgctcctgacagtggtctgatgggtaatagtatgctggtgaagaaggaagaagaagaggaagaaagtcacagacgcatcaagaaactcaagaccgagaaggtcgatccactctttaccgtccctgccccgccacccccaatctcttcctccctgacaccacagatcctccctagttactttagcccctctagctccaacattgccgcccctgtggagcaattgttggtgcgaacaagaagcgtgggcgtgaatacatgcgaggtgggtgtggtcaccgaacctgagtgtttgggcccttgcgagccaggcacaagtgtgaacctcgagggtattgtttggcacgagactgaggaaggagtcttagtggtaaatgttacctggagaaacaaaacgtacgtcggaacccttctggactgcactaagcacgattgggcccccccccggttctgtgaatcccctacttcagacctagagatgagaggaggtagaggccgtgggaaacgcgcacgaagcgcagcggctgcccccggttcggaagcttcatttacggaaagtagaggactgcaaaacaaaaacagaggaggggccaacggcaaaggccgacgtggaagcctgaacgcatcaggccgccgcacacctcctaactgtgccgccgaggacatcaaagcctccccctcaagcacaaacaaacgtaagaataagccacctatggaattggacctgaattcttcttctgaagataacaaacccgggaagagagtaaggaccaattccaggtccacaccaaccactccacaagggaagcctgagaccacttttctggaccaggggtgcagctcacccgtgttgattgattgtccacaccctaattgtaacaaaaagtataaacatatcaacggtcttagataccatcaggctcacgcacacttggaccctgaaaacaaactggagtttgagcctgactcagaagacaagattagcgactgtgaggaagggctctccaatgttgccctggaatgctctgaaccctccacctccgtatccgcctacgatcagcttaaggctcccgcatcacccggcgccggaaacccccccggcacccctaaaggaaagagagagctgatgtccaacggccccggcagcataattggggccaaagcgggaaaaaactccggcaaaaagaaagggttaaacaacgaattgaacaacctgcctgtcatttctaatatgactgcagctctcgactcttgcagcgcagcagacggctctctagctgcagagatgcctaagctcgaagcggaaggtctcatagataagaagaaccttggcgacaaagaatag

SEQ ID NO: 205532 - DNA, 2124 bp, Artificial Sequence
  derived and/or modified sequence
atgagcgtgaacatcagcaccgccggcaagggcgtggaccccaacactgtggacacatacgattcaggtgatgattgggagataggcgtcggaaacctgattatagatctcgatgctgacctggagaaagataggcagaaatttgagatgaataactctacgacgactacatcgtccagtaactctaaagattgtgggggtcctgcttcatccggggccggcgcgacagccgctctggcagatggactcaagtttgcgtctgtgcaagcctcagcccctcaaggcaattcgcacaaggaaaccagcaaaagcaaagtgaagcgctctaaaacttcaaaagacgcaaacaaatcactgccatccgcagcactatatggcatccccgaaatttctagtacaggaaaacggcaagaggtccaaggaaggcccggagaggcaacaggcatgaatagtgccctcgggcagtctgtttctagcggtgggagcggcaacccgaactccaactctacttccacatctacctccgcagccaccgccggtgccggcagctgcggtaagagtaaggaagagaagccagggaaatctcagtcttccaggggtgctaaaagagataaagatgccgggaagagccggaaggataaacatgacctgctacagggacaccagaacggcagcggctcccaggcgccttccgggggtcacctctatggttttggcgcaaaaagcaacggagggggtgcgtccccttttcattgcgggggaactgggtcaggaagcgtagcagccgcaggcgaagtcagcaagagtgctccggactccggcctgatgggaaattctatgcttgtcaagaaagaggaggaagaggaggaatcgcaccgcagaataaaaaaactcaagaccgaaaaagtggatcccttgttcactgtgcctgcccctccacctccaataagtagctccctcactcctcaaatcctccccagctattttagcccttcctcttcgaacatagccgccccggtggaacaactactggtccgaacacgttcagtgggggttaacacatgtgaagtcggagttgtaacggagcctgagtgcctgggcccatgtgaacccggaaccagcgtgaacttggaagggattgtatggcacgaaaccgaggaaggggtattggtcgtcaatgtgacctggcgtaataaaacgtacgtcggcacgctcctcgactgcaccaaacacgactgggctcccccccgattctgcgagagtcccacaagtgacctggaaatgcgcggtggacggggccgcggtaagagggctaggagcgctgctgctgcgccaggctccgaagcaagctttacggagtctagggggctacagaataagaaccgtgggggggctaatgggaagggacggaggggatcgctgaatgcaagcggaaggcgcaccccacccaattgcgccgctgaagatattaaggcatctcccagctctactaacaagaggaagaataaacctcccatggaactagatctcaacagctcaagcgaagataacaagcctggcaagcgcgttagaactaatagtcgttcgacacccacaacccctcaaggcaagcccgagactacctttttggatcagggctgctccagtcccgtgttgatcgactgtccgcacccaaactgtaacaagaagtataagcacataaatgggctgcgatatcaccaggcccacgcccatctggatccggagaacaagctcgagttcgaacctgacagtgaagataagatctcagattgcgaggaggggctgtctaatgtggccctggaatgctcggagccctctacctccgtgagcgcctacgaccaactgaaggctcccgcatcgcctggggccggcaatccccccgggacacctaaaggcaagagggaactaatgagtaacggacccggctcaatcattggagcaaaagctggcaagaactcgggcaaaaaaaagggcctcaacaatgagctgaataatctgcccgtaataagcaatatgacagctgcgttagatagctgttcggcagctgatggcagcttggctgcggaaatgccaaaactggaggcagaaggactgatcgactag

SEQ ID NO: 205533 - DNA, 4539 bp, Artificial Sequence
  derived and/or modified sequence
atgtcagttaacatttctacagcagggaaaggcgtggatccaaatactgtcgatacttacgattcaggagatgattgggagataggcgtgggtaacctgattattgatctggacgccgatctagaaaaagacagacagaaatttgaaatgaacaactcaacaaccacaacctcaagttccaacagtaaggactgtggtggtccagcttcaagcggtgctggggcaaccgctgcattggctgacgggctgaaattcgcatccgttcaagcgtcagctcctcaggggaactctcataaggagacttcaaaatccaaggtgaaacgatcgaaaacttcaaaggatgcaaacaagtccctgccttccgcggctctctacggaatcccagagatatcatcgacaggaaagaggcaagaagtgcaggggagaccaggtgaggcgaccggaatgaactccgccctgggacaaagcgtgtcttccggaggcagcggcaatcccaactcaaatagcacgtcaacctctactagcgctgctactgctggagcagggtcctgcggcaagtctaaagaggaaaagcccggaaaaagtcagagcagcaggggcgctaaaagagataaggacgctggcaaaagccggaaggacaagcacgatttgctgcagggccatcagaacggcagcgggagtcaggcaccttctgggggacacttatatgggttcggagccaagtctaatggcggtggcgcatccccatttcactgtggtggcacgggcagcggttctgtggcagctgcaggagaagtaagcaaatctgcacccgacagtggactcatgggcaattcgatgttggtgaagaaagaggaggaggaggaagaatcgcatcgtaggattaagaagctgaagacagagaaagtggatcctctttttactgttcctgcccctcctccacccatctcttcttccctgacaccccagatcctgcccagctatttttccccgtcgtcctctaatattgcagcccctgttgaacagctcttggtacgaacccggagcgtgggcgtgaatacgtgtgaggtcggcgtagtcacagagcctgaatgcctagggccatgtgagcccggaacatcagtgaacttggagggtattgtttggcacgagactgaggaaggcgttttggtggtaaacgtaacttggaggaacaagacatatgtcggaacactactggattgtacaaagcatgactgggccccacccaggttttgcgaaagcccaacaagcgacctcgaaatgaggggaggacgtggtcggggaaaacgggcacgttctgctgcagccgcacctggttcggaggcctcatttacagagtcaaggggtctccaaaataagaatcggggaggcgcaaatgggaaaggcaggcgaggctccctgaacgcttccggacggaggacacccccaaactgtgctgctgaggacatcaaagcttcaccatcttccaccaataagaggaaaaacaagccacctatggagttggacctgaactcctcttccgaagataataaaccaggaaagagagtacgcacaaacagcagatccacccccacaactccccagggcaaacctgaaacaacctttttggatcaggggtgtagttcgcccgtactcatcgactgccctcatccgaattgcaataaaaaatacaaacacatcaatgggctcaggtaccatcaagcccatgcgcacttagacccagaaaacaaactggaattcgaacctgactcagaagataagattagtgattgcgaggaaggcctttccaacgtggccctcgagtgcagcgaaccatcaactagcgtaagcgcctacgaccagctgaaagccccagcatctcctggtgctggcaacccaccagggacccccaagggaaaaagagaactgatgagtaatggtcctggaagtattattggagctaaggcgggaaaaaacagtggcaaaaaaaagggactgaataatgagctgaacaacctacccgtcatttctaacatgacagccgctctggactcctgtagtgccgctgatggctccctggcggcagagatgcctaagttagaagcagaggggctcatcgacaaaaaaaacttgggcgataaagaaaagggcaagaaagcaactaactgcaaaacagacaagaacttatctaaactgaagtctgcacgccctatcgcgccagcacccgcacctacacctccacagctgattgccatccctacggccacttttacaaccactacaaccggaacaatccccggacttcctagccttacaacgactgttgtccaggctactcctaagtcaccccctcttaaacccatccaacctaagccgaccattatgggtgagccgataaccgtaaacccagccttggtgtcgctcaaggataaaaagaaaaaagagaagcgcaaattgaaggataaggagggaaaggagaccggctccccgaaaatggacgcgaagctgggaaagctggaggattccaaaggcgcttcaaaagaccttcctggccacttcttgaaggatcacctaaataagaatgagggcttagccaacggactctccgagtcgcaggagtcccggatggcgagcatcaaagcagaagccgataaggtgtatacatttactgacaatgcaccatctccctccatcggcagtgcatcaagactcgagtgttcaacccttgtgaacggacaggcccctatggctccgctgcatgtgctcacacaaaatggcgcagagtccagcgctgcgaaaactagctctcctgcatacagtgatatcagtgatgccgcagatgatgggggatcagatagtcgatccgaaggtatgcgttcgaaagcctcttctccttctgatatcattagttccaaggactcggtcgtaaaggggcatagcagtaccactgctcagtccagccaactcaaggagagccattcaccctattaccactcttatgacccttactactccccttcctacatgcatcccggtcaggtcggggctccggctgctgggaatagtggatccactcagggcatgaaaattaaaaaggaatcagaggaggacgccgagaaaaaagacaaggctgaacagctcgactcaaaaaaagttgatcataatagcgcttctctgcaacctcagcatcagagcgtaatcacgcagaggcatcccgcattggctcagtcactttattacgggcagtatgcttatggcctgtatatggatcagaagagcctaatggctacatcacccgcatacagacagcaatacgaaaagtactacgaagaccagaggctcgccgagcagaaaatggcacaaacaggaagaggcgactgcgagcggaagagcgaactgcccctcaaagaactaggaaaggaggaaactaagcagaaaaacatgccgagtgctacaatcagtaaggccccttccacccctgaaccaaacaagaatcacagtaagctgggacctagtgtgcctaataaaactgaggagactggcaagtcacagctgctgagcaaccaccaacagcagttgcaagccgactcattcaaagccaaacagatggaaaatcatcagctgataaaggaagccgtggaaatgaaatccgtcatggatagtatgaaacagactggcgtggatcccactagcagattcaagcaagatcccgactcccgcacttggcatcactacgtctaccagcccaaataccttgatcagcagaagtccgaggagctggaccgggagaagaagctcaaggaggacagtcctcggaaaacgcccaacaaggagagcggcgtccccagcttacccgtcagtctgacatcaatcaaagaggagcctaaggaggccaagcacccagactctcaatccatggaggagagcaagttaaagaatgacgacagaaagacccctgttaattggaaggatagtcgcggaacacgcgttgctgtttcaagccccatgagtcagcaccagagctacatccagtaccttcatgcgtacccctacccccagatgtacgatccatcccaccccgcatatcgtgcagtctcccccgtgttgatgcattcttaccctggggcatacctctcccccggattccattatcccgtatacggtaaaatgtcagggagagaggaaacagaaaaagtgaacaccagcccgtctgtcaatactaagactactacggagagcaaggccctggatctcctccaacagcatgccaaccaataccgatcaaagtctccagcccctgtggagaaggctactgcagagcgggagagggaggcggagagagagcgcgatcggcattccccatttggccagagacacctgcatactcaccatcatacccacgttggaatgggttaccccttgattcccggacaatacgatccctttcagggtctgacaagtgcagcattagtcgcctctcagcaggtggccgctcaggcttcagctagtggcatgttccctgggcagcgcagagaatag

SEQ ID NO: 205534 - DNA, 3258 bp, Artificial Sequence
  derived and/or modified sequence
atgcgaggaggcagagggcgaggcaaaagggcccgatcggccgcagcagcacctggatcagaagcctcctttactgagagcagaggattgcagaacaagaacagagggggagcaaacgggaaggggaggagaggctccctgaacgccagcggcaggcggacacctcccaattgtgcggcagaggatataaaggctagcccctcatcaacgaacaaacgtaaaaacaagcccccaatggaactcgacctgaattcatcttccgaggacaacaaacctggtaagcgagtgcgcacaaactctcgatctacccctaccacccctcagggaaaaccagagacgacatttctcgatcaaggttgttcatcaccagtgctgattgactgcccacatcctaactgcaacaaaaagtacaagcatattaatggactgagataccatcaggcccatgcacatttggatccagagaacaaactagagttcgagcctgattccgaagataagatatccgactgcgaggaaggactaagcaatgtcgctctcgaatgtagtgagccctcgacatctgtttctgcctacgaccaacttaaggcaccagcctcacccggagcgggaaaccctccaggaacgcctaaaggaaaacgagaactgatgtcgaacggcccaggcagcattatcggggcaaaagccggtaagaattcgggaaaaaaaaagggcctgaataatgagctcaacaatttgccggtgatctcaaacatgactgctgcactagatagctgctcagcggctgacggttctttggcagccgaaatgccaaaacttgaggccgagggtttaatagataagaagaacttgggcgataaggagaaaggcaaaaaggctacaaattgcaagacagacaagaatctgtccaagttaaaaagcgcccgacccatcgcaccagctccagcacctaccccgcctcagctgatcgccattcccacggcaacctttacaacgaccacgactggaactattccgggacttccaagcctgaccaccacagtggtacaagccactcccaaatcacccccacttaaacctatccaacccaaacctacgatcatgggagaacccattacggtgaaccccgctctggtatctctcaaggataaaaaaaagaaagaaaagcgaaaactgaaggacaaagaggggaaggagaccggatcccctaagatggacgctaagttggggaagttggaggatagcaaaggagcaagcaaggatctgcccggtcatttcttgaaggatcatctgaataagaacgagggcctcgcgaacgggctgtctgagtcccaggagtcaaggatggcaagtatcaaagcagaggctgataaagtgtatacctttaccgataatgcaccctctccttccatcggctcagcatcaagattggaatgttctaccttggtcaacggccaagcgccaatggctccattgcatgtcttgacccagaacggtgccgagagctctgccgcaaagacaagctcacctgcgtactctgacatatcagacgccgctgacgacggagggagtgactctcgatccgagggcatgaggtccaaggcctcctcacctagcgatatcataagcagcaaagactccgtcgtgaaaggccactcctctaccaccgcccaaagcagccagctgaaggaatcacactccccatactaccattcgtacgatccctattattccccatcatatatgcaccccggtcaggtaggtgcaccggcagccggaaactccgggtcgactcaaggtatgaagatcaagaaagagtctgaggaagatgccgaaaaaaaagataaggctgaacaacttgacagcaaaaaagtggatcataacagtgccagtttgcagccgcaacatcaaagcgtcatcacgcagcgtcaccctgccctggctcagtccctgtattacggacaatatgcatacggactgtatatggaccagaaaagccttatggcgacctctcctgcttaccgtcagcagtatgaaaagtattatgaagaccagcggttggctgagcagaaaatggcccagaccggccgtggcgactgcgaaaggaagtcagagctgcctttgaaggaattgggcaaagaagagacaaaacaaaagaacatgcccagtgccacaatcagcaaagccccaagcactccagagcccaacaagaatcatagtaagcttgggccttccgtgccgaataaaaccgaagagacaggaaaatcgcagctgctatccaaccatcagcagcaattgcaggccgactccttcaaggccaaacagatggaaaatcaccaacttatcaaggaggcagtcgaaatgaaatctgtgatggatagtatgaaacagaccggggtggaccctactagcagatttaagcaggaccccgacagccgcacatggcaccattacgtgtatcagccaaagtacctagatcagcagaaatctgaagaattagatcgagagaagaagctgaaggaggatagtccccgaaaaacccccaataaggagtcaggcgtcccctcccttcccgttagcttaacatcaattaaggaggagcccaaagaagccaaacatcctgacagccaatcgatggaagaatcgaaactcaaaaatgacgataggaaaacccccgttaactggaaggattctcgcggaactcgtgtggccgttagcagtccaatgagtcagcaccagagttacatccaatacctacacgcctatccttatccacagatgtacgatccaagtcacccagcctaccgggctgtgagccccgtgttgatgcatagctatccaggcgcttatttatcacccggttttcactacccagtgtatggcaaaatgagtggccgtgaggagacagagaaggtgaacaccagcccttctgtcaacaccaaaaccactaccgaaagtaaggcgctggatcttctccagcagcacgcgaaccaatataggagcaaatcccctgctccagtcgagaaggcaaccgccgagagagaacgggaggccgagagagagcgggatagacactcaccatttggccaaaggcaccttcacactcatcaccacactcacgtcggcatggggtacccattaatcccgggacagtacgacccttttcagggcctaacatccgctgccctggtagccagccaacaggttgccgcacaggcatcagcctctgggatgtttccaggccagagacgggaatag

SEQ ID NO: 205535 - DNA, 2148 bp, Artificial Sequence
  derived and/or modified sequence
atgagcgtcaatatttccacagcaggaaagggtgtagacccaaatacagttgatacctatgactccggtgacgactgggagatcggcgttggcaacctcatcattgatttggatgccgatctcgagaaggatcgacagaaatttgagatgaacaattccacaacaacaaccagtagctccaatagtaaagattgcggcggacccgcaagctctggagcaggagcaacagccgctctggcggacggattaaagttcgcatcggtgcaagcctccgctccccagggcaactcgcacaaagagaccagcaaatcaaaggtcaaaaggagtaagacgagtaaggacgctaacaagtcactacctagcgccgctttatatggcattccggagattagctccaccggcaagcggcaagaggtgcaaggaagaccaggtgaggctaccgggatgaatagcgctcttggacagtctgtgagcagcgggggtagtggaaatccgaattccaactccacaagcacctctaccagtgcggctactgctggagccggttcttgcgggaagagtaaggaggagaagcctggcaagtcacagagtagcagaggcgctaagcgtgacaaagatgcaggcaaatccaggaaagataagcacgacctgctgcagggccaccaaaatggatccgggagccaggctcctagcggaggtcatctgtatggctttggtgccaaaagtaatggcggtggggcatccccattccattgtggaggcacgggaagtggctctgtggcggcagccggagaagtttccaaatcagctcctgactccggtctaatgggcaattccatgctggtgaagaaggaggaggaggaagaggagagccaccggagaattaagaagcttaaaacagagaaggtggatcctttgtttaccgttcccgctccccctccccctatatcatcctcactgacaccgcagatcctccccagctatttctctccatcaagcagtaacatcgcagcacctgtcgaacaacttctagtccgaactcggtctgtcggggtgaacacatgtgaggttggggtggttacagagcccgaatgtcttggcccttgtgagccagggaccagtgttaatctggaaggaatagtctggcacgagactgaagaaggtgtgttagtcgtgaatgttacatggcggaacaaaacatacgtcggaactctgttagactgtaccaaacatgactgggcccctccaaggttttgtgagtccccaaccagcgacctggaaatgcggggaggcaggggaagaggcaaaagggccaggtctgccgcagcagctcctggcagtgaggcaagctttaccgagtctagaggcctgcagaataagaacaggggcggtgccaacgggaagggccgacgcggatcacttaatgcgagcgggaggagaacaccgccaaactgtgccgcagaggatataaaggcctcacctagctctacaaataagagaaagaacaagcctcctatggagctggatctgaacagttcttctgaggacaacaagcccggaaaacgtgtccgaaccaactcacgctcaacaccaacaactccacagggaaagccagaaacaacattcctcgaccagggatgttcttcacctgtgctgatcgattgtccacaccccaactgcaacaagaaatataaacatatcaacggactcagataccaccaggcccacgcccacctcgatcccgaaaacaaattggagtttgagcccgactcagaagataaaattagtgattgtgaggagggattgtcaaacgtcgctctggaatgcagcgagcctagcacctcagtatctgcctatgatcaactgaaggcacctgccagtcctggagctgggaatcccccaggcacaccaaaaggaaaaagggagctaatgagtaacggcccagggtcgatcattggagctaaggcagggaaaaactctggcaagaagaagggcctaaacaacgagttaaataatctgcctgtgatcagcaatatgaccgccgctctagatagctgttccgcagccgatggctcacttgccgctgagatgccgaagttggaggccgaaggattgattgataagaaaaatttgggagacaaggagtag

SEQ ID NO: 205536 - DNA, 2124 bp, Artificial Sequence
  derived and/or modified sequence
atgagcgtgaatatcagcaccgccggaaagggagtggatcctaacaccgtggacacctatgatagcggtgatgactgggaaattggcgtgggcaatcttatcattgatctggacgcagatttagagaaagaccgccagaaatttgaaatgaacaatagcacaactacgacatccagctcaaactcaaaagattgtggaggacccgcaagtagcggtgccggtgccaccgcagccctggccgatgggctgaaattcgcttccgtccaggcgtcagcgccacaggggaattcacataaagagacctccaagtcgaaagtgaagaggagtaaaacttctaaggacgcaaataagtcgctcccatcagctgccctttatggcattcctgaaatatcatccacagggaagcggcaggaagtgcagggcagaccaggagaggctacggggatgaatagtgcacttgggcaatccgtcagttcaggagggagcgggaatccaaacagcaattccacgagcacctctacatccgccgcaacagccggagccggtagctgcggaaaatcgaaggaggaaaagccgggtaaaagtcagagttctaggggcgcaaagcgagacaaggacgcgggaaaatcaaggaaggataagcacgacttgctgcaggggcatcagaatgggagcggttctcaggcaccatctggaggacacctgtacgggttcggtgcaaagtcaaatggtggcggtgcttcaccatttcattgcgggggtacggggtctggctctgtcgctgcagctggcgaggtgtccaaaagtgcacccgacagcggcctgatgggaaactccatgcttgtcaaaaaggaagaagaagaagaagaaagtcaccgcagaatcaagaaactgaaaactgaaaaagtggaccctttgttcacagtcccagccccaccccctcccatctcctcgagcctgaccccccagatactcccatcatatttctccccctctagttccaatattgctgcaccggtagagcagctcttggtgcgcacgcgcagcgtgggcgtcaatacttgcgaggtaggagtagttactgaaccagagtgcctaggcccttgcgaacccggaacttcggttaatctggaagggattgtctggcatgagactgaggaaggggtgctggtcgttaatgtgacttggagaaataaaacctatgtgggcactttattagactgcaccaagcacgattgggccccacctcgcttctgtgagagccccacaagtgatctggaaatgcgtgggggaaggggtcgtggaaaaagggcccgaagtgctgctgctgctccaggaagtgaggcatccttcaccgaatctcgaggactacagaacaaaaaccgcggaggggcaaacggcaagggcaggcgcggaagcttgaatgcctccggccgtagaacacccccaaactgtgccgcagaagatattaaagctagcccatcttctaccaacaaaaggaagaacaagccgccaatggaactggatctcaactcatcctcagaggacaataagccgggaaagagggttcgcaccaacagtcgctcgacacccacaacacctcagggtaaacccgagaccacgtttctggaccaggggtgtagcagccccgtactgatcgattgcccacacccgaattgcaacaagaagtacaagcatatcaacggactgagataccaccaggctcacgcacatctcgaccctgagaacaagctggaattcgaacctgatagcgaagataaaatttccgactgtgaggagggcctatcgaacgtggcactcgaatgcagcgagccttcaaccagtgtatccgcctatgatcagttgaaggcgccagctagtcctggggctggaaatccaccaggtacccctaaggggaaacgcgagctcatgagtaatggcccaggttcaattatcggcgcaaaggcagggaaaaactcaggaaaaaagaaaggattaaataatgaattgaataatttacccgtgatcagcaacatgactgctgcactggattcctgctccgcagccgatggctcactcgcagcagaaatgccaaaactcgaggctgagggcctcatcgactag

SEQ ID NO: 205537 - DNA, 5958 bp, Artificial Sequence
  derived and/or modified sequence
aaaaggtgattatccttgtgttgttgataaagggattttctttttagctaccgtaagatgcttactgtcataggtttatttttcgggtttggttattttcctttaaacctgatattggactgtgaggacaatacatgagccaccttactctccatccttccctgtcccctttactgattccccaatactaatcgttttttattctggtaacacccagacaagaaatattcgacttttcccccccccttcacaggaaaaggtggacctggactgagggtgtaaaatccctggacacattcgtggggcaggaaaaagaagaggaagattagaagattttttttttctttgagagaaagcccagcggagataaacgaatgtcccctcatctccaaagaaaagttcatcggatttttattctagagagctcatcttcaggatgtcagtgaacatttctactgcaggaaaaggtgtggatccaaatacagttgatacttatgacagtggcgatgattgggaaatcggggttggaaatttaataattgatttggacgctgatttggagaaggacagacagaaatttgagatgaataattccaccaccaccactagtagcagcaactccaaggattgtggaggtccggcctccagtggggctggtgctaccgcagccttagctgatggcctaaaatttgcttctgttcaggcctctgctccccaggggaattcacacaaagagaccagcaaatcaaaagtgaaaaggagtaaaacttctaaggatgctaataaatctctgccttctgctgccttgtatgggattcccgagatcagcagcactggcaagaggcaggaagtccaagggcgccctggagaggcaactggcatgaattcagcgctgggtcaaagtgtgagcagcggcggcagcggcaacccaaacagcaatagtaccagcaccagcacctctgccgccaccgcgggggcaggctcctgtgggaaaagcaaagaggagaagccaggtaaaagccagagcagccgaggcgccaagcgggataaggatgcggggaaatccaggaaggacaagcacgacctgcttcagggccaccagaatggcagtggcagccaggccccttccggggggcacctctatggctttggggccaagagcaatggaggtggcgcgagccccttccactgcgggggcactgggagtggcagcgtcgccgctgcaggggaagttagcaaaagtgccccggattcagggctcatgggaaactctatgttggtaaagaaggaagaggaggaggaggagagccacaggcgaatcaagaaactgaaaactgagaaggttgaccccctgtttacagtgccagcgccaccaccgccgatttccagcagtctcacgcctcagattctaccctcctacttttccccatcttcatccaatattgcagcaccggttgaacagcttttggttcggactcgttctgtgggtgtcaatacatgtgaagttggagtagtgacagagccagagtgtcttgggccctgtgaacctgggaccagtgtgaatttggaagggatcgtgtggcatgaaacagaagaaggtgtcctagtggtcaatgtcacgtggaggaacaaaacgtacgtgggaaccctactggactgcaccaagcacgactgggcccctcccaggttttgtgagtcaccgacaagtgacctggagatgagagggggccggggcagagggaagagagcgaggtctgctgctgctgccccgggctccgaggccagcttcacagagtccagagggctgcagaataagaacagagggggggccaatgggaaagggaggcggggcagcctcaatgccagcggacgaaggacacccccaaattgtgctgctgaggatatcaaagccagcccttcctccaccaacaaaaggaaaaacaagcctccaatggagctggacctgaactccagctctgaggacaataagcctggaaagcgtgtccgcacaaattccagaagcactcccactacccctcaagggaaaccagagactacttttttggaccaaggctgctcttctccagtgttaatcgactgtccccacccaaactgcaacaaaaagtacaagcacattaacggcctgaggtaccaccaggctcatgcacacttagacccagaaaacaagctggagttcgagcctgacagtgaggacaagatctcggactgtgaggaaggattgagtaatgtggcacttgaatgcagtgagccaagcacaagtgtatctgcttatgaccagttgaaggcaccggcatcccctggtgctggaaacccacctgggaccccaaagggaaagagagagctgatgagcaatggcccaggttccattattggtgctaaagctgggaagaattctggcaaaaagaagggccttaacaatgaactgaacaaccttccagtaatctccaacatgacggctgcgttagacagttgctcggcagcagacggcagtttggctgctgagatgcctaaactggaagcagaaggattaattgacaagaaaaatttaggagataaagaaaagggcaaaaaagctaccaactgcaaaacggacaaaaacctctctaaactgaaaagtgcccggcccattgcccctgccccagcccccactcccccgcagctaatcgctatacccactgcaacctttacaacgaccaccactgggacaatacccggactgccctccctcacaacaactgttgttcaggctacaccaaagagtcctccgttaaaacccattcaaccaaagcccacaattatgggagagcccatcaccgtgaacccagctctggtgtcactcaaagacaaaaagaaaaaggagaagcgaaagctaaaggacaaagaagggaaagagacgggaagcccaaaaatggatgccaagctggggaaactagaggactccaagggggccagcaaagatttacctgggcattttttaaaggatcatctcaacaagaatgaagggctggcaaatggactgtcggagtctcaggagagccgcatggccagtatcaaagctgaggccgataaggtttacactttcacagacaacgctcccagcccttccatagggagcgcctcgaggctggaatgcagcactttggtgaacgggcaggcaccaatggcacctctgcatgtgttgacccagaatggggcagagagttcagctgcaaagacaagcagcccggcctattcagacatatctgatgctgctgacgatggtggttctgacagcaggtcggagggtatgagatcaaaggccagttccccatcagatattatttctagtaaggacagtgttgtaaaagggcattcttcaactacagcacaatcatctcaactgaaagagtcccattctccctattaccacagctatgatccttattattctccaagttacatgcaccctgggcaggtcggtgcccctgcagctggaaatagtgggagcacgcagggaatgaagatcaagaaggagtctgaggaagatgctgaaaagaaagacaaggcagagcagttagattctaagaaagtggaccacaattctgcatccttacagcctcagcaccagtcggtgatcacacaaagacatcctgccctggctcagtcactttattatggccagtatgcatatgggctctatatggaccagaagtctctgatggccaccagccctgcctatagacagcagtatgagaagtactatgaggaccagaggctggcagagcagaaaatggcccagactgggagaggagactgtgaaaggaaaagtgagctccccttgaaagagctgggcaaggaggaaactaaacagaaaaatatgccatcggccacaatctcaaaagctccctctactccggagcctaacaaaaaccattctaaactagggccatcagtgcctaataaaactgaggagacaggtaaatcgcagcttctctccaatcaccagcagcagcttcaggccgacagcttcaaagctaagcagatggaaaaccaccagcttattaaggaggctgtagaaatgaagtctgtcatggactctatgaagcagacaggtgtagacccaacctcgagatttaaacaagacccagattcaagaacatggcatcattatgtataccagcccaaatatctggatcagcaaaagtcagaagaacttgatagagagaagaaattaaaagaggatagtccgaggaaaactcctaataaagagagtggtgtgcccagccttcctgtatcgttaacaagcattaaagaggagcccaaagaggccaagcatcctgattctcaatcaatggaggagagcaagctgaaaaatgatgatcgaaagactcctgtgaactggaaggactctcggggaacaagagtggctgtctcctcacccatgagtcagcatcagtcatacatacagtacttgcatgcttatccttacccacagatgtacgaccccagccatcctgcataccgggctgtttctcccgtcctaatgcacagttatcctggggcatatctctctccaggatttcattatcctgtttatgggaagatgtcagggagagaagagacagagaaagtcaataccagccctagcgtcaacacgaaaacaaccactgaatctaaagcactggatttgctccagcagcatgctaaccaataccgcagcaagtctcctgctcctgtggaaaaggctacagctgagcgggaacgggaggcagaaagggaaagggatcgccactcccccttcggccagcggcacctgcacacgcaccaccacacccacgttggcatgggttacccgctaatcccgggtcaatatgacccttttcaaggcttgacctctgctgcccttgttgcctctcagcaggtggctgcccaggcatctgcatctggaatgtttcctggacaaagaagagaataacaagattggacatgtacattgtcatgtgactggatcacatggggaagcgctttatacagacatcagttccatggtgttaatttgaaatgccttaatggcaggcaaaaaccagtcatttcatttttgtaaattacagattttatcacagagtaacaaatgttgctgtaattaaacttctgttttatatatatatacgtatacatatctgtatatatacatatatatatatataaatataaatatattctttactttttgtatcagtaaccaggctcgcacacacagggtctgctgccacgtcgcaaaccactcagtaaaggaaattaaaaatgtatttgtcatgttaaaaagtgttagccacaaaaggctacttactttcttttccttttcctttaaaattgtaaataaataatgttatgtatcagtgtgcctgaaccttgcatatccttcacatatttcccataagcccctcagaaaggctaactgtgatgatgacactttggtacaatttagatgtctatttggtggctcctgttaaagacgcaccagtgtaaaatgttcctgtagtcactgtttgtacttgtgtattgtggaaaaagtacttttggaaggcatggggttgccagtaccacaaaaactgtgttgtatataatgtaaagattaaaatggggaaataatgagcatctgtgaataatgaggtgtcattttttgataatcttgaatggcaaataacccaatagcctgcgtaccagagacatctgtgattgttctattacttgaatagttctacagtctttttttttttttaatgtttacaattatccagttttagaagagagagactttaacgccattgcctggttacttgttttatgctgtaatctagtttattttatgtaaaatgtatattgaatgctttccttttttatacctgccttaaataatttggcaatcagaattaaaaagtttttttttttttaaat

SEQ ID NO: 205538 - DNA, 2605 bp, Artificial Sequence
  derived and/or modified sequence
cactccccctgtgtgtgtgttgtgtttcagtcctgatttagtgttgcagaacaagcttgttgtgtgtgtgcaccagggggatttttgttttgctttttttaaattttaatttttgcttttataaaaaatacacaggacggtctgtgacatttgatggtccatcttctttaataataaatttgttgaagagattataatttccaaaataaagcggctgcaaccaaacacattcaatgcagttagaaggaaaaggtcaactcgatccaatacagaccgaaaaggtggacctggactgagggtgtaaaatccctggacacattcgtggggcaggaaaaagaagaggaagattagaagattttttttttctttgagagaaagcccagcggagataaacgaatgtcccctcatctccaaagaaaagttcatcggatttttattctagagagctcatcttcaggatgtcagtgaacatttctactgcaggaaaaggtgtggatccaaatacagttgatacttatgacagtggcgatgattgggaaatcggggttggaaatttaataattgatttggacgctgatttggagaaggacagacagaaatttgagatgaataattccaccaccaccactagtagcagcaactccaaggattgtggaggtccggcctccagtggggctggtgctaccgcagccttagctgatggcctaaaatttgcttctgttcaggcctctgctccccaggggaattcacacaaagagaccagcaaatcaaaagtgaaaaggagtaaaacttctaaggatgctaataaatctctgccttctgctgccttgtatgggattcccgagatcagcagcactggcaagaggcaggaagtccaagggcgccctggagaggcaactggcatgaattcagcgctgggtcaaagtgtgagcagcggcggcagcggcaacccaaacagcaatagtaccagcaccagcacctctgccgccaccgcgggggcaggctcctgtgggaaaagcaaagaggagaagccaggtaaaagccagagcagccgaggcgccaagcgggataaggatgcggggaaatccaggaaggacaagcacgacctgcttcagggccaccagaatggcagtggcagccaggccccttccggggggcacctctatggctttggggccaagagcaatggaggtggcgcgagccccttccactgcgggggcactgggagtggcagcgtcgccgctgcaggggaagttagcaaaagtgccccggattcagggctcatgggaaactctatgttggtaaagaaggaagaggaggaggaggagagccacaggcgaatcaagaaactgaaaactgagaaggttgaccccctgtttacagtgccagcgccaccaccgccgatttccagcagtctcacgcctcagattctaccctcctacttttccccatcttcatccaatattgcagcaccggttgaacagcttttggttcggactcgttctgtgggtgtcaatacatgtgaagttggagtagtgacagagccagagtgtcttgggccctgtgaacctgggaccagtgtgaatttggaagggatcgtgtggcatgaaacagaagaaggtgtcctagtggtcaatgtcacgtggaggaacaaaacgtacgtgggaaccctactggactgcaccaagcacgactgggcccctcccaggttttgtgagtcaccgacaagtgacctggagatgagagggggccggggcagagggaagagagcgaggtctgctgctgctgccccgggctccgaggccagcttcacagagtccagagggctgcagaataagaacagagggggggccaatgggaaagggaggcggggcagcctcaatgccagcggacgaaggacacccccaaattgtgctgctgaggatatcaaagccagcccttcctccaccaacaaaaggaaaaacaagcctccaatggagctggacctgaactccagctctgaggacaataagcctggaaagcgtgtccgcacaaattccagaagcactcccactacccctcaagggaaaccagagactacttttttggaccaaggctgctcttctccagtgttaatcgactgtccccacccaaactgcaacaaaaagtacaagcacattaacggcctgaggtaccaccaggctcatgcacacttagacccagaaaacaagctggagttcgagcctgacagtgaggacaagatctcggactgtgaggaaggattgagtaatgtggcacttgaatgcagtgagccaagcacaagtgtatctgcttatgaccagttgaaggcaccggcatcccctggtgctggaaacccacctgggaccccaaagggaaagagagagctgatgagcaatggcccaggttccattattggtgctaaagctgggaagaattctggcaaaaagaagggccttaacaatgaactgaacaaccttccagtaatctccaacatgacggctgcgttagacagttgctcggcagcagacggcagtttggctgctgagatgcctaaactggaagcagaaggattaattgacaagaaaaatttaggagataaagaaaa

SEQ ID NO: 205539 - DNA, 2737 bp, Artificial Sequence
  derived and/or modified sequence
cgcctgtaggtttgctacatgggatcattactgatcacggtgactctgaagtctggaactgaaggcggaatgagaagttgggaaaacttttttctctaaactctctgttttttaaaaaactattattctcgatgcttgttaagaggaaaaaaaaacctttggtgcttctgttgtgaatgtgaaacattattttccagctgtacagtgacacattttttttaaggagaaaaggactgattcgtttgccaaaaggggggtggggaggtggaataatgttatcgagtgattattctggctgagatgtgttatttggtttcttccttcttgatcatttggtgtttaagtaaaatgaggcacaggcttgtttgccgagtggagtgggaaaggcattttgatttgctggcctaattaaaaaatgataaaggattaaaaggaaaaggtggacctggactgagggtgtaaaatccctggacacattcgtggggcaggaaaaagaagaggaagattagaagattttttttttctttgagagaaagcccagcggagataaacgaatgtcccctcatctccaaagaaaagttcatcggatttttattctagagagctcatcttcaggatgtcagtgaacatttctactgcaggaaaaggtgtggatccaaatacagttgatacttatgacagtggcgatgattgggaaatcggggttggaaatttaataattgatttggacgctgatttggagaaggacagacagaaatttgagatgaataattccaccaccaccactagtagcagcaactccaaggattgtggaggtccggcctccagtggggctggtgctaccgcagccttagctgatggcctaaaatttgcttctgttcaggcctctgctccccaggggaattcacacaaagagaccagcaaatcaaaagtgaaaaggagtaaaacttctaaggatgctaataaatctctgccttctgctgccttgtatgggattcccgagatcagcagcactggcaagaggcaggaagtccaagggcgccctggagaggcaactggcatgaattcagcgctgggtcaaagtgtgagcagcggcggcagcggcaacccaaacagcaatagtaccagcaccagcacctctgccgccaccgcgggggcaggctcctgtgggaaaagcaaagaggagaagccaggtaaaagccagagcagccgaggcgccaagcgggataaggatgcggggaaatccaggaaggacaagcacgacctgcttcagggccaccagaatggcagtggcagccaggccccttccggggggcacctctatggctttggggccaagagcaatggaggtggcgcgagccccttccactgcgggggcactgggagtggcagcgtcgccgctgcaggggaagttagcaaaagtgccccggattcagggctcatgggaaactctatgttggtaaagaaggaagaggaggaggaggagagccacaggcgaatcaagaaactgaaaactgagaaggttgaccccctgtttacagtgccagcgccaccaccgccgatttccagcagtctcacgcctcagattctaccctcctacttttccccatcttcatccaatattgcagcaccggttgaacagcttttggttcggactcgttctgtgggtgtcaatacatgtgaagttggagtagtgacagagccagagtgtcttgggccctgtgaacctgggaccagtgtgaatttggaagggatcgtgtggcatgaaacagaagaaggtgtcctagtggtcaatgtcacgtggaggaacaaaacgtacgtgggaaccctactggactgcaccaagcacgactgggcccctcccaggttttgtgagtcaccgacaagtgacctggagatgagagggggccggggcagagggaagagagcgaggtctgctgctgctgccccgggctccgaggccagcttcacagagtccagagggctgcagaataagaacagagggggggccaatgggaaagggaggcggggcagcctcaatgccagcggacgaaggacacccccaaattgtgctgctgaggatatcaaagccagcccttcctccaccaacaaaaggaaaaacaagcctccaatggagctggacctgaactccagctctgaggacaataagcctggaaagcgtgtccgcacaaattccagaagcactcccactacccctcaagggaaaccagagactacttttttggaccaaggctgctcttctccagtgttaatcgactgtccccacccaaactgcaacaaaaagtacaagcacattaacggcctgaggtaccaccaggctcatgcacacttagacccagaaaacaagctggagttcgagcctgacagtgaggacaagatctcggactgtgaggaaggattgagtaatgtggcacttgaatgcagtgagccaagcacaagtgtatctgcttatgaccagttgaaggcaccggcatcccctggtgctggaaacccacctgggaccccaaagggaaagagagagctgatgagcaatggcccaggttccattattggtgctaaagctgggaagaattctggcaaaaagaagggccttaacaatgaactgaacaaccttccagtaatctccaacatgacggctgcgttagacagttgctcggcagcagacggcagtttggctgctgagatgcctaaactggaagcagaaggattaattgac

SEQ ID NO: 205540 - protein, 1203 aa, Artificial Sequence
  derived and/or modified sequence
KDQQTVIMTECTSLQFVSPFAFEAMQKVDVVCLASLSDPELRLLLPCLVRMALCAPADQSQSWAQDKKLILRLLSGVEAVNSIVALLSVDFHALEQDASKEQQLRHKLGGGSGESILVSQLQHGLTLEFEHSDSPRRLRLVLSELLAIMNKVSESNGEFFFKSSELFESPVYLEEAADVLCILQAELPSLLPIVDVAEALLHVRNGAWFLCLLVANVPDSFNEVCRGLIKNGERQDEESLGGRRRTDALRFLCKMNPSQALKVRGMVVEECHLPGLGVALTLDHTKNEACEDGVSDLVCFVSGLLLGTNAKVRTWFGTFIRNGQQRKRETSSSVLWQMRRQLLLELMGILPTVRSTRIVEEADVDMEPNVSVYSGLKEEHVVKASALLRLYCALMGIAGLKPTEEEAEQLLQLMTSRPPATPAGVRFVSLSFCMLLAFSTLVSTPEQEQLMVVWLSWMIKEEAYFESTSGVSASFGEMLLLVAMYFHSNQLSAIIDLVCSTLGMKIVIKPSSLSRMKTIFTQEIFTEQVVTAHAVRVPVTSNLSANITGFLPIHCIYQLLRSRSFTKHKVSIKDWIYRQLCETSTPLHPQLLPLIDVYINSILTPASKSNPEATNQPVTEQEILNIFQGVIGGDNIRLNQRFSITAQLLVLYYILSYEEALLANTKTLAAMQRKPKSYSSSLMDQIPIKFLIRQAQGLQQELGGLHSALLRLLATNYPHLCIVDDWICEEEITGTDALLRRMLLTNNAKNHSPKQLQEAFSAVPVNNTQVMQIIEHLTLLSASELIPYAEVLTSNMSQLLNSGVPRRILQTVNKLWMVLNTVMPRRLWVMTVNALQPSIKFVRQQKYTQNDLMIDPLIVLRCDQRVHRCPPLMDITLHMLNGYLLASKAYLSAHLKETEQDRPSQNNTIGLVGQTDAPEVTREELKNALLAAQDSAAVQILLEICLPTEEEKANGVNPDSLLRNVQSVITTSAPNKGMEEGEDNLLCNLREVQCLICCLLHQMYIADPNIAKLVHFQGYPCELLPLTVAGIPSMHICLDFIPELIAQPELEKQIFAIQLLSHLCIQYALPKSLSVARLAVNVMGTLLTVLTQAKRYAFFMPTLPSLVSFCRAFPPLYEDIMSLLIQIGQVCASDVATQTRDIDPIITRLQQIKEKPSGWSQICKDSSYKNGSRDTGSMDPDVQLCHCIERTVIEIINMSVSGI

SEQ ID NO: 205541 - protein, 1204 aa, Artificial Sequence
  derived and/or modified sequence
MKDQQTVIMTECTSLQFVSPFAFEAMQKVDVVCLASLSDPELRLLLPCLVRMALCAPADQSQSWAQDKKLILRLLSGVEAVNSIVALLSVDFHALEQDASKEQQLRHKLGGGSGESILVSQLQHGLTLEFEHSDSPRRLRLVLSELLAIMNKVSESNGEFFFKSSELFESPVYLEEAADVLCILQAELPSLLPIVDVAEALLHVRNGAWFLCLLVANVPDSFNEVCRGLIKNGERQDEESLGGRRRTDALRFLCKMNPSQALKVRGMVVEECHLPGLGVALTLDHTKNEACEDGVSDLVCFVSGLLLGTNAKVRTWFGTFIRNGQQRKRETSSSVLWQMRRQLLLELMGILPTVRSTRIVEEADVDMEPNVSVYSGLKEEHVVKASALLRLYCALMGIAGLKPTEEEAEQLLQLMTSRPPATPAGVRFVSLSFCMLLAFSTLVSTPEQEQLMVVWLSWMIKEEAYFESTSGVSASFGEMLLLVAMYFHSNQLSAIIDLVCSTLGMKIVIKPSSLSRMKTIFTQEIFTEQVVTAHAVRVPVTSNLSANITGFLPIHCIYQLLRSRSFTKHKVSIKDWIYRQLCETSTPLHPQLLPLIDVYINSILTPASKSNPEATNQPVTEQEILNIFQGVIGGDNIRLNQRFSITAQLLVLYYILSYEEALLANTKTLAAMQRKPKSYSSSLMDQIPIKFLIRQAQGLQQELGGLHSALLRLLATNYPHLCIVDDWICEEEITGTDALLRRMLLTNNAKNHSPKQLQEAFSAVPVNNTQVMQIIEHLTLLSASELIPYAEVLTSNMSQLLNSGVPRRILQTVNKLWMVLNTVMPRRLWVMTVNALQPSIKFVRQQKYTQNDLMIDPLIVLRCDQRVHRCPPLMDITLHMLNGYLLASKAYLSAHLKETEQDRPSQNNTIGLVGQTDAPEVTREELKNALLAAQDSAAVQILLEICLPTEEEKANGVNPDSLLRNVQSVITTSAPNKGMEEGEDNLLCNLREVQCLICCLLHQMYIADPNIAKLVHFQGYPCELLPLTVAGIPSMHICLDFIPELIAQPELEKQIFAIQLLSHLCIQYALPKSLSVARLAVNVMGTLLTVLTQAKRYAFFMPTLPSLVSFCRAFPPLYEDIMSLLIQIGQVCASDVATQTRDIDPIITRLQQIKEKPSGWSQICKDSSYKNGSRDTGSMDPDVQLCHCIERTVIEIINMSVSGI

SEQ ID NO: 205542 - DNA, 3612 bp, Artificial Sequence
  derived and/or modified sequence
aaggaccagcagaccgtgatcatgaccgagtgcaccagcctgcagttcgtgagccccttcgccttcgaggccatgcagaaggtggacgtggtgtgcctggccagcctgagcgaccccgagctgagactgctgctgccctgcctggtgagaatggccctgtgcgcccccgccgaccagagccagagctgggcccaggacaagaagctgatcctgagactgctgagcggcgtggaggccgtgaacagcatcgtggccctgctgagcgtggacttccacgccctggagcaggacgccagcaaggagcagcagctgagacacaagctgggcggcggcagcggcgagagcatcctggtgagccagctgcagcacggcctgaccctggagttcgagcacagcgacagccccagaagactgagactggtgctgagcgagctgctggccatcatgaacaaggtgagcgagagcaacggcgagttcttcttcaagagcagcgagctgttcgagagccccgtgtacctggaggaggccgccgacgtgctgtgcatcctgcaggccgagctgcccagcctgctgcccatcgtggacgtggccgaggccctgctgcacgtgagaaacggcgcctggttcctgtgcctgctggtggccaacgtgcccgacagcttcaacgaggtgtgcagaggcctgatcaagaacggcgagagacaggacgaggagagcctgggcggcagaagaagaaccgacgccctgagattcctgtgcaagatgaaccccagccaggccctgaaggtgagaggcatggtggtggaggagtgccacctgcccggcctgggcgtggccctgaccctggaccacaccaagaacgaggcctgcgaggacggcgtgagcgacctggtgtgcttcgtgagcggcctgctgctgggcaccaacgccaaggtgagaacctggttcggcaccttcatcagaaacggccagcagagaaagagagagaccagcagcagcgtgctgtggcagatgagaagacagctgctgctggagctgatgggcatcctgcccaccgtgagaagcaccagaatcgtggaggaggccgacgtggacatggagcccaacgtgagcgtgtacagcggcctgaaggaggagcacgtggtgaaggccagcgccctgctgagactgtactgcgccctgatgggcatcgccggcctgaagcccaccgaggaggaggccgagcagctgctgcagctgatgaccagcagaccccccgccacccccgccggcgtgagattcgtgagcctgagcttctgcatgctgctggccttcagcaccctggtgagcacccccgagcaggagcagctgatggtggtgtggctgagctggatgatcaaggaggaggcctacttcgagagcaccagcggcgtgagcgccagcttcggcgagatgctgctgctggtggccatgtacttccacagcaaccagctgagcgccatcatcgacctggtgtgcagcaccctgggcatgaagatcgtgatcaagcccagcagcctgagcagaatgaagaccatcttcacccaggagatcttcaccgagcaggtggtgaccgcccacgccgtgagagtgcccgtgaccagcaacctgagcgccaacatcaccggcttcctgcccatccactgcatctaccagctgctgagaagcagaagcttcaccaagcacaaggtgagcatcaaggactggatctacagacagctgtgcgagaccagcacccccctgcacccccagctgctgcccctgatcgacgtgtacatcaacagcatcctgacccccgccagcaagagcaaccccgaggccaccaaccagcccgtgaccgagcaggagatcctgaacatcttccagggcgtgatcggcggcgacaacatcagactgaaccagagattcagcatcaccgcccagctgctggtgctgtactacatcctgagctacgaggaggccctgctggccaacaccaagaccctggccgccatgcagagaaagcccaagagctacagcagcagcctgatggaccagatccccatcaagttcctgatcagacaggcccagggcctgcagcaggagctgggcggcctgcacagcgccctgctgagactgctggccaccaactacccccacctgtgcatcgtggacgactggatctgcgaggaggagatcaccggcaccgacgccctgctgagaagaatgctgctgaccaacaacgccaagaaccacagccccaagcagctgcaggaggccttcagcgccgtgcccgtgaacaacacccaggtgatgcagatcatcgagcacctgaccctgctgagcgccagcgagctgatcccctacgccgaggtgctgaccagcaacatgagccagctgctgaacagcggcgtgcccagaagaatcctgcagaccgtgaacaagctgtggatggtgctgaacaccgtgatgcccagaagactgtgggtgatgaccgtgaacgccctgcagcccagcatcaagttcgtgagacagcagaagtacacccagaacgacctgatgatcgaccccctgatcgtgctgagatgcgaccagagagtgcacagatgcccccccctgatggacatcaccctgcacatgctgaacggctacctgctggccagcaaggcctacctgagcgcccacctgaaggagaccgagcaggacagacccagccagaacaacaccatcggcctggtgggccagaccgacgcccccgaggtgaccagagaggagctgaagaacgccctgctggccgcccaggacagcgccgccgtgcagatcctgctggagatctgcctgcccaccgaggaggagaaggccaacggcgtgaaccccgacagcctgctgagaaacgtgcagagcgtgatcaccaccagcgcccccaacaagggcatggaggagggcgaggacaacctgctgtgcaacctgagagaggtgcagtgcctgatctgctgcctgctgcaccagatgtacatcgccgaccccaacatcgccaagctggtgcacttccagggctacccctgcgagctgctgcccctgaccgtggccggcatccccagcatgcacatctgcctggacttcatccccgagctgatcgcccagcccgagctggagaagcagatcttcgccatccagctgctgagccacctgtgcatccagtacgccctgcccaagagcctgagcgtggccagactggccgtgaacgtgatgggcaccctgctgaccgtgctgacccaggccaagagatacgccttcttcatgcccaccctgcccagcctggtgagcttctgcagagccttcccccccctgtacgaggacatcatgagcctgctgatccagatcggccaggtgtgcgccagcgacgtggccacccagaccagagacatcgaccccatcatcaccagactgcagcagatcaaggagaagcccagcggctggagccagatctgcaaggacagcagctacaagaacggcagcagagacaccggcagcatggaccccgacgtgcagctgtgccactgcatcgagagaaccgtgatcgagatcatcaacatgagcgtgagcggcatctag

SEQ ID NO: 205543 - DNA, 3615 bp, Artificial Sequence
  derived and/or modified sequence
atgaaggaccagcagaccgtgatcatgaccgagtgcaccagcctgcagttcgtgagccccttcgccttcgaggccatgcagaaggtggacgtggtgtgcctggccagcctgagcgaccccgagctgagactgctgctgccctgcctggtgagaatggccctgtgcgcccccgccgaccagagccagagctgggcccaggacaagaagctgatcctgagactgctgagcggcgtggaggccgtgaacagcatcgtggccctgctgagcgtggacttccacgccctggagcaggacgccagcaaggagcagcagctgagacacaagctgggcggcggcagcggcgagagcatcctggtgagccagctgcagcacggcctgaccctggagttcgagcacagcgacagccccagaagactgagactggtgctgagcgagctgctggccatcatgaacaaggtgagcgagagcaacggcgagttcttcttcaagagcagcgagctgttcgagagccccgtgtacctggaggaggccgccgacgtgctgtgcatcctgcaggccgagctgcccagcctgctgcccatcgtggacgtggccgaggccctgctgcacgtgagaaacggcgcctggttcctgtgcctgctggtggccaacgtgcccgacagcttcaacgaggtgtgcagaggcctgatcaagaacggcgagagacaggacgaggagagcctgggcggcagaagaagaaccgacgccctgagattcctgtgcaagatgaaccccagccaggccctgaaggtgagaggcatggtggtggaggagtgccacctgcccggcctgggcgtggccctgaccctggaccacaccaagaacgaggcctgcgaggacggcgtgagcgacctggtgtgcttcgtgagcggcctgctgctgggcaccaacgccaaggtgagaacctggttcggcaccttcatcagaaacggccagcagagaaagagagagaccagcagcagcgtgctgtggcagatgagaagacagctgctgctggagctgatgggcatcctgcccaccgtgagaagcaccagaatcgtggaggaggccgacgtggacatggagcccaacgtgagcgtgtacagcggcctgaaggaggagcacgtggtgaaggccagcgccctgctgagactgtactgcgccctgatgggcatcgccggcctgaagcccaccgaggaggaggccgagcagctgctgcagctgatgaccagcagaccccccgccacccccgccggcgtgagattcgtgagcctgagcttctgcatgctgctggccttcagcaccctggtgagcacccccgagcaggagcagctgatggtggtgtggctgagctggatgatcaaggaggaggcctacttcgagagcaccagcggcgtgagcgccagcttcggcgagatgctgctgctggtggccatgtacttccacagcaaccagctgagcgccatcatcgacctggtgtgcagcaccctgggcatgaagatcgtgatcaagcccagcagcctgagcagaatgaagaccatcttcacccaggagatcttcaccgagcaggtggtgaccgcccacgccgtgagagtgcccgtgaccagcaacctgagcgccaacatcaccggcttcctgcccatccactgcatctaccagctgctgagaagcagaagcttcaccaagcacaaggtgagcatcaaggactggatctacagacagctgtgcgagaccagcacccccctgcacccccagctgctgcccctgatcgacgtgtacatcaacagcatcctgacccccgccagcaagagcaaccccgaggccaccaaccagcccgtgaccgagcaggagatcctgaacatcttccagggcgtgatcggcggcgacaacatcagactgaaccagagattcagcatcaccgcccagctgctggtgctgtactacatcctgagctacgaggaggccctgctggccaacaccaagaccctggccgccatgcagagaaagcccaagagctacagcagcagcctgatggaccagatccccatcaagttcctgatcagacaggcccagggcctgcagcaggagctgggcggcctgcacagcgccctgctgagactgctggccaccaactacccccacctgtgcatcgtggacgactggatctgcgaggaggagatcaccggcaccgacgccctgctgagaagaatgctgctgaccaacaacgccaagaaccacagccccaagcagctgcaggaggccttcagcgccgtgcccgtgaacaacacccaggtgatgcagatcatcgagcacctgaccctgctgagcgccagcgagctgatcccctacgccgaggtgctgaccagcaacatgagccagctgctgaacagcggcgtgcccagaagaatcctgcagaccgtgaacaagctgtggatggtgctgaacaccgtgatgcccagaagactgtgggtgatgaccgtgaacgccctgcagcccagcatcaagttcgtgagacagcagaagtacacccagaacgacctgatgatcgaccccctgatcgtgctgagatgcgaccagagagtgcacagatgcccccccctgatggacatcaccctgcacatgctgaacggctacctgctggccagcaaggcctacctgagcgcccacctgaaggagaccgagcaggacagacccagccagaacaacaccatcggcctggtgggccagaccgacgcccccgaggtgaccagagaggagctgaagaacgccctgctggccgcccaggacagcgccgccgtgcagatcctgctggagatctgcctgcccaccgaggaggagaaggccaacggcgtgaaccccgacagcctgctgagaaacgtgcagagcgtgatcaccaccagcgcccccaacaagggcatggaggagggcgaggacaacctgctgtgcaacctgagagaggtgcagtgcctgatctgctgcctgctgcaccagatgtacatcgccgaccccaacatcgccaagctggtgcacttccagggctacccctgcgagctgctgcccctgaccgtggccggcatccccagcatgcacatctgcctggacttcatccccgagctgatcgcccagcccgagctggagaagcagatcttcgccatccagctgctgagccacctgtgcatccagtacgccctgcccaagagcctgagcgtggccagactggccgtgaacgtgatgggcaccctgctgaccgtgctgacccaggccaagagatacgccttcttcatgcccaccctgcccagcctggtgagcttctgcagagccttcccccccctgtacgaggacatcatgagcctgctgatccagatcggccaggtgtgcgccagcgacgtggccacccagaccagagacatcgaccccatcatcaccagactgcagcagatcaaggagaagcccagcggctggagccagatctgcaaggacagcagctacaagaacggcagcagagacaccggcagcatggaccccgacgtgcagctgtgccactgcatcgagagaaccgtgatcgagatcatcaacatgagcgtgagcggcatctag

SEQ ID NO: 205544 - DNA, 3612 bp, Artificial Sequence
  derived and/or modified sequence
aaagaccagcagactgtaattatgaccgaatgtacaagcctgcagtttgtgtctccgttcgcatttgaggcaatgcagaaggtggacgtggtatgtctcgcttccctgtcggatccagaattaagacttttactcccatgtcttgtgaggatggcgttatgtgcgccagccgaccaaagccaatcctgggctcaggataaaaagctgatactacgtcttctcagcggagtcgaagccgtgaatagcatcgtggcattgttgtcagtggatttccatgcgctggagcaggatgctagtaaggagcagcagctgaggcacaaattgggtggcggttccggggagagcatacttgtctcacagctgcaacatggtcttactctggagtttgagcattcagactctccacgacgcctgaggctcgtgctctctgagctcttggccatcatgaataaagtctctgaatctaacggcgagtttttttttaaaagttcagagttgtttgaatcccccgtgtacttggaagaagcggctgacgtgttatgtatattgcaggcagaactgcccagcctgctgccaattgtggacgtggcagaggcacttttgcacgtgcgcaacggggcctggttcctatgcctcttagtggccaatgtgcccgatagcttcaatgaggtctgtagagggctgatcaagaacggagagaggcaggacgaggaatcattgggtgggagacgcagaacagatgccctgaggttcctatgcaaaatgaacccgagtcaggctctgaaggtgagaggaatggttgtagaagaatgccatctgcctggattgggtgtcgccctgacactggaccacacaaagaatgaagcatgcgaagacggggtcagtgatttggtttgttttgtgtccggccttctcctggggacaaacgccaaggtgagaacctggttcgggacattcattagaaacggtcaacagagaaaaagagaaacttccagctccgtgctgtggcagatgaggcggcagcttctcctggaacttatgggcatcctgcccacagtgaggagcaccaggatcgtggaggaggccgatgtggacatggagcccaatgttagcgtgtactctggtctcaaggaggagcacgtggtgaaggcctccgccttgctacgcctctattgtgcactgatgggaatcgctggactgaagccaacggaggaagaagccgaacagctcctgcagcttatgacatctaggcctccggctactccggccggtgtgagatttgttagcctgtcattttgtatgttattagccttctcgaccctcgtgtcaactcccgagcaggaacagctcatggtagtctggctttcctggatgatcaaggaggaggcgtatttcgaatccacaagtggcgtgagtgcttcctttggggagatgctgttactggtagccatgtactttcactccaatcagttgagcgccatcatcgacctagtgtgtagtaccctcgggatgaagatcgttatcaaacccagctctctgagccggatgaaaactatcttcactcaggagatctttacagaacaagtggtgacagcacacgccgttcgggtccccgtgactagtaatttatccgcaaacattacaggatttcttcctatccattgcatataccaactcctcaggtcaagatcctttacaaaacataaggttagtatcaaggactggatatacaggcagctgtgtgagactagcacgcctttgcatcctcagctactgccgcttatagacgtctacattaacagtattcttactcccgctagtaagagtaatcccgaagctaccaatcagcccgtcacagaacaggaaatcttaaatattttccagggcgtgattggaggggacaatattcggctgaatcagcgcttctccatcacagcccagctgctggtgctatactatattctatcatacgaggaggcactgctggctaacacaaaaactctggcagccatgcagcgcaagcctaagtcatactcctcatcgctcatggaccagatccctattaagttccttattaggcaagcccagggcttacagcaagaacttggtggcctgcatagtgccttgctgcgactgctggctaccaactacccccacctgtgtattgtcgacgattggatatgcgaggaggagatcactggcaccgacgccctgctgcgaagaatgctgctgactaacaatgccaaaaaccatagcccaaagcaactccaagaagctttctcggctgtccctgtcaacaacactcaggtaatgcaaattatagaacatctgacactgcttagcgcatcagagctgatcccctatgccgaagtgctcaccagtaacatgtcacagttgctgaattcgggtgtcccaagacggatactgcagacggtgaacaagctgtggatggtgctgaatacagtcatgcccaggcgcctatgggttatgacagtgaatgcactgcagccatccataaagttcgtacggcagcagaagtatacgcagaatgatctaatgattgaccccctcatagtcctgcgatgtgatcagcgtgtacaccgctgtccgccattaatggatataaccctccacatgttgaacggatacctcctagcgtctaaggcttacctatctgcgcatctgaaggaaacagaacaggatcggccatcgcaaaacaacacaatcgggctagtcggacagacagacgctccagaggtgacccgcgaggagctgaagaacgccttacttgctgcccaggactctgctgctgtccaaatcttacttgagatatgtctgcctacagaagaagagaaggcgaacggagtcaaccctgacagcttgcttcggaacgtgcaaagcgtgattacaacaagtgcaccaaacaagggcatggaggagggtgaggataatctgctgtgtaacctccgagaggtccagtgtctgatctgctgcttgctccatcaaatgtacatcgctgaccctaatatcgcaaaactagttcatttccagggctatccctgcgagctgttgccacttaccgtcgctggcatcccaagcatgcacatttgtctggatttcattcctgagctgattgcccaacccgagttggagaagcagatttttgcaatacaacttttgagccacctttgtatccagtacgccctgcccaagtcattaagcgtggcccggctggccgtcaatgtgatgggcacacttttgacggttcttacccaagcaaagcgttatgcgttctttatgccgactcttccgagtctggtttcattctgtcgggcttttccaccgttatatgaggacataatgagcctgttaattcagatcggtcaggtgtgcgcaagtgacgtagccacccagacacgcgatatcgatcctattatcactcgactgcagcagatcaaagaaaaaccaagcgggtggagtcagatctgcaaagacagtagttacaagaatgggtctagagacaccggcagcatggaccctgatgtgcagctgtgtcactgtattgagcgcaccgtgattgagattattaatatgtctgtgtccggtatctag

SEQ ID NO: 205545 - DNA, 3615 bp, Artificial Sequence
  derived and/or modified sequence
atgaaggaccagcaaacagtgataatgaccgagtgcactagcttacagttcgtctcccctttcgcattcgaggcaatgcagaaggtggacgtggtctgtctagcctccctctccgacccagagctgagactgctgctaccatgtttggtgcggatggccctttgtgccccagccgaccaaagccagagctgggcccaggataaaaaactaatcctgaggctcttatccggagtggaggctgtgaattccatcgtggcgttgctttccgtcgactttcacgccctggaacaggacgcctccaaggaacagcagctgcgacataaactagggggagggagcggtgagtctattcttgtctcgcagctccagcatgggttgacgctggaattcgagcactcagattccccccggaggctccgactcgttctgagcgaactgttagccattatgaataaggtttctgaatccaatggggagttctttttcaagtctagcgaactcttcgaaagtcctgtctatctcgaggaagccgccgacgtgctgtgtattcttcaagcagagctgccaagtctgttgccaatcgtggacgtggccgaggcactcctgcacgtgagaaacggtgcatggttcctttgcctgctggtggcgaacgtccctgactcctttaatgaggtttgcaggggcctcatcaaaaacggcgaacgccaggatgaagagtcgttgggggggcgccgacgcacagacgccttgaggtttttgtgtaagatgaaccccagccaggcattgaaggtgcgggggatggtggtagaagagtgccacctcccaggtctcggtgtggccctgactctcgaccacaccaagaacgaagcttgtgaggacggagtgtctgacctggtgtgctttgtctcagggctcctgctgggaaccaacgctaaggtgcggacatggtttggcaccttcattaggaatggacaacagcgcaagcgtgagaccagcagtagcgtcctgtggcaaatgagacgacagttgttactcgagctgatggggatacttcctacagtacgatccacaagaatagtcgaggaggccgatgtggatatggagccaaacgtgtcagtttactctggcctcaaggaggaacatgtcgttaaagcaagcgccttattacggttatattgtgcactgatgggcatcgctgggctgaagcccacggaggaagaagccgagcagctcctacagctgatgacctctcgcccccccgccacaccggccggggtaagattcgtttccctaagtttctgtatgctgttggcattcagcacactggtgtctacacctgagcaagagcagctaatggtggtttggttgtcttggatgataaaggaagaagcatactttgagtcaaccagtggggtatctgcatcatttggggaaatgctcttgctggtcgctatgtactttcactccaaccaattgtctgccataatagacctggtgtgttccaccttaggcatgaagatagttattaagccatcctcactgtctcggatgaagaccattttcacacaggaaattttcacggaacaggttgtcacagcccacgccgtcagagtgccagtcacatctaatctgtccgctaacataaccggatttctccctattcactgtatatatcagctgctgaggtctcgttccttcacaaagcataaggtgtcgattaaagactggatttatcggcagctgtgcgaaaccagtaccccgctgcacccccagctgttgccactgatcgatgtctatatcaattctatactgaccccagcatctaagagcaacccagaagctactaaccaacctgttacagagcaagaaatcctgaacattttccaaggcgttattggtggcgacaatatcagactaaaccaacgattttctatcacggcccaactgctcgtcctttactatattctgtcttatgaagaggccctgctagctaacactaagaccttagcggctatgcagcgcaagccaaagtcctattcatccagtctgatggatcagattccgattaagtttcttattcgtcaggcccagggtctccagcaggaactcgggggccttcacagtgccctgctgcgcctgctcgctaccaattacccccatctgtgcattgtggacgactggatttgcgaggaagaaatcacgggaactgatgcattgctacgacgaatgctactgactaacaatgccaagaatcacagtcccaagcagttgcaggaagctttttcagcggtacccgtaaataatacccaggtgatgcaaataatcgagcatttgacgctgctgagcgcatctgagttgataccatatgctgaggtgctcacatccaacatgagccagctcctgaattctggcgttccccgacggatacttcagacagttaacaagctctggatggtcctgaatactgtcatgcccaggaggctgtgggttatgacagtgaatgctctgcagccttcgataaagttcgttcgacagcaaaagtacacccagaacgatctgatgatcgacccactgattgtgttgcggtgcgaccagcgcgtgcaccgctgccccccactcatggatataactctccacatgctgaacggttatcttcttgcttctaaggcctatctaagcgcccatctgaaggagactgagcaggatcgtccctcccagaataacaccatagggctcgttgggcagaccgatgccccagaagtcacccgcgaagaattaaagaatgctctgctcgccgcccaggactccgctgctgtgcagatactgctggagatatgtcttccaacagaggaagagaaagccaacggggtgaaccctgattccctgctcagaaacgtgcagtccgtaattactacgagcgctcccaataagggtatggaggagggcgaggataacctgctctgtaacctccgcgaggtgcagtgtctaatctgctgcctcctccatcagatgtacatcgcagacccaaacatagctaagttagtccacttccagggatacccatgcgagctcctgcctctcactgtcgctggcatcccatccatgcacatctgcttggattttattcccgagttgattgcacagccagagctagagaagcagatatttgcaatccagctgctttctcatctgtgcattcagtatgctctaccaaagagcctctccgtggcccgcttggcagtgaatgtgatgggcaccctgctgacagtgctgacacaggcaaagcgttatgcgttcttcatgccaaccttgccttctctcgtctctttttgtcgcgctttccctcccctgtacgaggacattatgtccctgctgatccaaattggccaggtttgcgctagtgacgttgcaacacagacccgcgatatcgatcctattattactcgcctgcaacagattaaggagaaaccaagcggatggtcacagatctgcaaggattctagttataaaaatggttccagggatactgggtcaatggacccggacgtgcaactgtgtcattgcatcgagagaactgtaatcgaaattattaacatgtcagtttctggcatttag

SEQ ID NO: 205546 - DNA, 5802 bp, Artificial Sequence
  derived and/or modified sequence
aaggatcaacaaacagtaataatgactgaatgtacaagtcttcagtttgtcagcccttttgcttttgaggcaatgcagaaggtggatgttgtttgcctggcatctttaagtgatccagaattaagacttcttctgccctgtttggtacggatggcactttgtgcacctgctgaccagagccaaagctgggctcaggataagaaactcatccttcgccttctttctggagtggaagctgtcaactccattgttgcattgttgtccgtggactttcatgctttagaacaagatgccagcaaagaacagcagcttaggcataaacttggaggaggcagtggagagagcatcctggtatcacagcttcagcatggactgacgttagagtttgaacacagtgattcacctcgtcgattgcgtcttgtgcttagtgaactgttggcaattatgaacaaggtgtctgagtccaacggagaattttttttcaagtcttctgaactttttgagagtccagtatatttggaggaagctgcagatgtactttgtattttacaagcagagctcccttccttgctccctatagttgatgtagctgaagctttgctacatgttagaaatggtgcctggttcttgtgtctcttggtggccaatgttcctgatagttttaatgaagtttgtaggggcctgataaaaaatggagaacgacaagatgaagaaagtcttggaggaaggcgcaggacagatgccttacgcttcttgtgtaaaatgaatccttctcaggccctcaaggtccgaggcatggtggtggaagaatgtcacttgccaggccttggtgtggctttgacattggatcatactaaaaatgaagcttgtgaggatggagtgagtgacttggtttgttttgtaagtggtttgcttcttggaacaaatgcgaaagtccggacttggtttggaacttttatccgaaatggacagcagagaaaaagagagaccagcagttctgtcctttggcagatgagaaggcagcttcttctggagttgatgggcattcttcccacagtaagaagcacccgaattgtggaagaagctgatgtggatatggagcccaatgtgtctgtgtattcggggctgaaagaagagcatgttgtgaaagccagtgcactcttacgtctgtactgtgctttgatggggatcgctggactcaaaccaactgaagaagaagctgagcaattactgcagttgatgacgagccgtcctcctgctacgccagctggggttcgctttgtttcactttccttttgtatgctactggccttttctacacttgtcagtacacctgaacaggagcagctgatggtggtgtggctaagttggatgataaaagaagaagcgtattttgagagtacttcaggcgtctctgcttcttttggggagatgttattattggtggctatgtactttcacagcaaccagcttagtgctatcattgacttggtctgttccactttggggatgaagattgtaattaagccaagctccttgagcaggatgaagacaatcttcacacaggaaatttttactgagcaggttgtcacagctcatgcagttcgggtccctgtcaccagcaacctgagtgccaacattactggatttttgcctattcattgtatttaccagcttctcaggagccgttcctttaccaagcacaaagtgtcaataaaagattggatttatagacagctgtgtgaaacctctactccacttcatcctcaattacttcctttgattgatgtgtacataaattctatacttactcctgcgtcgaaatctaatccagaagccacaaatcagccagtcacagaacaggagatactcaatattttccaaggagtcattgggggtgacaacatccgccttaatcagcgtttcagtatcacagcacagcttttggtgctctactatatactgtcttatgaagaggctcttctagcaaacacgaagactttagctgccatgcaaagaaagcccaaatcatattcttcttctttaatggatcagattcctatcaaattccttattcgacaggctcaagggctgcagcaggagttgggagggttgcattcagctttactacgtctccttgctactaactacccacatttatgtattgtggatgactggatttgtgaagaagaaatcacagggactgatgccctgctacggcgaatgctcctgactaataatgctaaaaatcattctcccaaacaactccaagaagcattttcagctgtcccagtaaataacacacaagtgatgcagattatagaacacttgactctactctctgccagtgaacttataccatatgcggaagtgttaacatccaatatgagccagctattgaattcaggggttccacggagaattctgcaaacagtcaataaactatggatggttcttaatactgtgatgcctagaaggctatgggtaatgacggttaatgcacttcagccttcaataaagtttgtacgacaacaaaagtatactcagaatgacctgatgatagatcctctcattgtcctaaggtgtgatcagagggttcacagatgccccccactgatggatattaccctacacatgttgaatggatatcttcttgcatctaaagcctaccttagtgctcatctgaaggaaacagagcaagataggccttcccagaataatacaattggtttagttggacaaactgatgctccggaagttaccagggaagaattgaaaaatgcattactggccgctcaggatagtgcagctgtccagattctcttagagatttgcctacctactgaagaggagaaagcaaatggtgtcaatccagatagcttgttaagaaatgttcaaagtgttattaccaccagcgctccaaataagggaatggaggaaggagaagacaatttgctctgtaaccttcgagaagttcagtgccttatctgttgtctcttgcaccaaatgtacattgcagatcccaacattgctaagcttgttcactttcagggttatccatgtgaacttttgcctctgacggtcgcaggtattccatctatgcacatctgtctagatttcatacctgagcttattgcacagccagaacttgagaaacagatatttgctatccagttgctttctcacttgtgtatacaatatgcattaccaaagtcacttagtgtggctcgtttagctgtcaatgtcatgggaactttgttaacagttttaacacaggctaagcggtatgctttttttatgccaactctgccaagtttggtctctttttgtcgagcatttcctccattgtatgaggatattatgtctttgctgatccaaatagggcaagtttgtgcctctgatgttgccactcagacaagagacattgatccaattattacacgtcttcaacaaataaaggagaaaccaagtggatggtctcaaatctgtaaagattcatcttataaaaatggatccagggacactggaagcatggatcctgatgtacagctctgtcactgtattgaaagaacagtaattgaaataataaatatgagtgttagtggaatttaaaacaaaatttaaaacaacaaaaagttgtttgctgcatatacccaacatgaatctgcatattagtaacaactctaaactgaatgggaacagtaaagtattgtcttggaatcactaaaacaattcaattcaacatgagtatagtttagaactttatgagaattatgcttgcttgtttctgattggcacatctttggatctactttgctgatatgtttctattgtagcagctgagctttttttttttccactgggaacacatgtaagaaactcattattggaaagggaatttggccttgtatttagcttttgaagtgaagactgccatgcctttaatttcttataaaaatgagtctgtgggtagccctagtgtttattttaactgtgagcttgtaacagaatgtgacaaagatgcaaagatgggagaggaaaaaagggtaaagggaaaggagaattaaggaaataataggagttaaaaacacaagtagaaatctcaaagatttgcagtgcaagtaatagtaatgcaagttggaattctagttctcaagaaagagtattgagaagacttttaaaaaggcaagtagcttttgtaaatgatttctgtggaaatacagatgaggatttaaagatttcacatatttgcttcaatttttattaatatatgaagccatatgtttaaagagatacttgaataatttggaattttaagatactggtgtaaaagtgtttacagaaacatctttgttcaaagaagaacctgagagatctcatttagttttatgttttaaatttatttttataatgctttattaacttacctaatgctcagaggggggaaatatgtatcaaattaaatgaaggtagagcaataaaacccactggattaaagagctcttggtttgtcatcaggattataattcatatcttactttgagaagatctttgagtaagaaaatgcagtgtttgaacctgaggaaaagttaaagtgtagaaaatattgtcttgccgaaggattttgcagtcctctgtcagtaacttccattgattaggcagacatattcaggtaaaccctaatcattaaaaaaaaattatcaatgtagaaagtaattcccttttttctctctgagatatacctcaatcacacacttccccacccccacttgaaacagacctcttcacttgtgttttttttttttttttcctgaggtggagtcttcccctgttgcccaggctggagtgcagtgggatgatcttggctcactgcaacttctgccacctgggttcaagggattctcgtgcctcaacctcctgagtagctgggactgcaggcacgcgccacctgtatttttgtatttttagtaaagacgggggtttgccatgttgcccagactggttttgaactcctggcctcaggtgatctgcccaccttggcctcccaaagtgctgggattacaggtgtgagccaccgcacctggccagaccgcttcacttgtaaaagaaattaggctaataagaaggtgtagtttttgagaaatgaaatttaactttagccttttcactagtaaatagtcacatctcattttcttcctttgtaaaatggggttactactggccctacctcatattctatgagaatgagtttgtagctgtttcaaatcatgaagtgcatagtatcacatgtgatagaatatttataactttttattagatgcttaatgttcaattaagtaattttgatgtgaaaaataaaagtaataaaagtatcttaaaaatagcataagaattttcatatttttaaacaaggcagttttgtagtcccttaagattaaatacaactgctccttttttttttaaactgaggccttgcgatattttgtgtgaatagatatgccctaggagttcagaaaaagttaaaagtatgttttctaattaaatgcagtgcacattcctggatcaatattcaaagactggtcataacctgctgtgttaaaataatcacatatgctctttttcatcagatttgttgatgatgtaaataaaatgtgtaaatatattagtaaatgttaatattcatgtattttaagttaaggttataaaatttgtcacaatgtgtttttttattcaagtgaaaacagatgtgtgcagctattttgaatattggtttataaacattcatattctttatcaaacgaa

SEQ ID NO: 205547 - DNA, 5881 bp, Artificial Sequence
  derived and/or modified sequence
ctctgcctttcctctcgcagccacccttcctctcagaccagtacggtggccgacgggagtcagacgctggggatgaatgaaggatcaacaaacagtaataatgactgaatgtacaagtcttcagtttgtcagcccttttgcttttgaggcaatgcagaaggtggatgttgtttgcctggcatctttaagtgatccagaattaagacttcttctgccctgtttggtacggatggcactttgtgcacctgctgaccagagccaaagctgggctcaggataagaaactcatccttcgccttctttctggagtggaagctgtcaactccattgttgcattgttgtccgtggactttcatgctttagaacaagatgccagcaaagaacagcagcttaggcataaacttggaggaggcagtggagagagcatcctggtatcacagcttcagcatggactgacgttagagtttgaacacagtgattcacctcgtcgattgcgtcttgtgcttagtgaactgttggcaattatgaacaaggtgtctgagtccaacggagaattttttttcaagtcttctgaactttttgagagtccagtatatttggaggaagctgcagatgtactttgtattttacaagcagagctcccttccttgctccctatagttgatgtagctgaagctttgctacatgttagaaatggtgcctggttcttgtgtctcttggtggccaatgttcctgatagttttaatgaagtttgtaggggcctgataaaaaatggagaacgacaagatgaagaaagtcttggaggaaggcgcaggacagatgccttacgcttcttgtgtaaaatgaatccttctcaggccctcaaggtccgaggcatggtggtggaagaatgtcacttgccaggccttggtgtggctttgacattggatcatactaaaaatgaagcttgtgaggatggagtgagtgacttggtttgttttgtaagtggtttgcttcttggaacaaatgcgaaagtccggacttggtttggaacttttatccgaaatggacagcagagaaaaagagagaccagcagttctgtcctttggcagatgagaaggcagcttcttctggagttgatgggcattcttcccacagtaagaagcacccgaattgtggaagaagctgatgtggatatggagcccaatgtgtctgtgtattcggggctgaaagaagagcatgttgtgaaagccagtgcactcttacgtctgtactgtgctttgatggggatcgctggactcaaaccaactgaagaagaagctgagcaattactgcagttgatgacgagccgtcctcctgctacgccagctggggttcgctttgtttcactttccttttgtatgctactggccttttctacacttgtcagtacacctgaacaggagcagctgatggtggtgtggctaagttggatgataaaagaagaagcgtattttgagagtacttcaggcgtctctgcttcttttggggagatgttattattggtggctatgtactttcacagcaaccagcttagtgctatcattgacttggtctgttccactttggggatgaagattgtaattaagccaagctccttgagcaggatgaagacaatcttcacacaggaaatttttactgagcaggttgtcacagctcatgcagttcgggtccctgtcaccagcaacctgagtgccaacattactggatttttgcctattcattgtatttaccagcttctcaggagccgttcctttaccaagcacaaagtgtcaataaaagattggatttatagacagctgtgtgaaacctctactccacttcatcctcaattacttcctttgattgatgtgtacataaattctatacttactcctgcgtcgaaatctaatccagaagccacaaatcagccagtcacagaacaggagatactcaatattttccaaggagtcattgggggtgacaacatccgccttaatcagcgtttcagtatcacagcacagcttttggtgctctactatatactgtcttatgaagaggctcttctagcaaacacgaagactttagctgccatgcaaagaaagcccaaatcatattcttcttctttaatggatcagattcctatcaaattccttattcgacaggctcaagggctgcagcaggagttgggagggttgcattcagctttactacgtctccttgctactaactacccacatttatgtattgtggatgactggatttgtgaagaagaaatcacagggactgatgccctgctacggcgaatgctcctgactaataatgctaaaaatcattctcccaaacaactccaagaagcattttcagctgtcccagtaaataacacacaagtgatgcagattatagaacacttgactctactctctgccagtgaacttataccatatgcggaagtgttaacatccaatatgagccagctattgaattcaggggttccacggagaattctgcaaacagtcaataaactatggatggttcttaatactgtgatgcctagaaggctatgggtaatgacggttaatgcacttcagccttcaataaagtttgtacgacaacaaaagtatactcagaatgacctgatgatagatcctctcattgtcctaaggtgtgatcagagggttcacagatgccccccactgatggatattaccctacacatgttgaatggatatcttcttgcatctaaagcctaccttagtgctcatctgaaggaaacagagcaagataggccttcccagaataatacaattggtttagttggacaaactgatgctccggaagttaccagggaagaattgaaaaatgcattactggccgctcaggatagtgcagctgtccagattctcttagagatttgcctacctactgaagaggagaaagcaaatggtgtcaatccagatagcttgttaagaaatgttcaaagtgttattaccaccagcgctccaaataagggaatggaggaaggagaagacaatttgctctgtaaccttcgagaagttcagtgccttatctgttgtctcttgcaccaaatgtacattgcagatcccaacattgctaagcttgttcactttcagggttatccatgtgaacttttgcctctgacggtcgcaggtattccatctatgcacatctgtctagatttcatacctgagcttattgcacagccagaacttgagaaacagatatttgctatccagttgctttctcacttgtgtatacaatatgcattaccaaagtcacttagtgtggctcgtttagctgtcaatgtcatgggaactttgttaacagttttaacacaggctaagcggtatgctttttttatgccaactctgccaagtttggtctctttttgtcgagcatttcctccattgtatgaggatattatgtctttgctgatccaaatagggcaagtttgtgcctctgatgttgccactcagacaagagacattgatccaattattacacgtcttcaacaaataaaggagaaaccaagtggatggtctcaaatctgtaaagattcatcttataaaaatggatccagggacactggaagcatggatcctgatgtacagctctgtcactgtattgaaagaacagtaattgaaataataaatatgagtgttagtggaatttaaaacaaaatttaaaacaacaaaaagttgtttgctgcatatacccaacatgaatctgcatattagtaacaactctaaactgaatgggaacagtaaagtattgtcttggaatcactaaaacaattcaattcaacatgagtatagtttagaactttatgagaattatgcttgcttgtttctgattggcacatctttggatctactttgctgatatgtttctattgtagcagctgagctttttttttttccactgggaacacatgtaagaaactcattattggaaagggaatttggccttgtatttagcttttgaagtgaagactgccatgcctttaatttcttataaaaatgagtctgtgggtagccctagtgtttattttaactgtgagcttgtaacagaatgtgacaaagatgcaaagatgggagaggaaaaaagggtaaagggaaaggagaattaaggaaataataggagttaaaaacacaagtagaaatctcaaagatttgcagtgcaagtaatagtaatgcaagttggaattctagttctcaagaaagagtattgagaagacttttaaaaaggcaagtagcttttgtaaatgatttctgtggaaatacagatgaggatttaaagatttcacatatttgcttcaatttttattaatatatgaagccatatgtttaaagagatacttgaataatttggaattttaagatactggtgtaaaagtgtttacagaaacatctttgttcaaagaagaacctgagagatctcatttagttttatgttttaaatttatttttataatgctttattaacttacctaatgctcagaggggggaaatatgtatcaaattaaatgaaggtagagcaataaaacccactggattaaagagctcttggtttgtcatcaggattataattcatatcttactttgagaagatctttgagtaagaaaatgcagtgtttgaacctgaggaaaagttaaagtgtagaaaatattgtcttgccgaaggattttgcagtcctctgtcagtaacttccattgattaggcagacatattcaggtaaaccctaatcattaaaaaaaaattatcaatgtagaaagtaattcccttttttctctctgagatatacctcaatcacacacttccccacccccacttgaaacagacctcttcacttgtgttttttttttttttttcctgaggtggagtcttcccctgttgcccaggctggagtgcagtgggatgatcttggctcactgcaacttctgccacctgggttcaagggattctcgtgcctcaacctcctgagtagctgggactgcaggcacgcgccacctgtatttttgtatttttagtaaagacgggggtttgccatgttgcccagactggttttgaactcctggcctcaggtgatctgcccaccttggcctcccaaagtgctgggattacaggtgtgagccaccgcacctggccagaccgcttcacttgtaaaagaaattaggctaataagaaggtgtagtttttgagaaatgaaatttaactttagccttttcactagtaaatagtcacatctcattttcttcctttgtaaaatggggttactactggccctacctcatattctatgagaatgagtttgtagctgtttcaaatcatgaagtgcatagtatcacatgtgatagaatatttataactttttattagatgcttaatgttcaattaagtaattttgatgtgaaaaataaaagtaataaaagtatcttaaaaatagcataagaattttcatatttttaaacaaggcagttttgtagtcccttaagattaaatacaactgctccttttttttttaaactgaggccttgcgatattttgtgtgaatagatatgccctaggagttcagaaaaagttaaaagtatgttttctaattaaatgcagtgcacattcctggatcaatattcaaagactggtcataacctgctgtgttaaaataatcacatatgctctttttcatcagatttgttgatgatgtaaataaaatgtgtaaatatattagtaaatgttaatattcatgtattttaagttaaggttataaaatttgtcacaatgtgtttttttattcaagtgaaaacagatgtgtgcagctattttgaatattggtttataaacattcatattctttatcaaacgaa

SEQ ID NO: 205548 - DNA, 3612 bp, Artificial Sequence
  derived and/or modified sequence
aaggaccagcagaccgtcatcatgacagagtgcaccagcctgcagtttgtgagcccctttgcctttgaggccatgcagaaggtggatgtggtgtgcctggccagcctgagtgaccctgagctgcggctgctgctgccctgcctggtgaggatggccctgtgtgccccagctgaccagagccagagctgggcccaggacaagaagctgatcctgcggctgctgtctggagtggaggccgtgaacagcatcgtggccctgctgtctgtggacttccacgccctggagcaggatgccagcaaggagcagcagctgcggcacaagctgggcggcggcagcggggagagcatcctggtgtcccagctgcagcacggcctgaccctggagtttgagcacagcgacagcccccggcggctgcggctggtgctgtctgagctgctggccatcatgaacaaggtgtctgagagcaatggagagttcttcttcaagagcagcgagctgtttgagagccctgtgtacctggaggaggccgcagatgtgctgtgcatcctgcaggccgagctgcccagcctgctgcccatcgtggatgtggccgaggccctgctgcacgtgagaaatggagcctggttcctgtgcctgctggtggccaacgtgcctgacagcttcaatgaggtgtgccggggcctcatcaagaatggagagcggcaggatgaggagagcctgggcggcagaagaagaacagatgccctgcgcttcctgtgcaagatgaaccccagccaggccctgaaggtgcggggcatggtggtggaggagtgccacctgcccggcctgggcgtggccctgaccctggaccacaccaagaatgaggcctgtgaagatggagtgtctgacctggtgtgctttgtgtctggcctgctgctgggcaccaatgccaaggtgaggacctggtttggcaccttcatcagaaatggccagcagaggaagcgggagaccagcagctctgtgctgtggcagatgaggcggcagctgctgctggagctgatgggcatcctgcccaccgtgcgcagcacccgcatcgtggaggaggctgatgtggacatggagcccaacgtgtctgtgtacagcggcctgaaggaggagcacgtggtgaaggccagcgccctgctgcggctgtactgtgccctgatgggcattgctggcctgaagcccacagaggaggaggccgagcagctgctgcagctgatgaccagccggcccccagccaccccagctggggtgcgctttgtgtccctgtccttctgcatgctgctggccttcagcaccctggtgtccaccccagagcaggagcagctgatggtggtgtggctgtcctggatgatcaaggaggaggcctactttgagagcaccagcggcgtgtctgccagctttggagagatgctgctgctggtggccatgtacttccacagcaaccagctgagcgccatcatcgacctggtgtgcagcaccctgggcatgaagatcgtcatcaagcccagcagcctgagcaggatgaagaccatcttcacccaggagatcttcacagagcaggtggtgacagcccatgctgtgcgggtgcctgtgaccagcaacctgagcgccaacatcaccggcttcctgcccatccactgcatctaccagctgctgcggagccgctccttcaccaagcacaaggtgtccatcaaggactggatctaccggcagctgtgtgagaccagcacccccctgcacccccagctgctgcccctgattgatgtgtacatcaacagcatcctgaccccagccagcaagagcaaccctgaggccaccaaccagcctgtgacagagcaggagatcctgaacatcttccagggcgtgattggaggagacaacatccggctgaaccagcgcttcagcatcacagcccagctgctggtgctgtactacatcctgtcctatgaggaggccctgctggccaacaccaagaccctggccgccatgcagaggaagcccaagagctacagcagcagcctgatggaccagatccccatcaagttcctgatccggcaggcccagggcctgcagcaggagctgggcggcctgcacagcgccctgctgcggctgctggccaccaactacccccacctgtgcatcgtggatgactggatctgtgaggaggagatcactggaacagatgccctgctgcggaggatgctgctgaccaacaatgccaagaaccacagccccaagcagctgcaggaggccttctctgctgtgcctgtgaacaacacccaggtgatgcagatcatcgagcacctgaccctgctgagcgccagcgagctgatcccctatgcagaggtgctgaccagcaacatgagccagctgctgaacagcggcgtgccccggcgcatcctgcagacagtgaacaagctgtggatggtgctgaacacagtgatgccccggcggctgtgggtgatgacagtgaatgccctgcagcccagcatcaagtttgtgcggcagcagaagtacacccagaatgacctgatgattgaccccctcatcgtgctgcgctgtgaccagagggtgcaccgctgcccccccctgatggacatcaccctgcacatgctgaatggctacctgctggccagcaaggcctacctgagcgcccacctgaaggagacagagcaggaccggcccagccagaacaacaccatcggcctggtgggccagacagatgcccctgaggtgacccgggaggagctgaagaatgccctgctggccgcccaggacagcgctgctgtgcagatcctgctggagatctgcctgcccacagaggaggagaaggccaacggggtgaacccagacagcctgctgagaaatgtgcagagcgtcatcaccaccagcgcccccaacaagggcatggaggagggggaggacaacctgctgtgcaacctgcgggaggtgcagtgcctgatctgctgcctgctgcaccagatgtacatcgctgaccccaacatcgccaagctggtgcacttccagggctacccctgtgagctgctgcccctgactgtggccggcatccccagcatgcacatctgcctggacttcatccctgagctgattgcccagcctgagctggagaagcagatctttgccatccagctgctgagccacctgtgcatccagtatgccctgcccaagagcctgtctgtggcccggctggccgtgaatgtgatgggcaccctgctgactgtgctgacccaggccaagagatatgccttcttcatgcccaccctgcccagcctggtgtccttctgccgggccttcccccccctgtatgaggacatcatgagcctgctgatccagatcggccaggtgtgtgccagtgatgtggccacccagacccgggacatcgaccccatcatcacccggctgcagcagatcaaggagaagcccagcggctggagccagatctgcaaggacagcagctacaagaatggcagccgggacaccggctccatggaccctgatgtgcagctgtgccactgcatcgagaggacagtgattgagatcatcaacatgtctgtgtctggcatctag

SEQ ID NO: 205549 - DNA, 3615 bp, Artificial Sequence
  derived and/or modified sequence
atgaaggaccagcagaccgtcatcatgacagaatgtaccagcctgcagtttgtgagcccctttgcctttgaggccatgcagaaggtggatgtggtgtgcctggccagcctgagtgaccctgagctgcggctgctgctgccctgcctggtgaggatggccctgtgtgccccagctgaccagagccagagctgggcccaggacaagaagctgatcctgcggctgctgagcggcgtggaggccgtgaacagcatcgtggccctgctgtctgtggacttccacgccctggagcaggatgccagcaaggagcagcagctgcggcacaagctgggcggcggcagcggggagagcatcctggtgtcccagctgcagcacggcctgaccctggagtttgagcacagcgacagcccccggcggctgcggctggtgctgtctgagctgctggccatcatgaacaaggtgtctgagagcaatggagagttcttcttcaagagcagcgagctgtttgagagccctgtgtacctggaggaggccgcagatgtgctgtgcatcctgcaggccgagctgcccagcctgctgcccatcgtggatgtggccgaggccctgctgcacgtgagaaatggagcctggttcctgtgcctgctggtggccaacgtgcctgacagcttcaatgaggtgtgccggggcctcatcaagaatggagagcggcaggatgaggagagcctgggcggcagaagaagaacagatgccctgcgcttcctgtgcaagatgaaccccagccaggccctgaaggtgcggggcatggtggtggaggagtgccacctgcccggcctgggcgtggccctgaccctggaccacaccaagaatgaggcctgtgaagatggagtgtctgacctggtgtgctttgtgtctggcctgctgctgggcaccaatgccaaggtgaggacctggtttggcaccttcatcagaaatggccagcagaggaagcgggagaccagcagctctgtgctgtggcagatgaggcggcagctgctgctggagctgatgggcatcctgcccaccgtgcgcagcaccagaattgtggaggaggctgatgtggacatggagcccaacgtgtctgtgtacagcggcctgaaggaggagcacgtggtgaaggccagcgccctgctgcggctgtactgtgccctgatgggcattgctggcctgaagcccacagaggaggaggccgagcagctgctgcagctgatgaccagccggcccccagccaccccagctggggtgcgctttgtgtccctgtccttctgcatgctgctggccttcagcaccctggtgtccaccccagagcaggagcagctgatggtggtgtggctgtcctggatgatcaaggaggaggcctactttgagagcaccagcggcgtgtctgccagctttggagagatgctgctgctggtggccatgtacttccacagcaaccagctgagcgccatcatcgacctggtgtgcagcaccctgggcatgaagatcgtcatcaagcccagcagcctgagcaggatgaagaccatcttcacccaggagatcttcacagagcaggtggtgacagcccatgctgtgcgggtgcctgtgaccagcaacctgagcgccaacatcaccggcttcctgcccatccactgcatctaccagctgctgcggagccgctccttcaccaagcacaaggtgtccatcaaggactggatctaccggcagctgtgtgagaccagcacccccctgcacccccagctgctgcccctgattgatgtgtacatcaacagcatcctgaccccagccagcaagagcaaccctgaggccaccaaccagcctgtgacagagcaggagatcctgaacatcttccagggcgtcatcggcggggacaacatccggctgaaccagcgcttcagcatcacagcccagctgctggtgctgtactacatcctgtcctatgaggaggccctgctggccaacaccaagaccctggccgccatgcagaggaagcccaagagctacagcagcagcctgatggaccagatccccatcaagttcctgatccggcaggcccagggcctgcagcaggagctgggcggcctgcacagcgccctgctgcggctgctggccaccaactacccccacctgtgcatcgtggatgactggatctgtgaggaggagatcaccggcacagatgccctgctgcggaggatgctgctgaccaacaatgccaagaaccacagccccaagcagctgcaggaggccttctctgctgtgcctgtgaacaacacccaggtgatgcagatcatcgagcacctgaccctgctgagcgccagcgagctgatcccctatgcagaggtgctgaccagcaacatgagccagctgctgaacagcggcgtgccccggcgcatcctgcagacagtgaacaagctgtggatggtgctgaacacagtgatgccccggcggctgtgggtgatgacagtgaatgccctgcagcccagcatcaagtttgtgcggcagcagaagtacacccagaatgacctgatgattgaccccctgattgtgctgcgctgtgaccagagggtgcaccgctgcccccccctgatggacatcaccctgcacatgctgaatggctacctgctggccagcaaggcctacctgagcgcccacctgaaggagacagagcaggaccggcccagccagaacaacaccatcggcctggtgggccagacagatgcccctgaggtgacccgggaggagctgaagaatgccctgctggccgcccaggacagcgctgctgtgcagatcctgctggagatctgcctgcccacagaggaggagaaggccaatggagtgaacccagacagcctgctgagaaatgtgcagagcgtcatcaccaccagcgcccccaacaagggcatggaggagggggaggacaacctgctgtgcaacctgcgggaggtgcagtgcctgatctgctgcctgctgcaccagatgtacatcgctgaccccaacatcgccaagctggtgcacttccagggctacccctgtgagctgctgcccctgactgtggccggcatccccagcatgcacatctgcctggacttcatccctgagctgattgcccagcctgagctggagaagcagatctttgccatccagctgctgagccacctgtgcatccagtatgccctgcccaagagcctgtctgtggcccggctggccgtgaatgtgatgggcaccctgctgactgtgctgacccaggccaagagatatgccttcttcatgcccaccctgcccagcctggtgtccttctgccgggccttcccccccctgtatgaggacatcatgagcctgctgatccagatcggccaggtgtgtgccagtgatgtggccacccagacccgggacatcgaccccatcatcacccggctgcagcagatcaaggagaagcccagcggctggagccagatctgcaaggacagcagctacaagaatggcagccgggacaccggctccatggaccctgatgtgcagctgtgccactgcattgaaagaactgtcatcgagatcatcaacatgtctgtgtctggcatctag

SEQ ID NO: 205550 - DNA, 3612 bp, Artificial Sequence
  derived and/or modified sequence
aaggaccagcagaccgtgatcatgaccgagtgcaccagcctgcagttcgtttcccccttcgccttcgaagcaatgcagaaggtggacgtcgtttgcttggctagtcttagtgaccctgagttgaggctcctgctgccatgcctggtgagaatggctctgtgcgcaccagctgatcagtcccagagttgggctcaggacaagaaattaattttgcggctgttatctggcgtcgaagctgtgaacagcatcgtcgctcttttgagcgtggacttccatgccctagagcaagacgcttccaaggagcagcaactgagacataagctgggaggcgggtcaggagagagcatactggtcagtcagttacaacatggtttaaccctcgaatttgaacactcagactctcctcggcgactacggctggtactgtcggaactgttggctattatgaacaaggtgagtgagagtaacggggaattcttctttaaatcctccgaactgttcgagtcgccagtgtacctcgaggaggcagcagatgtgctgtgcattttgcaagctgaactgccaagtctactgccaattgtggacgtggcagaggcactcctacacgttcggaatggggcttggttcctgtgcttgctggttgctaacgtaccagacagctttaacgaggtgtgtcgcggcttgattaaaaacggagagcgtcaggacgaggaaagtctcgggggacggcggcgcacagatgctcttcggtttttgtgcaagatgaatccttctcaggccctgaaggttcgcgggatggtggtggaggagtgccatctgcccgggctcggcgtggcacttacgcttgaccacactaaaaacgaagcatgcgaagacggagtgtcagacttggtttgcttcgtatctgggttactactcggaactaacgcaaaggtccggacatggttcgggactttcatcagaaacggtcaacaacggaaacgggagacctcgtctagcgtgctctggcagatgcgacggcagctcctgctcgagctaatgggcatactgcctactgtccgatccacccgaatcgtcgaagaggccgacgtggacatggagcctaacgtctctgtttattctggattgaaggaggagcacgtggtgaaagcaagcgccctcctgcgtttgtactgcgctctgatgggcatagccggcctgaaaccaaccgaggaagaggcggagcagctgttgcagttaatgactagccggccccctgccacccccgccggggtgcgatttgtgtccctgagcttttgtatgctccttgccttttctacactggtaagcactcccgagcaagagcagctgatggtggtctggctgtcatggatgataaaagaagaagcatatttcgagtcaaccagtggtgtgtctgcctccttcggggaaatgctactgttggtagccatgtactttcacagcaaccaacttagtgctatcatcgacctggtgtgttccacactggggatgaagatcgtgattaagcccagttctttatccaggatgaagaccattttcacccaggaaatttttactgaacaggtagtgaccgcacacgccgtgcgcgtacctgtcactagcaacctgagcgcgaacattaccggatttctgccaatccactgcatctaccagctgctgagatcaaggtcctttacaaaacacaaagtctccattaaggattggatttaccgtcaactctgcgagacaagcacccctctgcacccacagctcctccctcttatcgatgtatatatcaacagcatcttgactcccgcctcgaaaagtaatcccgaagcgaccaatcagccagtgacggagcaggaaatccttaacatttttcagggcgtaattggcggcgacaatatcaggcttaatcaaagattctcaatcactgcccaactgctggtgctgtattatattctgtcatacgaggaggcactcctggctaacacaaaaaccctggcggcaatgcaacgcaagcccaagagctactcaagtagtttaatggatcaaatcccgattaaattcttgatcaggcaagcccagggcttacagcaggagctaggggggctccattctgccttgcttcgactgttagctaccaattatcctcatctgtgtatagtcgacgactggatctgcgaagaggagattaccgggaccgacgccttgctccggagaatgttgttgaccaacaatgcgaagaatcattctcctaagcaactccaggaggcattttccgctgttcctgtcaataacactcaggttatgcagattatcgagcatctgaccctcttgtccgccagtgagctgataccgtatgccgaggtgctgacaagcaatatgtctcaactgctgaatagtggagtgccccgcaggatcttgcagacagtgaataaactttggatggtgttgaatacggttatgccccgccgcctgtgggttatgactgttaatgcccttcagccttctatcaaattcgtgcggcagcaaaagtatactcagaacgacctgatgattgatcccctcattgtgcttcgctgtgatcagcgcgtacaccgatgccccccactgatggatataacccttcacatgttgaatggctatttgctggccagcaaggcttacctctctgcccacctaaaagagactgaacaggatcggccctctcagaataacacaatagggcttgtgggccagactgacgctcccgaagtgacaagagaagaactgaagaatgccctcctggccgcccaggattcagcagcagttcagatcttgttggaaatctgccttccgacagaggaagagaaggctaacggtgttaatcctgattcgctgctgagaaacgtgcaatcggtgatcactacctccgctccaaacaaaggcatggaggaaggcgaggacaatctgttatgcaacctgcgcgaggtgcagtgtttgatttgctgtctcttacaccaaatgtacattgccgaccccaatatagcgaaactggtgcacttccagggttatccctgtgaattactgcccctcacggtggccggcatcccaagcatgcacatttgtttggatttcattccggaattgatcgcacagcctgagctggaaaagcagatcttcgccatacagctactgagccatctgtgtattcaatatgcgctgccgaagagtctgtccgtggctcgcctggccgtgaacgtcatggggaccctactcaccgtactgacccaggctaagaggtacgcttttttcatgcctaccctcccttccctggtctcgttctgccgcgcctttcccccactgtatgaggatatcatgagtctcctgatccagatcggccaggtgtgcgccagtgatgttgccacccagactagggacatagaccctattatcaccagactgcagcagattaaagagaaaccgtccggttggtcccagatttgcaaggactcctcctataagaacgggtctcgcgacaccggtagtatggatcctgacgtgcagctgtgtcactgtatcgaacggacggtgattgaaatcataaatatgtccgtctccggcatttag

SEQ ID NO: 205551 - DNA, 3615 bp, Artificial Sequence
  derived and/or modified sequence
atgaaggaccagcagaccgtgatcatgaccgagtgcaccagcctgcagttcgttagcccctttgctttcgaggcgatgcagaaagtggatgtggtgtgcctggcctccctctcagatcctgagctgcgactacttctgccttgcttagtacgcatggccctctgtgctcccgccgatcagtcccagagctgggcccaggacaaaaagctcattctgcggctacttagtggggttgaggccgtgaacagtatagtggcgctcttatccgtggattttcatgcactcgagcaagacgcatcgaaagaacagcagctgcggcataaattggggggaggtagcggagaaagcatccttgtgagccagttacagcacggtttaacacttgaatttgagcattctgattccccccgacggctaaggctggtcctgtccgaactactggccatcatgaacaaagtttctgaatctaacggcgagttcttctttaagagtagtgagctcttcgagagcccggtgtatctggaggaagccgcagacgtcctgtgcatactacaggccgagctgccaagtctgttgccgatcgtggatgtcgccgaggccctgctccacgtacggaacggcgcctggtttctctgcctcctggttgccaatgtccctgatagcttcaacgaagtgtgtcgcggactgattaagaatggggagcgccaggacgaggaaagtctagggggaaggcgacgaactgatgccttaagatttctgtgtaagatgaatccatcccaggccttaaaggtccgggggatggtcgttgaagagtgccatctgcccggacttggcgtggcattgactctggatcacactaagaatgaagcttgtgaggacggtgtctctgacctggtatgtttcgtgtctgggctgctgctcgggaccaatgctaaggtcagaacctggtttggaacatttattaggaatggccagcaaagaaagagggagacttcctcctcggtgctctggcaaatgcgcaggcagctactgcttgaactgatgggcattttaccaacggtcagaagcacaaggattgtggaagaggctgacgtggatatggagccgaatgtgtcagtttactccggactgaaggaagagcacgtagtgaaggcctcagcccttttgcggctatactgcgccctaatgggcattgcaggtctcaagcccacagaggaggaggccgaacagctgttgcagttgatgacatctcgtcctcctgccacaccggctggcgtacgattcgtttctctatctttctgtatgctgctcgcctttagcacactggtaagtacccccgaacaggaacagctaatggtggtttggctgagttggatgattaaagaagaggcatatttcgagtcaacaagcggagtgtcagcgtcctttggggagatgctgctcctggtggcgatgtactttcactccaatcagctgtccgcaataatagacttagtttgcagcactctcggcatgaagatcgttattaagccatccagcctgtcccgcatgaaaacgatctttactcaggaaattttcacagagcaggtggttactgcccatgctgttcgggttccagtcacctccaacctcagtgctaatattacaggcttcctccccattcattgcatttatcagttgctccggagtaggtcctttaccaaacataaggtgagtattaaagactggatctatcgacagctttgcgagacctccacccccctgcatccacagctgctcccactgattgatgtgtatattaatagcatcctcactcccgcgagtaaatccaatcctgaggctacaaaccagcctgtgacagaacaggagattctgaatattttccagggggtcatcggtggcgacaacatacggcttaatcagagatttagcatcacggctcaactgcttgtgctctactatattttgtcctacgaggaggccctgctggcaaacactaaaacactggccgcgatgcagcggaagccgaaaagctatagtagttccctgatggatcagatccccatcaagtttcttattcggcaggcccaggggcttcagcaggagctgggaggtctgcactctgctttgctgcgcctacttgcaaccaattacccgcatctatgtatagtcgacgactggatttgtgaggaggagatcacaggcactgacgctctgcttcgtcgcatgctgctgacgaacaacgcgaaaaaccacagcccgaagcagcttcaagaggcgttttcagccgttccagtgaacaatacacaggtgatgcagattattgaacaccttaccttactttcggccagtgaactgataccttatgccgaggttctcacgtccaatatgtcccaactgttgaactctggagtgcctagacggatcttgcagacggtaaacaaattgtggatggtgctgaacaccgttatgccccgacgcctgtgggtgatgactgtcaacgccctgcagccgtccatcaagttcgtaagacagcagaaatatactcaaaatgatctcatgatcgaccccttgatcgtactgagatgcgaccagagagtacatagatgtccacctttaatggacatcacattacacatgctcaacgggtacttactggcctccaaagcctatctctcagctcacctgaaagagacagagcaggatcggccaagtcaaaacaacactattggcctggtgggccaaacagatgctcctgaagtgacccgggaggagttgaaaaatgctttactggctgcccaggattccgctgctgtccagattctgttggaaatctgcttaccaaccgaagaggaaaaagctaatggggtgaatcccgactccctgcttcggaacgttcagagcgtgattacgactagcgcccctaacaagggcatggaggagggggaagataatttattgtgtaacctgcgagaagttcaatgcctgatttgctgtctgttacatcagatgtatattgccgatccaaatatcgcaaagctcgtgcactttcaagggtacccttgtgagcttttgcccttaaccgtggcaggaattccatctatgcatatctgcctggacttcatacccgagttgattgcccagcccgaattggaaaagcaaatattcgccattcagctcttgagtcacctgtgcattcaatacgccctgcctaagtcattgagcgtggcacggctcgcggtcaacgtgatgggtactctgctgactgtactaactcaggccaagcggtatgcattttttatgccaaccttaccatctctggttagtttctgccgagcatttccccccctctacgaagacataatgagcctgttgatacagatcggacaggtatgcgcctcggacgtggcaacgcagacaagagacatcgacccaatcatcacacggctgcaacagatcaaggaaaagccaagcgggtggagccagatctgtaaagatagctcctataagaacggcagccgcgataccggcagtatggatccagacgtgcagctgtgccattgcattgaacgcaccgtgatagagattatcaatatgtcagtttcagggatctag

SEQ ID NO: 205552 - DNA, 3612 bp, Artificial Sequence
  derived and/or modified sequence
aaagaccagcagacagtgataatgactgagtgtacctctctccagtttgtttctccatttgcgttcgaagcaatgcagaaagtggatgttgtgtgtttggcatcactgtcggatccagagttacggttactcctgccatgcctggtgcgcatggccctttgcgctcctgcggaccaatcacagtcctgggcccaagataagaagctgattctccgcctcctgtccggagttgaagcagttaacagcattgttgccctcctgtccgtcgacttccacgcccttgagcaagacgccagtaaggaacagcagctccgtcacaaattgggcggtgggtcgggagagagtattctggtgagtcagctgcagcatggactcaccctcgaatttgaacactccgatagtccccgaagattgagactggtccttagcgaactgctagcaatcatgaacaaagtgtccgagagtaatggggagttctttttcaagtcatctgagctgtttgagagtccagtgtacctggaggaagcagccgatgtgctgtgcatcctccaggctgaactgccgagtctgctgcctatcgtggatgtggcagaagcgctgctccatgtgagaaatggcgcatggtttctgtgcctgttggtggccaacgtccctgatagctttaacgaggtctgcagaggtctgattaagaatggggaacggcaggatgaagaaagcctggggggaagacggaggactgacgctctccgattcttgtgtaagatgaatccctctcaagccctcaaggtgagaggtatggtggtggaggaatgtcatttgcctgggctgggagtggctctgacccttgatcatactaagaatgaggcctgtgaggacggcgtaagcgatctggtttgcttcgtgagcggcttgctcctcggcaccaacgccaaggtgaggacctggtttggcacattcatccgaaatgggcagcagaggaaaagagaaacctctagcagtgttctttggcagatgagacgtcaactgctgctcgaactgatgggcattcttccaacagtcagatccacacggatcgtggaggaggccgacgtggatatggagcctaatgtgtccgtatactcaggcttgaaagaggagcacgtggttaaggcctctgcccttctgagactgtattgtgcgcttatgggcattgccggtctgaaacctacagaagaagaggccgaacagcttttgcaactgatgactagccgccctcccgcaacaccagccggtgtcaggttcgtcagtctttccttctgcatgctgctggccttctctaccctcgtctctacgcctgagcaggaacagctaatggtcgtgtggttgtcctggatgattaaagaggaggcctatttcgaatccaccagcggggtgtccgccagcttcggcgaaatgctgttgttggtggccatgtatttccactcgaaccaactctcggccatcatagatctggtctgtagtactctggggatgaagatcgtaataaaacctagcagcttgtctagaatgaagacaatctttacacaagagatctttacagagcaggtggtgactgctcacgctgtaagagtgccggtgacatccaacctatcggccaatatcacgggctttctgcctattcattgtatttatcagcttcttaggtcacgctccttcacgaagcataaggtttctatcaaggactggatctataggcagctgtgtgaaacttccaccccactacaccctcaactccttccactaattgatgtttatataaatagcatattgacaccagcttcaaagtcaaatcccgaagcgaccaaccagcctgtgactgagcaggaaatactcaatatcttccagggggtgatcggaggggataacattaggctcaaccaaaggttttctataaccgcccagctgctcgtgctgtactatatcctgagctacgaagaggccctcttggcaaatacaaagacccttgctgctatgcagcggaaaccaaaaagctacagcagctcccttatggaccagattccaatcaagttcctgatcaggcaggcacagggccttcagcaggagctcggtggcttgcattcagcattgctgaggctgctggccacaaattaccctcacctctgtattgttgacgattggatctgcgaggaagagattaccggtactgacgcactcctgcgcagaatgcttcttactaacaatgcaaaaaatcacagccctaaacagctccaggaggccttctcggctgtacccgtgaataatacgcaggttatgcagatcatcgagcatttgactctgctgagcgcctctgagcttattccttatgcggaagttctcactagtaatatgagtcagctccttaattccggggtgcccaggcgcattctccagaccgtcaacaaactctggatggtactgaacaccgttatgcccaggcggttatgggtcatgacagtgaatgcacttcagccgagcattaaatttgtgcgccagcagaagtatacccagaacgaccttatgatcgaccccctgattgtattgagatgcgatcagcgggttcacagatgtccgcctcttatggatattacattgcacatgctcaacggatacctgctggcctccaaagcatacctgagtgcccacctgaaagagacggagcaggatcgtccttcccagaacaataccattggcctggtgggtcagaccgacgcccctgaggtgaccagagaggagctgaaaaacgctttgctggctgcgcaggactcggccgcagttcagatactgctggagatctgtctgcctacagaagaggagaaggccaacggtgtcaacccagatagtctgctcaggaatgtacaatcggtaattactacttctgctccgaataaaggtatggaagaaggcgaagacaaccttttgtgcaatttgcgggaggtccagtgtctcatctgttgtctgctgcatcagatgtacatcgcagatcccaacattgccaagctcgttcactttcaggggtacccttgcgagttactacctctcaccgtcgccggaataccctccatgcacatctgccttgatttcatccctgaactgatcgctcaaccagaactggaaaagcaaattttcgctatccaattgctgtcacacctgtgcatccagtatgccctgcccaaatccctgagcgtggccaggctggcagttaacgtgatgggcaccctccttaccgttctgacacaggcgaagaggtatgcttttttcatgcccacactgccatccctcgtgagcttctgccgcgctttcccgcctctctatgaggacataatgtcactcctgatccaaatcgggcaggtatgtgcctcagacgtcgcaacgcaaacacgtgatattgacccgataattacgaggctgcaacagattaaagagaagccttccgggtggtctcagatttgtaaagacagttcttacaagaacggcagccgcgacaccgggtccatggacccagacgtgcagctttgccattgcatcgaaaggaccgtaattgagataatcaatatgtctgtatccggaatctag

SEQ ID NO: 205553 - DNA, 3615 bp, Artificial Sequence
  derived and/or modified sequence
atgaaggaccagcagacggtcatcatgactgaatgtacatcactccagtttgtgagcccctttgcattcgaagctatgcagaaggtggatgtcgtttgcctggcatctctttctgatccagagctgcggctcctgctgccctgtctggtgagaatggccttgtgcgccccagctgaccagtcccagtcatgggctcaggacaagaaactcatcctccggttgctgtccggcgtggaagcagtcaacagcattgttgcactactatccgtggattttcacgcattggagcaagacgcctcgaaggaacaacagctgcggcataaattaggaggcggaagcggggaatccatccttgtctcacagcttcaacacggcctcaccctggaattcgagcacagtgattcccctaggcgtctgcgcctagtcttgagtgaactgttggcaatcatgaacaaagtgtccgaatcgaatggggaatttttcttcaagtccagcgagctgtttgagtccccagtttatctggaggaggctgcagatgtcctctgtattctccaggccgagctgccaagcctattaccaattgtcgacgtggctgaagcacttctccacgtacgtaatggggcttggtttttgtgccttctggtggccaatgtgccggatagttttaatgaggtgtgcagaggcttgatcaaaaatggggagcgccaagacgaagagagtctgggcggtcgcagaaggaccgacgcgctcagattcttatgcaaaatgaatccaagtcaggctctcaaggtgagaggtatggtggtggaagagtgtcacctgccagggctgggggtggccctcaccctcgaccatactaagaacgaggcctgcgaggacggtgtgtctgaccttgtctgctttgttagcggcctcctgttggggacgaacgctaaagtccgcacatggttcggaacctttattagaaacggccaacaacgaaagagagagaccagctcatctgtgctttggcagatgaggaggcaattgctcctcgaactcatgggaatcctacccaccgtacggagcaccagaattgtggaggaagccgacgtggatatggaaccaaatgtgagcgtgtactcaggcttaaaggaggaacatgtggtgaaggcctcagccctgctgcgattgtattgcgccctgatgggtatcgccggactaaagccaactgaggaagaagcagagcagctccttcagctgatgacatctcgccctccggcaacgccagcgggagtgcgttttgtgtctttatctttttgcatgctcctggccttctctaccctggtatcaacacctgaacaagaacagctgatggtggtatggctgagctggatgatcaaggaagaggcctacttcgagagcacaagtggggtctccgcatcctttggcgagatgctgctgttagtcgcaatgtattttcatagtaaccagctgtccgccattatcgacctggtgtgctctaccctcggaatgaaaatagtaataaaaccctccagtctcagtaggatgaaaaccattttcacccaggagatttttaccgagcaggtggtaacagctcatgccgtgcgcgtgccggtaaccagcaacctgagtgcaaacattactggttttctcccaattcattgtatttaccagctgctgagaagccggtcattcaccaagcacaaagtgtccataaaggactggatctatagacagctgtgtgagacgtcaacccccctgcatccccagttgcttcccctgatcgatgtctacattaactccatactgactccggcatctaagtccaaccccgaagccacaaaccagccagtgaccgagcaagagattctcaatatctttcagggagtcatcgggggagacaatattagactaaaccaacgtttttctattaccgcccaactcctcgtcctgtattacatcctgtcttacgaagaggccttgttggccaacaccaagactctggccgctatgcaaaggaaaccaaaaagctactctagttcattgatggaccagatcccaataaagtttcttatcagacaggcacagggtctccaacaagagcttggcggactgcattctgcgttgttgaggttactggctacgaattatccacatttatgcattgttgatgactggatctgcgaagaggagatcactggaactgatgccctacttagacgtatgctgctgacgaataacgctaagaatcactcccccaaacagctgcaggaagccttctccgcagtgcctgtgaacaacacccaggtgatgcagataattgagcacctgactctcctcagtgcaagcgagctaatcccctatgccgaggttctcactagtaatatgagtcagctactgaattccggagtccctcgtaggattctgcagacagtgaacaagctgtggatggttctgaatacagtcatgccaagacggctgtgggtgatgaccgtcaacgcattacagcccagcatcaaattcgtgagacagcagaaatacactcaaaatgacctgatgatcgatcctctgattgtcttgagatgtgatcagcgtgtgcaccgttgtccaccattaatggacatcaccttgcatatgctgaacggctatctcctcgcttcaaaggcctacctttcagctcatctgaaggagaccgaacaggataggccaagccaaaataataccattggcctggtcggtcagacagacgccccagaggtcaccagagaggaactgaaaaatgcactgctggccgctcaagattctgccgcagtacagatcttgctggaaatatgtctgcccactgaggaagagaaggccaatggagtaaacccagattccttgctccggaacgtccagtctgtgattaccacgtctgctcccaacaaaggcatggaagagggggaagataatctcctatgtaacctcagggaagtccagtgtcttatttgctgcttgctccaccaaatgtatattgccgaccctaatatcgcaaagctggtccactttcaggggtacccctgcgagctcctaccactcactgtggccggtattccgtccatgcatatctgcctggactttatacccgagctgatcgctcagcctgagctagagaagcaaattttcgctatccagctgctgtctcatctatgtatccagtatgctctccccaagagtctctctgtggctcgactagctgtgaatgtaatgggtactctgctcactgtcctgactcaagccaagagatatgcattttttatgccaacactgccatctttggtgtccttttgtcgtgcctttcccccactgtatgaggatattatgtctcttctgattcagatcggacaggtgtgtgcctctgatgttgcaactcagacgagagacatcgatcccatcataacgcggttacagcaaataaaggagaagccctctgggtggagccaaatatgtaaggattccagttataaaaatggatcgcgcgatacaggtagcatggatccagatgtccagctgtgccattgtattgagcgaaccgtaatcgagattataaacatgagcgtaagcggcatctag

SEQ ID NO: 205554 - protein, 436 aa, Artificial Sequence
  derived and/or modified sequence
MLLSPKFSLSTIHIRLTAKGLLRNLRLPSGFRRSTVVFHTVEKSRQKNPRSLCIQPQTAPDALPPEKTLELTQYKTKCENQSGFILQLKQLLACGNTKFEALTVVIQHLLSEREEALKQHKTLSQELVNLRGELVTASTTCEKLEKARNELQTVYEAFVQQHQAEKTERENRLKEFYTREYEKLRDTYIEEAEKYKMQLQEQFDNLNAAHETSKLEIEASHSEKLELLKKAYEASLSEIKKGHEIEKKSLEDLLSEKQESLEKQINDLKSENDALNEKLKSEEQKRRAREKANLKNPQIMYLEQELESLKAVLEIKNEKLHQQDIKLMKMEKLVDNNTALVDKLKRFQQENEELKARMDKHMAISRQLSTEQAVLQESLEKESKVNKRLSMENEELLWKLHNGDLCSPKRSPTSSAIPLQSPRNSGSFPSPSISPR

SEQ ID NO: 205555 - DNA, 1311 bp, Artificial Sequence
  derived and/or modified sequence
atgctgctgagccccaagttcagcctgagcaccatccacatcagactgaccgccaagggcctgctgagaaacctgagactgcccagcggcttcagaagaagcaccgtggtgttccacaccgtggagaagagcagacagaagaaccccagaagcctgtgcatccagccccagaccgcccccgacgccctgccccccgagaagaccctggagctgacccagtacaagaccaagtgcgagaaccagagcggcttcatcctgcagctgaagcagctgctggcctgcggcaacaccaagttcgaggccctgaccgtggtgatccagcacctgctgagcgagagagaggaggccctgaagcagcacaagaccctgagccaggagctggtgaacctgagaggcgagctggtgaccgccagcaccacctgcgagaagctggagaaggccagaaacgagctgcagaccgtgtacgaggccttcgtgcagcagcaccaggccgagaagaccgagagagagaacagactgaaggagttctacaccagagagtacgagaagctgagagacacctacatcgaggaggccgagaagtacaagatgcagctgcaggagcagttcgacaacctgaacgccgcccacgagaccagcaagctggagatcgaggccagccacagcgagaagctggagctgctgaagaaggcctacgaggccagcctgagcgagatcaagaagggccacgagatcgagaagaagagcctggaggacctgctgagcgagaagcaggagagcctggagaagcagatcaacgacctgaagagcgagaacgacgccctgaacgagaagctgaagagcgaggagcagaagagaagagccagagagaaggccaacctgaagaacccccagatcatgtacctggagcaggagctggagagcctgaaggccgtgctggagatcaagaacgagaagctgcaccagcaggacatcaagctgatgaagatggagaagctggtggacaacaacaccgccctggtggacaagctgaagagattccagcaggagaacgaggagctgaaggccagaatggacaagcacatggccatcagcagacagctgagcaccgagcaggccgtgctgcaggagagcctggagaaggagagcaaggtgaacaagagactgagcatggagaacgaggagctgctgtggaagctgcacaacggcgacctgtgcagccccaagagaagccccaccagcagcgccatccccctgcagagccccagaaacagcggcagcttccccagccccagcatcagccccagatag

SEQ ID NO: 205556 - DNA, 1311 bp, Artificial Sequence
  derived and/or modified sequence
atgctcctctcacctaaattcagtctgtcaaccatacacattagacttactgcgaagggcttattgcgtaatttgcgactgccttccggctttagacgctctactgtggttttccatacggtggaaaaaagtcgacagaagaatccgcggtcactgtgtatccagcctcagactgctcccgatgcactccccccagaaaaaactctggagcttactcagtacaaaaccaagtgcgaaaatcagtctggcttcattctgcagctgaaacaactgctggcatgtggcaacactaagtttgaagccctgacggttgttatacagcatctcctttccgaacgggaggaagcattgaagcagcacaaaactctgtctcaggagctggtaaatctaaggggcgagctggttactgcctcaacgacatgtgagaagcttgagaaagctcgaaatgagcttcaaacggtgtatgaggcattcgtccaacaacaccaggctgagaaaaccgaacgggagaatcggcttaaggagttttataccagagaatatgaaaagttgagggatacatacattgaggaagctgagaagtataagatgcagcttcaggaacagttcgacaacctgaacgcagcgcacgagacgtccaaattggaaatagaggccagtcatagcgaaaagctggagttacttaagaaagcctatgaggcctcactgagcgaaattaagaaaggacacgaaatagagaagaagtccctggaggacttgctgagcgagaaacaggaaagtcttgagaagcagattaatgatctcaaaagcgaaaatgacgctttgaatgagaaactcaaaagcgaggaacaaaagcggcgagcgcgcgagaaggccaatctgaaaaatccccagattatgtatctcgagcaggagctcgaatccctgaaggctgtcttggagatcaagaacgagaagctccatcaacaggatataaaacttatgaaaatggaaaagttggtcgacaataacacagcactggtagacaaattaaaacgattccaacaggagaacgaggagctgaaagccaggatggacaaacatatggccatctctcgacagctgtcaaccgaacaggcggttctccaggaatccttagagaaggaatccaaagtaaacaagcgcctctcaatggagaacgaggaactgctctggaagttgcataatggtgacctctgtagccctaaacgttccccaacttcctctgccattcccctgcagtccccccggaactcggggagtttcccgtcgccatctatatctccacgatag

SEQ ID NO: 205557 - DNA, 1311 bp, Artificial Sequence
  derived and/or modified sequence
atgctgctgagccccaagttcagcctgagcaccatccacatccggctgacagccaagggcctgctgaggaacctgcggctgcccagcggcttccgccgcagcacagtggtgttccacacagtggagaagagccggcagaagaaccccaggagcctgtgcatccagccccagacagccccagatgccctgcccccagagaagaccctggagctgacccagtacaagaccaagtgtgagaaccagagcggcttcatcctgcagctgaagcagctgctggcctgtggcaacaccaagtttgaggccctgactgtggtgatccagcacctgctgtctgagcgggaggaggccctgaagcagcacaagaccctgagccaggagctggtgaacctgcggggggagctggtgacagccagcaccacctgtgagaagctggagaaggccagaaatgagctgcagacagtgtatgaggcctttgtgcagcagcaccaggccgagaagacagagcgggagaaccggctgaaggagttctacacccgggagtatgagaagctgcgggacacctacatcgaggaggccgagaagtacaagatgcagctgcaggagcagtttgacaacctgaatgctgcccacgagaccagcaagctggagattgaggccagccacagcgagaagctggagctgctgaagaaggcctatgaggccagcctgtctgagatcaagaagggccatgaaattgagaagaagagcctggaggacctgctgtctgagaagcaggagagcctggagaagcagatcaatgacctgaagtcagaaaatgatgccctgaatgagaagctgaagtctgaggagcagaagaggcgggcccgggagaaggccaacctgaagaacccccagatcatgtacctggagcaggagctggagagcctgaaggctgtgctggagatcaagaatgagaagctgcaccagcaggacatcaagctgatgaagatggagaagctggtggacaacaacacagccctggtggacaagctgaagcgcttccagcaggagaatgaggagctgaaggccaggatggacaagcacatggccatcagccggcagctgagcacagagcaggccgtgctgcaggagagcctggagaaggagagcaaggtgaacaagaggctgtccatggagaatgaggagctgctgtggaagctgcacaacggggacctgtgcagccccaagaggagccccaccagcagcgccatccccctgcagagccccagaaattctggcagcttccccagccccagcatcagccccaggtag

SEQ ID NO: 205558 - DNA, 3731 bp, Artificial Sequence
  derived and/or modified sequence
acagtgtgatgtggttcagaggcagcttctagacctgcaggagggagattgtattcagaggaagagcatcattttggcaacatctgaaagtgaaaacggaagccagaaacacttggccagccctgggggatttttttcttctatgcctctctggtggaatgacatttgctgtgtaggcatctttcctctgactgtatttcttggccttgaagagtactgagtttaaaaagacagtatgtgacagtccatggaaattgcctcttctgtgaaatctcgccacctgctccgaagacatgttgttgtctcccaaattctccttatccaccattcacatacgactgacggccaaaggattgcttcgaaaccttcgacttccttcagggtttaggagaagcactgttgttttccacacagttgaaaagagcaggcaaaagaatcctcgaagcttatgtatccagccacagacagctcccgatgcgctgccccctgagaaaacacttgaattgacgcaatataaaacaaaatgtgaaaaccaaagtggatttatcctgcagctcaagcagcttcttgcctgtggtaataccaagtttgaggcattgacagttgtgattcagcacctgctgtctgagcgggaggaagcactgaaacaacacaaaaccctatctcaagaacttgttaacctccggggagagctagtcactgcttcaaccacctgtgagaaattagaaaaagccaggaatgagttacaaacagtgtatgaagcattcgtccagcagcaccaggctgaaaaaacagaacgagagaatcggcttaaagagttttacaccagggagtatgaaaagcttcgggacacttacattgaagaagcagagaagtacaaaatgcaattgcaagagcagtttgacaacttaaatgctgcgcatgaaacctctaagttggaaattgaagctagccactcagagaaacttgaattgctaaagaaggcctatgaagcctccctttcagaaattaagaaaggccatgaaatagaaaagaaatcgcttgaagatttactttctgagaagcaggaatcgctagagaagcaaatcaatgatctgaagagtgaaaatgatgctttaaatgaaaaattgaaatcagaagaacaaaaaagaagagcaagagaaaaagcaaatttgaaaaatcctcagatcatgtatctagaacaggagttagaaagcctgaaagctgtgttagagatcaagaatgagaaactgcatcaacaggacatcaagttaatgaaaatggagaaactggtggacaacaacacagcattggttgacaaattgaagcgtttccagcaggagaatgaagaattgaaagctcggatggacaagcacatggcaatctcaaggcagctttccacggagcaggctgttctgcaagagtcgctggagaaggagtcgaaagtcaacaagcgactctctatggaaaacgaggagcttctgtggaaactgcacaatggggacctgtgtagccccaagagatcccccacatcctccgccatccctttgcagtcaccaaggaattcgggctccttccctagccccagcatttcacccagatgacacctccccaaagtccacagactctctgaaagcattttgatgcaggtctgcaggactgaccccaaggaggaacgtgggcacaagaggtatatcagcacacgtgtgatcaccgtagggtaactggagcgtcaccaccggcggaatcgcagcttctgagactggaactctggaggaagacttttgcctccgtccaaaagattcctccaaaaaaagatttaaaaaaagatttcggcatcgacacggacgttgttgcacaaagcacttaaagaacgagagcatcttgttcattgcctttttcacctaagcatagggggaaaaactctcagggccctattaagatttataacctttgtaatgttcttcaccacagacaccttcttgtgagttttcagtctgactgtgggggtggggggtgtgaatgaaatggatgtcacagagtgtcatgtgtctgatgcagcctcctctgctgtgtattaaatgtcaaaatctgaatatatctggatatgtactaatcaaataataatcaatcaatcagcatatacatttcagccaaagccatagaagaaaaagcaatagttgcttgaattatgatcatctaccaccaactctgctcagccctgtaacagggtagggagagggtataacaggaagagctttgacttgtccctgtctatacattctctgtatcttttgggggtaacttcttggcagtttttcagtgttcagccatgtcagttgaaactagatttttctgtagattttttacttacccatgtgagcctaacactatcctgtaattcattttctcaggctatgtgtaaatgtagaaccctaatttttctataaaaaaacaaactaactaactaactgtgtaaagaaagaaaaagggaagtaccaatgggtttttccaccttatttttacctttgatctacccttgcagatttaacctgtcttcttccctcccattattctcattttccttttacctttctccaccatccagagccacaaaagcaaaccttctacctcctacctacttttctctgggacaaggataaaggaatatgattttccagagccccagagccagctcatcttccaggtgctgaaaccactttccaaataaactaaagcctggatttgatattacaaattttgggaaatcttagaataaagaacgagaacaaggaagtcattggctagtataattaagaaaggtaggattcagtgcttaccgatgatgcagtacttgatagaagaaaacagtctgggaggatagcgctcatttttcagttaccctttaaggagtccctttgtctttgggaaagtagcagaatggtccgcttctttcccatgagtggaaaatgtggcttgtccaactctcctccaggttgcatttcagtttctttccaaaacttattacctcccctaatcctgagactttggaaaaggtggaaggaagaactgttgctttatctccccctccctgcatgtgtcaacattgtgatgtcagtatttactaatctacattcagtggctgtacaaataacagctgtagtaagaagagattcaggatgctagaggtgaatatttgggtcatttacatgtacactacatagcaagttgatactcatgttgcatgttcttttaaattagtgattttgtgtcttaagtctttaacttccaatacttcatcatgtatgtaaccttccatgtttgcttctgataaatggaaatgtaggttcactgccacttcatgagatatctctgctcacgcttccaagttgttctcaatgacattagccaaagttgggtttgccattcatcccctaggcatggtaaatcttgtgttgttccctgctgtcctccgtattacgtgaccggcaaataaatctcatagcagttaatataaaacatctttggaggatgggagagaacaggagggaagatgggaaacaaaatagagaattcttaagattttgtttaaaccaaatgtttcatgtagaatgcaaaatgttggcacgtcaaaaatatgaatgtgtagacaactgtagttgtgctcagtttgtagtgatgggaagtgtattttactctgatcaaataaataatgctggaatactcaagaa

SEQ ID NO: 205559 - DNA, 1311 bp, Artificial Sequence
  derived and/or modified sequence
atgctgctgagccccaagttcagcctgagcaccatccacatccggcttaccgccaaggggcttctgcgtaatttgcgcttgccctccgggtttcgccgctcgaccgtcgtgtttcacaccgtggagaagtcacgccagaaaaacccccgatccctgtgtattcagcctcagacagctcctgatgccctacctcctgagaaaaccctggaactgacccagtacaaaacaaaatgtgagaatcagtcagggttcatactccagctgaaacagctcctggcctgcggaaatacaaagtttgaggctcttaccgtcgtcatccagcaccttttgtcggagcgtgaggaggctctcaagcagcataaaacactatctcaggagctagttaacctgagaggcgagctggtgacagcatccacgacatgtgagaagctggaaaaggcccgaaacgagctgcagacagtctatgaggccttcgtacagcagcaccaggcagagaaaaccgagagagagaatcggctgaaggagttctacactagagaatacgagaaactgcgggacacctacattgaggaagccgagaagtataagatgcagctacaagagcagtttgacaaccttaatgcagctcatgagacttctaagcttgagattgaagcaagccactcagagaagctggaacttcttaagaaggcatacgaggcatcgctcagcgagatcaaaaaggggcatgagatcgaaaaaaagtctttggaggacttgctctcagaaaaacaggaatctctggaaaagcaaattaatgatctgaaatcggagaatgatgcattgaatgaaaagctcaagagtgaggaacagaaacgccgagcgcgtgagaaggccaatctcaagaacccccagattatgtatctggaacaagaactcgagagcctaaaagccgtcctggaaataaaaaacgagaagcttcaccaacaggacatcaagttgatgaagatggagaaattagtagataacaacactgccctcgtggataagctgaagaggttccaacaggagaatgaagagctgaaggctcgtatggacaagcacatggctatcagcagacagctgtccactgagcaagctgtgctacaggagagcctggaaaaggaaagtaaggtgaataaacgcctctcaatggagaacgaggaattattatggaagctgcacaatggcgatttgtgttcgccgaaacgctctcccacttcctccgctattcccctgcagtcccccaggaacagcggttcgtttccctcaccatcaatctcgccaagatag

SEQ ID NO: 205560 - DNA, 1311 bp, Artificial Sequence
  derived and/or modified sequence
atgctgctgagccccaaattttcgcttagcaccatccacattcgtctgacggctaaaggcctgctgaggaaccttagactaccatctgggtttagaagaagcacagtggtgttccacacggtagagaagagtaggcagaaaaacccgaggtcactctgcatccaacctcaaacggctccggacgcacttccccctgaaaagacactagagctcactcagtataagaccaaatgcgaaaatcagtctggtttcatcctccagttaaagcaattactcgcctgcggcaatactaagtttgaagccttgacggtcgtgatacaacatctgctgtccgaaagagaagaagcactgaagcagcacaaaactctgagtcaggaattagtgaacttgaggggggagcttgttacagcctccacaacgtgtgagaaattggaaaaggctcgtaacgagctgcagacagtgtacgaggcgttcgtgcaacaacaccaggccgagaagactgagagagagaatcgcttgaaggagttttatactcgagaatatgagaaacttcgtgatacctacatcgaggaggctgaaaaatataaaatgcagttacaggaacagtttgataacctgaacgccgctcatgaaacatcgaagctcgagatcgaagcatcacattcagaaaaactggagctgctcaaaaaagcctacgaagccagtctcagcgagattaaaaaaggccacgagatagagaagaagtcattagaggacctcctctcagaaaaacaagagagccttgaaaaacagatcaatgatctcaaatccgaaaacgacgctctgaacgaaaagcttaaaagcgaggagcagaagcggcgagcccgagagaaggccaacctgaaaaatccgcagataatgtatctggaacaggagctggagtcactgaaggccgttcttgaaatcaagaatgagaagctgcatcagcaagatattaagctaatgaagatggaaaagctggtggataacaatacggctctcgtggacaagctgaagcgctttcaacaagaaaatgaggaactgaaggccagaatggacaagcacatggctatttccaggcagttaagtaccgaacaggccgtgcttcaggagagcttggaaaaagagtcaaaggtgaataagcgcctctccatggaaaacgaggagcttctctggaagctgcacaacggggacctgtgctcccccaaaaggtcgcccacctcatccgcgattccccttcagtcccccaggaactccggctctttcccctccccttcaatttctccaagatag

SEQ ID NO: 205561 - protein, 1204 aa, Artificial Sequence
  derived and/or modified sequence
MAMDQVNALCEQLVKAVTVMMDPNSTQRYRLEALKFCEEFKEKCPICVPCGLRLAEKTQVAIVRHFGLQILEHVVKFRWNGMSRLEKVYLKNSVMELIANGTLNILEEENHIKDALSRIVVEMIKREWPQHWPDMLIELDTLSKQGETQTELVMFILLRLAEDVVTFQTLPPQRRRDIQQTLTQNMERIFSFLLNTLQENVNKYQQVKTDTSQESKAQANCRVGVAALNTLAGYIDWVSMSHITAENCKLLEILCLLLNEQELQLGAAECLLIAVSRKGKLEDRKPLMVLFGDVAMHYILSAAQTADGGGLVEKHYVFLKRLCQVLCALGNQLCALLGADSDVETPSNFGKYLESFLAFTTHPSQFLRSSTQMTWGALFRHEILSRDPLLLAIIPKYLRASMTNLVKMGFPSKTDSPSCEYSRFDFDSDEDFNAFFNSSRAQQGEVMRLACRLDPKTSFQMAGEWLKYQLSTFLDAGSVNSCSAVGTGEGSLCSVFSPSFVQWEAMTLFLESVITQMFRTLNREEIPVNDGIELLQMVLNFDTKDPLILSCVLTNVSALFPFVTYRPEFLPQVFSKLFSSVTFETVEESKAPRTRAVRNVRRHACSSIIKMCRDYPQLVLPNFDMLYNHVKQLLSNELLLTQMEKCALMEALVLISNQFKNYERQKVFLEELMAPVASIWLSQDMHRVLSDVDAFIAYVGTDQKSCDPGLEDPCGLNRARMSFCVYSILGVVKRTCWPTDLEEAKAGGFVVGYTSSGNPIFRNPCTEQILKLLDNLLALIRTHNTLYAPEMLAKMAEPFTKALDMLDAEKSAILGLPQPLLELNDSPVFKTVLERMQRFFSTLYENCFHILGKAGPSMQQDFYTVEDLATQLLSSAFVNLNNIPDYRLRPMLRVFVKPLVLFCPPEHYEALVSPILGPLFTYLHMRLSQKWQVINQRSLLCGEDEAADENPESQEMLEEQLVRMLTREVMDLITVCCVSKKGADHSSAPPADGDDEEMMATEVTPSAMAELTDLGKCLMKHEDVCTALLITAFNSLAWKDTLSCQRTTSQLCWPLLKQVLSGTLLADAVTWLFTSVLKGLQMHGQHDGCMASLVHLAFQIYEALRPRYLEIRAVMEQIPEIQKDSLDQFDCKLLNPSLQKVADKRRKDQFKRLIAGCIGKPLGEQFRKEVHIKNLPSLFKKTKPMLETEVLDNDGGGLATIFEP

SEQ ID NO: 205562 - protein, 170 aa, Artificial Sequence
  derived and/or modified sequence
MAGEWLKYQLSTFLDAGSVNSCSAVGTGEGSLCSVFSPSFVQWEAMTLFLESVITQMFRTLNREEIPVNDGIELLQMVLNFDTKDPLILSCVLTNVSALFPFVTYRPEFLPQVFSKLFSSVTFETVEESKPPHFPPLSAWKEIQVWSWREQALCRTRSNYTKVSRKGVRA

SEQ ID NO: 205563 - protein, 721 aa, Artificial Sequence
  derived and/or modified sequence
MAGEWLKYQLSTFLDAGSVNSCSAVGTGEGSLCSVFSPSFVQWEAMTLFLESVITQMFRTLNREEIPVNDGIELLQMVLNFDTKDPLILSCVLTNVSALFPFVTYRPEFLPQVFSKLFSSVTFETVEESKAPRTRAVRNVRRHACSSIIKMCRDYPQLVLPNFDMLYNHVKQLLSNELLLTQMEKCALMEALVLISNQFKNYERQKVFLEELMAPVASIWLSQDMHRVLSDVDAFIAYVGTDQKSCDPGLEDPCGLNRARMSFCVYSILGVVKRTCWPTDLEEAKAGGFVVGYTSSGNPIFRNPCTEQILKLLDNLLALIRTHNTLYAPEMLAKMAEPFTKALDMLDAEKSAILGLPQPLLELNDSPVFKTVLERMQRFFSTLYENCFHILGKAGPSMQQDFYTVEDLATQLLSSAFVNLNNIPDYRLRPMLHILSKPLVLFCPPEHYEALVSPILGPLFTYLHMRLSQKWQVINQRSLLCGEDEAADENPESQEMLEEQLVRMLTREVMDLITVCCVSKKGADHSSAPPADGDDEEMMATEVTPSAMAELTDLGKCLMKHEDVCTALLITAFNSLAWKDTLSCQRTTSQLCWPLLKQVLSGTLLADAVTWLFTSVLKGLQMHGQHDGCMASLVHLAFQIYEALRPRYLEIRAVMEQIPEIQKDSLDQFDCKLLNPSLQKVADKRRKDQFKRLIAGCIGKPLGEQFRKEVHIKNLPFVADL

SEQ ID NO: 205564 - protein, 736 aa, Artificial Sequence
  derived and/or modified sequence
MHYILSAAQTADGGGLVEKHYVFLKRLCQVLCALGNQLCALLGADSDVETPSNFGKYLESFLAFTTHPSQFLRSSTQMTWGALFRHEILSRDPLLLAIIPKYLRASMTNLVKMGFPSKTDSPSCEYSRFDFDSDEDFNAFFNSSRAQQGEVMRLACRLDPKTSFQMAGEWLKYQLSTFLDAGSVNSCSAVGTGEGSLCSVFSPSFVQWEAMTLFLESVITQMFRTLNREEIPVNDGIELLQMVLNFDTKDPLILSCVLTNVSALFPFVTYRPEFLPQVFSKLFSSVTFETVEESKAPRTRAVRNVRRHACSSIIKMCRDYPQLVLPNFDMLYNHVKQLLSNELLLTQMEKCALMEALVLISNQFKNYERQKVFLEELMAPVASIWLSQDMHRVLSDVDAFIAYVGTDQKSCDPGLEDPCGLNRARMSFCVYSILGVVKRTCWPTDLEEAKAGGFVVGYTSSGNPIFRNPCTEQILKLLDNLLALIRTHNTLYAPEMLAKMAEPFTKALDMLDAEKSAILGLPQPLLELNDSPVFKTVLERMQRFFSTLYENCFHILGKAGPSMQQDFYTVEDLATQLLSSAFVNLNNIPDYRLRPMLHILSKPLVLFCPPEHYEALVSPILGPLFTYLHMRLSQKWQVINQRSLLCGEDEAADENPESQEMLEEQLVRMLTREVMDLITVCCVSKKGADHSSAPPADGDDEEMMATEVTPSAMAELTDLVSIQSTDKRVSPRAEVD

SEQ ID NO: 205565 - protein, 832 aa, Artificial Sequence
  derived and/or modified sequence
MTWGALFRHEILSRDPLLLAIIPKYLRASMTNLVKMGFPSKTDSPSCEYSRFDFDSDEDFNAFFNSSRAQQGEVMRLACRLDPKTSFQMAGEWLKYQLSTFLDAGSVNSCSAVGTGEGSLCSVFSPSFVQWEAMTLFLESVITQMFRTLNREEIPVNDGIELLQMVLNFDTKDPLILSCVLTNVSALFPFVTYRPEFLPQVFSKLFSSVTFETVEESKAPRTRAVRNVRRHACSSIIKMCRDYPQLVLPNFDMLYNHVKQLLSNELLLTQMEKCALMEALVLISNQFKNYERQKVFLEELMAPVASIWLSQDMHRVLSDVDAFIAYVGTDQKSCDPGLEDPCGLNRARMSFCVYSILGVVKRTCWPTDLEEAKAGGFVVGYTSSGNPIFRNPCTEQILKLLDNLLALIRTHNTLYAPEMLAKMAEPFTKALDMLDAEKSAILGLPQPLLELNDSPVFKTVLERMQRFFSTLYENCFHILGKAGPSMQQDFYTVEDLATQLLSSAFVNLNNIPDYRLRPMLRVFVKPLVLFCPPEHYEALVSPILGPLFTYLHMRLSQKWQVINQRSLLCGEDEAADENPESQEMLEEQLVRMLTREVMDLITVCCVSKKGADHSSAPPADGDDEEMMATEVTPSAMAELTDLGKCLMKHEDVCTALLITAFNSLAWKDTLSCQRTTSQLCWPLLKQVLSGTLLADAVTWLFTSVLKGLQMHGQHDGCMASLVHLAFQIYEALRPRYLEIRAVMEQIPEIQKDSLDQFDCKLLNPSLQKVADKRRKDQFKRLIAGCIGKPLGEQFRKEVHIKNLPSLFKKTKPMLETEVLDNDGGGLATIFEP

SEQ ID NO: 205566 - DNA, 5360 bp, Artificial Sequence
  derived and/or modified sequence
acttccgcgggcgcgtgcgcagtggcgggccgggcgcgtgcgcagcgccggcttcttcccagcgcgagttgctgctaacgctcctcctccagcttcccacccccgccgcccgccgcggcccggtaccaacgggtggtctcgccgagggagctgtcgtgcctcgtggtcccgggactgcagtggtgtgcgctctcggcgcgtggcgctaggcatggcgatggatcaagtaaacgcgctgtgcgagcagctggtgaaagcggtgacggtcatgatggaccccaactccacccagcgctaccggctggaagccctcaagttttgtgaggagtttaaagaaaagtgtcctatctgtgtcccctgtggcttgaggttggctgagaaaacacaagttgccatcgtcagacattttggccttcagatcctggaacacgttgtcaagtttcggtggaacggcatgtctcgattggagaaggtgtatctgaagaacagtgtcatggagctgattgcaaatggaacattgaacattttggaagaggagaaccatattaaagatgctctgtctcgaattgtagtggaaatgatcaagcgagagtggccacagcattggcctgacatgctaatagaattggacactctttccaaacaaggggaaacacagacagaattggtgatgtttatccttttgcgactggcagaggatgtagtgacttttcagacacttccccctcaaagaagaagggacatccagcaaacattaacccagaacatggaaaggatcttcagttttctgcttaacacacttcaagaaaatgtaaacaagtatcagcaagtgaagacagatacttctcaggagtcaaaggcgcaagcaaactgtcgagtaggagttgcagcactgaatactctagcaggctatattgactgggtgtctatgagtcacatcactgctgaaaactgtaaactcctggagatactgtgtttgctgttgaatgaacaggaacttcagttgggagccgctgagtgtcttctcattgcagtcagcagaaaaggcaagttggaagaccggaagcccttgatggtcttatttggagatgttgccatgcattatatactctccgccgcacagactgctgatggaggaggtttggtagaaaaacactacgtctttctgaagaggctctgtcaggtgttgtgtgcgctgggcaatcagctgtgtgcattgctgggtgcagattctgatgtagaaacaccatcaaactttggaaaatacctggaatcttttcttgctttcacaacccatccaagtcagtttctacgctcttcaactcagatgacttggggagccctcttcaggcatgaaatcctgtcccgtgatcctttgctattagcaataataccaaaatatcttcgtgcttccatgactaacttggtcaagatgggctttccttctaaaacagacagccctagctgtgaatattctcggtttgattttgatagcgatgaggacttcaatgctttcttcaactcctcccgagcacaacaaggagaggtgatgaggttggcatgtcgtttggatcccaaaactagcttccagatggctggggagtggctaaagtatcaactatcaacttttcttgatgctggttctgtgaattcttgttctgcagttggaactggagaaggaagcctctgttccgtcttctcaccttcattcgtgcagtgggaagccatgactctttttttggaaagtgttatcacccagatgtttcgaacactaaatagagaagaaattcctgttaatgatggaatagagctattgcagatggttctgaactttgataccaaggatcccctcatcctgtcctgcgtccttactaatgtctctgcactctttccatttgtcacctacagaccagagttcctgccccaggtcttctctaagctattttcatctgtcacttttgaaactgttgaagaaagtaaggcccccagaacccgggcagtgaggaatgtgaggaggcatgcttgttcctccatcatcaagatgtgtcgtgactacccccagcttgtgctgcccaattttgacatgctttataaccatgtgaagcaactcctctccaatgagctactcctgacacaaatggagaagtgtgccctcatggaagccctggttctcattagcaaccaatttaagaactacgagcgtcagaaggtgttcctagaggagctgatggcaccagtggccagcatctggctttctcaagacatgcacagagtgctgtcagatgttgatgctttcattgcgtatgtgggtacagatcagaagagctgtgacccaggcctggaggatccgtgtggcttaaaccgtgcacgaatgagcttttgtgtatacagcattctgggtgtggtgaaacgaacttgctggcccactgacctagaagaggccaaagctgggggatttgtggtgggttatacatccagtggaaatccaatcttccgtaacccctgcacagagcagattctgaaacttcttgacaatttgcttgcgcttataagaacccacaatacattatatgcaccagaaatgctagccaaaatggcagagcctttcaccaaggctctggatatgcttgacgcggaaaaatctgctatattaggattacctcaacctctcttggaactcaatgactctcctgtcttcaaaaccgtcttggaaagaatgcagcgtttcttctctaccctctatgaaaactgttttcatatcctagggaaggcaggcccttccatgcagcaagacttctatactgtggaggaccttgctacccagcttctcagctcagcctttgtcaacttgaacaatattcctgactaccgactcagacccatgcttcgtgtctttgtaaagcctctggtgctcttctgtcccccagagcactatgaagccctggtatcccccatcctcggacctcttttcacctacctccatatgaggctttctcagaaatggcaagttatcaaccaaaggagcctgctgtgtggagaagatgaggctgcagatgaaaacccagagtctcaagagatgctggaggagcaactggtgaggatgttaacccgagaagtcatggacctaatcacggtttgctgtgtttcaaagaagggtgctgaccacagtagtgctcccccagcagatggagacgatgaagaaatgatggccacagaggtcaccccctcagctatggcagagcttacagacctgggcaaatgtctgatgaagcatgaggatgtttgtacagcgctattaattacagccttcaattccctggcctggaaagatactctgtcctgccagaggacaacctcacagctctgctggcctctcctcaaacaagtgctgtcagggacactgctcgcagatgcagttacgtggcttttcaccagtgtgctgaaaggcttacagatgcacgggcagcacgacgggtgcatggcttccctggtccatctggccttccagatatacgaggcactgcgccccaggtacctggagataagagctgtaatggagcaaatccctgaaatacagaaggactcactggaccagtttgactgcaagcttttaaacccctccctgcagaaagtggctgacaagcgccgaaaggaccaattcaaacgcctcattgctggttgcattgggaaacccttgggagagcagttccgaaaagaagttcacattaagaatcttccctcacttttcaaaaaaacaaagccaatgctggagacggaggtgctggacaatgatgggggtggcctggccaccatctttgaaccctgaatcaagcttttgggcatccttcctcggcctttcttgtcatctcttctttccctttgtagccgatctctaggcccttcttgcactgccacctcactttccaccactgtcagcctggaaagagatccaggtctggagctggagagaacaggccctgtgcaggaccagaagtaattatactaaagtatcaagaaagggagttagggcttaaactattctgtctagatgtcccagatagttcccattctacttggagatttggcttttccaagaaaagctagagcagagcagcccttctcccacaagccctcccacccccgtgcagccacatacctgtacagaatggtaactaagggtgctgtgcccaaccctgcgactagcaaggctcgcagcaagagcacagccctcaactacttgtgccagagtttctcttggaccactccaactcccactgagcccttttgctgctgggctggcaggaaactttccccactccctaaggggcatgtctgggttaggtgctaagtgctgaagagaacttggtcagttctctcaactttgctttgggcaagaatctggtcacctgatgggatccatggtacaggctactgctaaacttggcacagtatcaagtatagtacctccaaggaccagggctgggaagtctttagtgctaacatcccctttagagttcacacatcttgcccttccatgaatgacccctcagtctggcctccccagcctcaaggtccactcaggcacaagagccacagtaccctagatagtgtcacatgacaccgttgtcatccaaggataatacagaccaactaggctacatctgtgatgagcagctagcaaagccgctggtcttctcctaggactaagtccaggtgccttccacaatctcatggtctttcaggtccctggttacttttctcaaaggccatttccaaaagaatacatgccttcacatcacaacctgtactgtgagtccattctagaggtcactgaaaggccctgtaaagagaggacatggatacgggacctggccctgaggttattactggccgtaaggcagagttaatccatacagaaaccagtgtgtccatgtgctctgcacaaaaacagacctgttgtccatccagtccactgacaagagggtttccccgagagccgaagtggactgaagctacagtttttagctggtgcgggccacaggcagggtcagattgagaagaagcaaagctggggaagcagaagttgggagtcttgtgttgctccctcttcctgtgtggtgctctgggtttctgtggatcgtgaaggcgatctcaagagtgtttccctccaaacctgatagctgcctattcctgtctggttggggctgtggaggatgtagttgtatttattgcattgtaatatttttaacatcctgtgacttcatgctagaaattttctattgtttatagaaactttttgtagaaacattaactctaaagcacatctgcatgtcagtaaaaatctcagtttcgtacagaaa

SEQ ID NO: 205567 - DNA, 2070 bp, Artificial Sequence
  derived and/or modified sequence
cgcgtgcgcagcgccggcttcttcccagcgcgagttgctgctaacgctcctcctccagcttcccacccccgccgcccgccgcggcccggtaccaacgggtggtctcgccgagggagctgtcgtgcctcgtggtcccgggactgcagtggtgtgcgctctcggcgcgtggcgctaggcatggcgatggatcaagtaaacgcgctgtgcgagcagctggtgaaagcggtgacggtcatgatggaccccaactccacccagcgctaccggctggaagccctcaagttttgtgaggagtttaaagaaaagtgtcctatctgtgtcccctgtggcttgaggttggctgagaaaacacaagttgccatcgtcagacattttggccttcagatcctggaacacgttgtcaagtttcggtggaacggcatgtctcgattggagaaggtgtatctgaagaacagtgtcatggagctgattgcaaatggaacattgaacattttggaagaggagaaccatattaaagatgctctgtctcgaattgtagtggaaatgatcaagcgagagtggccacagcattggcctgacatgctaatagaattggacactctttccaaacaaggggaaacacagacagaattggtgatgtttatccttttgcgactggcagaggatgtagtgacttttcagacacttccccctcaaagaagaagggacatccagcaaacattaacccagaacatggaaaggatcttcagttttctgcttaacacacttcaagaaaatgtaaacaagtatcagcaagtgaagacagatacttctcaggagtcaaaggcgcaagcaaactgtcgagtaggagttgcagcactgaatactctagcaggctatattgactgggtgtctatgagtcacatcactgctgaaaactgtaaactcctggagatactgtgtttgctgttgaatgaacaggaacttcagttgggagccgctgagtgtcttctcattgcagtcagcagaaaaggcaagttggaagaccggaagcccttgatggtcttatttggagatgttgccatgcattatatactctccgccgcacagactgctgatggaggaggtttggtagaaaaacactacgtctttctgaagaggctctgtcaggtgttgtgtgcgctgggcaatcagctgtgtgcattgctgggtgcagattctgatgtagaaacaccatcaaactttggaaaatacctggaatcttttcttgctttcacaacccatccaagtcagtttctacgctcttcaactcagatgacttggggagccctcttcaggcatgaaatcctgtcccgtgatcctttgctattagcaataataccaaaatatcttcgtgcttccatgactaacttggtcaagatgggctttccttctaaaacagacagccctagctgtgaatattctcggtttgattttgatagcgatgaggacttcaatgctttcttcaactcctcccgagcacaacaaggagaggtgatgaggttggcatgtcgtttggatcccaaaactagcttccagatggctggggagtggctaaagtatcaactatcaacttttcttgatgctggttctgtgaattcttgttctgcagttggaactggagaaggaagcctctgttccgtcttctcaccttcattcgtgcagtgggaagccatgactctttttttggaaagtgttatcacccagatgtttcgaacactaaatagagaagaaattcctgttaatgatggaatagagctattgcagatggttctgaactttgataccaaggatcccctcatcctgtcctgcgtccttactaatgtctctgcactctttccatttgtcacctacagaccagagttcctgccccaggtcttctctaagctattttcatctgtcacttttgaaactgttgaagaaagtaagccacctcactttccaccactgtcagcctggaaagagatccaggtctggagctggagagaacaggccctgtgcaggaccagaagtaattatactaaagtatcaagaaagggagttagggcttaa

SEQ ID NO: 205568 - DNA, 3757 bp, Artificial Sequence
  derived and/or modified sequence
acttccgcgggcgcgtgcgcagtggcgggccgggcgcgtgcgcagcgccggcttcttcccagcgcgagttgctgctaacgctcctcctccagcttcccacccccgccgcccgccgcggcccggtaccaacgggtggtctcgccgagggagctgtcgtgcctcgtggtcccgggactgcagtggtgtgcgctctcggcgcgtggcgctaggcatggcgatggatcaagtaaacgcgctgtgcgagcagctggtgaaagcggtgacggtcatgatggaccccaactccacccagcgctaccggctggaagccctcaagttttgtgaggagtttaaagaaaagtgtcctatctgtgtcccctgtggcttgaggttggctgagaaaacacaagttgccatcgtcagacattttggccttcagatcctggaacacgttgtcaagtttcggtggaacggcatgtctcgattggagaaggtgtatctgaagaacagtgtcatggagctgattgcaaatggaacattgaacattttggaagaggagaaccatattaaagatgctctgtctcgaattgtagtggaaatgatcaagcgagagtggccacagcattggcctgacatgctaatagaattggacactctttccaaacaaggggaaacacagacagaattggtgatgtttatccttttgcgactggcagaggatgtagtgacttttcagacacttccccctcaaagaagaagggacatccagcaaacattaacccagaacatggaaaggatcttcagttttctgcttaacacacttcaagaaaatgtaaacaagtatcagcaagtgaagacagatacttctcaggagtcaaaggcgcaagcaaactgtcgagtaggagttgcagcactgaatactctagcaggctatattgactgggtgtctatgagtcacatcactgctgaaaactgtaaactcctggagatactgtgtttgctgttgaatgaacaggaacttcagttgggagccgctgagtgtcttctcattgcagtcagcagaaaaggcaagttggaagaccggaagcccttgatggtcttatttggagatgttgccatgcattatatactctccgccgcacagactgctgatggaggaggtttggtagaaaaacactacgtctttctgaagaggctctgtcaggtgttgtgtgcgctgggcaatcagctgtgtgcattgctgggtgcagattctgatgtagaaacaccatcaaactttggaaaatacctggaatcttttcttgctttcacaacccatccaagtcagtttctacgctcttcaactcagatgacttggggagccctcttcaggcatgaaatcctgtcccgtgatcctttgctattagcaataataccaaaatatcttcgtgcttccatgactaacttggtcaagatgggctttccttctaaaacagacagccctagctgtgaatattctcggtttgattttgatagcgatgaggacttcaatgctttcttcaactcctcccgagcacaacaaggagaggtgatgaggttggcatgtcgtttggatcccaaaactagcttccagatggctggggagtggctaaagtatcaactatcaacttttcttgatgctggttctgtgaattcttgttctgcagttggaactggagaaggaagcctctgttccgtcttctcaccttcattcgtgcagtgggaagccatgactctttttttggaaagtgttatcacccagatgtttcgaacactaaatagagaagaaattcctgttaatgatggaatagagctattgcagatggttctgaactttgataccaaggatcccctcatcctgtcctgcgtccttactaatgtctctgcactctttccatttgtcacctacagaccagagttcctgccccaggtcttctctaagctattttcatctgtcacttttgaaactgttgaagaaagtaaggcccccagaacccgggcagtgaggaatgtgaggaggcatgcttgttcctccatcatcaagatgtgtcgtgactacccccagcttgtgctgcccaattttgacatgctttataaccatgtgaagcaactcctctccaatgagctactcctgacacaaatggagaagtgtgccctcatggaagccctggttctcattagcaaccaatttaagaactacgagcgtcagaaggtgttcctagaggagctgatggcaccagtggccagcatctggctttctcaagacatgcacagagtgctgtcagatgttgatgctttcattgcgtatgtgggtacagatcagaagagctgtgacccaggcctggaggatccgtgtggcttaaaccgtgcacgaatgagcttttgtgtatacagcattctgggtgtggtgaaacgaacttgctggcccactgacctagaagaggccaaagctgggggatttgtggtgggttatacatccagtggaaatccaatcttccgtaacccctgcacagagcagattctgaaacttcttgacaatttgcttgcgcttataagaacccacaatacattatatgcaccagaaatgctagccaaaatggcagagcctttcaccaaggctctggatatgcttgacgcggaaaaatctgctatattaggattacctcaacctctcttggaactcaatgactctcctgtcttcaaaaccgtcttggaaagaatgcagcgtttcttctctaccctctatgaaaactgttttcatatcctagggaaggcaggcccttccatgcagcaagacttctatactgtggaggaccttgctacccagcttctcagctcagcctttgtcaacttgaacaatattcctgactaccgactcagacccatgcttcatatcctttcaaaacctctggtgctcttctgtcccccagagcactatgaagccctggtatcccccatcctcggacctcttttcacctacctccatatgaggctttctcagaaatggcaagttatcaaccaaaggagcctgctgtgtggagaagatgaggctgcagatgaaaacccagagtctcaagagatgctggaggagcaactggtgaggatgttaacccgagaagtcatggacctaatcacggtttgctgtgtttcaaagaagggtgctgaccacagtagtgctcccccagcagatggagacgatgaagaaatgatggccacagaggtcaccccctcagctatggcagagcttacagacctgggcaaatgtctgatgaagcatgaggatgtttgtacagcgctattaattacagccttcaattccctggcctggaaagatactctgtcctgccagaggacaacctcacagctctgctggcctctcctcaaacaagtgctgtcagggacactgctcgcagatgcagttacgtggcttttcaccagtgtgctgaaaggcttacagatgcacgggcagcacgacgggtgcatggcttccctggtccatctggccttccagatatacgaggcactgcgccccaggtacctggagataagagctgtaatggagcaaatccctgaaatacagaaggactcactggaccagtttgactgcaagcttttaaacccctccctgcagaaagtggctgacaagcgccgaaaggaccaattcaaacgcctcattgctggttgcattgggaaacccttgggagagcagttccgaaaagaagttcacattaagaatcttccctttgtagccgatctctag

SEQ ID NO: 205569 - DNA, 3307 bp, Artificial Sequence
  derived and/or modified sequence
acttccgcgggcgcgtgcgcagtggcgggccgggcgcgtgcgcagcgccggcttcttcccagcgcgagttgctgctaacgctcctcctccagcttcccacccccgccgcccgccgcggcccggtaccaacgggtggtctcgccgagggagctgtcgtgcctcgtggtcccgggactgcagtggtgtgcgctctcggcgcgtggcgctaggcatggcgatggatcaagtaaacgcgctgtgcgagcagctggtgaaagcggtgacggtcatgatggaccccaactccacccagcgctaccggctggaagccctcaagttttgtgaggagtttaaagaaaagtgtcctatctgtgtcccctgtggcttgaggttggctgagaaaacacaagttgccatcgtcagacattttggccttcagatcctggaacacgttgtcaagtttcggtggaacggcatgtctcgattggagaaggtgtatctgaagaacagtgtcatggagctgattgcaaatggaacattgaacattttggaagaggagaaccatattaaagatgctctgtctcgaattgtagtggaaatgatcaagcgagagtggccacagcattggcctgacatgctaatagaattggacactctttccaaacaaggggaaacacagacagaattggtgatgtttatccttttgcgactggcagaggatgtagtgacttttcagacacttccccctcaaagaagaagggacatccagcaaacattaacccagaacatggaaaggatcttcagttttctgcttaacacacttcaagaaaatgtaaacaagtatcagcaagtgaagacagatacttctcaggagtcaaaggcgcaagcaaactgtcgagtaggagttgcagcactgaatactctagcaggctatattgactgggtgtctatgagtcacatcactgctgaaaactgtaaactcctggagatactgtgtttgctgttgaatgaacaggaacttcagttgggagccgctgagtgtcttctcattgcagtcagcagaaaaggcaagttggaagaccggaagcccttgatggtcttatttggagatgttgccatgcattatatactctccgccgcacagactgctgatggaggaggtttggtagaaaaacactacgtctttctgaagaggctctgtcaggtgttgtgtgcgctgggcaatcagctgtgtgcattgctgggtgcagattctgatgtagaaacaccatcaaactttggaaaatacctggaatcttttcttgctttcacaacccatccaagtcagtttctacgctcttcaactcagatgacttggggagccctcttcaggcatgaaatcctgtcccgtgatcctttgctattagcaataataccaaaatatcttcgtgcttccatgactaacttggtcaagatgggctttccttctaaaacagacagccctagctgtgaatattctcggtttgattttgatagcgatgaggacttcaatgctttcttcaactcctcccgagcacaacaaggagaggtgatgaggttggcatgtcgtttggatcccaaaactagcttccagatggctggggagtggctaaagtatcaactatcaacttttcttgatgctggttctgtgaattcttgttctgcagttggaactggagaaggaagcctctgttccgtcttctcaccttcattcgtgcagtgggaagccatgactctttttttggaaagtgttatcacccagatgtttcgaacactaaatagagaagaaattcctgttaatgatggaatagagctattgcagatggttctgaactttgataccaaggatcccctcatcctgtcctgcgtccttactaatgtctctgcactctttccatttgtcacctacagaccagagttcctgccccaggtcttctctaagctattttcatctgtcacttttgaaactgttgaagaaagtaaggcccccagaacccgggcagtgaggaatgtgaggaggcatgcttgttcctccatcatcaagatgtgtcgtgactacccccagcttgtgctgcccaattttgacatgctttataaccatgtgaagcaactcctctccaatgagctactcctgacacaaatggagaagtgtgccctcatggaagccctggttctcattagcaaccaatttaagaactacgagcgtcagaaggtgttcctagaggagctgatggcaccagtggccagcatctggctttctcaagacatgcacagagtgctgtcagatgttgatgctttcattgcgtatgtgggtacagatcagaagagctgtgacccaggcctggaggatccgtgtggcttaaaccgtgcacgaatgagcttttgtgtatacagcattctgggtgtggtgaaacgaacttgctggcccactgacctagaagaggccaaagctgggggatttgtggtgggttatacatccagtggaaatccaatcttccgtaacccctgcacagagcagattctgaaacttcttgacaatttgcttgcgcttataagaacccacaatacattatatgcaccagaaatgctagccaaaatggcagagcctttcaccaaggctctggatatgcttgacgcggaaaaatctgctatattaggattacctcaacctctcttggaactcaatgactctcctgtcttcaaaaccgtcttggaaagaatgcagcgtttcttctctaccctctatgaaaactgttttcatatcctagggaaggcaggcccttccatgcagcaagacttctatactgtggaggaccttgctacccagcttctcagctcagcctttgtcaacttgaacaatattcctgactaccgactcagacccatgcttcatatcctttcaaaacctctggtgctcttctgtcccccagagcactatgaagccctggtatcccccatcctcggacctcttttcacctacctccatatgaggctttctcagaaatggcaagttatcaaccaaaggagcctgctgtgtggagaagatgaggctgcagatgaaaacccagagtctcaagagatgctggaggagcaactggtgaggatgttaacccgagaagtcatggacctaatcacggtttgctgtgtttcaaagaagggtgctgaccacagtagtgctcccccagcagatggagacgatgaagaaatgatggccacagaggtcaccccctcagctatggcagagcttacagacctggtgtccatccagtccactgacaagagggtttccccgagagccgaagtggactga

SEQ ID NO: 205570 - DNA, 3172 bp, Artificial Sequence
  derived and/or modified sequence
gtgcgcagcgccggcttcttcccagcgcgagttgctgctaacgctcctcctccagcttcccacccccgccgcccgccgcggcccggtaccaacgggtggtctcgccgagggagctgtcgtgcctcgtggtcccgggactgcagtggtgtgcgctctcggcgcgtggcgctaggcatggcgatggatcaagtaaacgcgctgtgcgagcagctggtgaaagcggtgacggtcatgatggaccccaactccacccagcgctaccggctggaagccctcaagttttgtgaggagtttaaagaaaagtgtcctatctgtgtcccctgtggcttgaggttggctgagaaaacacaagttgccatcgtcagacattttggccttcagatcctggaacacgttgtcaagtttcggtggaacggcatgtctcgattggagaaggtgtatctgaagaacagtgtcatggagctgattgcaaatggaacattgaacattttggaagaggctctgtcaggtgttgtgtgcgctgggcaatcagctgtgtgcattgctgggtgcagattctgatgtagaaacaccatcaaactttggaaaatacctggaatcttttcttgctttcacaacccatccaagtcagtttctacgctcttcaactcagatgacttggggagccctcttcaggcatgaaatcctgtcccgtgatcctttgctattagcaataataccaaaatatcttcgtgcttccatgactaacttggtcaagatgggctttccttctaaaacagacagccctagctgtgaatattctcggtttgattttgatagcgatgaggacttcaatgctttcttcaactcctcccgagcacaacaaggagaggtgatgaggttggcatgtcgtttggatcccaaaactagcttccagatggctggggagtggctaaagtatcaactatcaacttttcttgatgctggttctgtgaattcttgttctgcagttggaactggagaaggaagcctctgttccgtcttctcaccttcattcgtgcagtgggaagccatgactctttttttggaaagtgttatcacccagatgtttcgaacactaaatagagaagaaattcctgttaatgatggaatagagctattgcagatggttctgaactttgataccaaggatcccctcatcctgtcctgcgtccttactaatgtctctgcactctttccatttgtcacctacagaccagagttcctgccccaggtcttctctaagctattttcatctgtcacttttgaaactgttgaagaaagtaaggcccccagaacccgggcagtgaggaatgtgaggaggcatgcttgttcctccatcatcaagatgtgtcgtgactacccccagcttgtgctgcccaattttgacatgctttataaccatgtgaagcaactcctctccaatgagctactcctgacacaaatggagaagtgtgccctcatggaagccctggttctcattagcaaccaatttaagaactacgagcgtcagaaggtgttcctagaggagctgatggcaccagtggccagcatctggctttctcaagacatgcacagagtgctgtcagatgttgatgctttcattgcgtatgtgggtacagatcagaagagctgtgacccaggcctggaggatccgtgtggcttaaaccgtgcacgaatgagcttttgtgtatacagcattctgggtgtggtgaaacgaacttgctggcccactgacctagaagaggccaaagctgggggatttgtggtgggttatacatccagtggaaatccaatcttccgtaacccctgcacagagcagattctgaaacttcttgacaatttgcttgcgcttataagaacccacaatacattatatgcaccagaaatgctagccaaaatggcagagcctttcaccaaggctctggatatgcttgacgcggaaaaatctgctatattaggattacctcaacctctcttggaactcaatgactctcctgtcttcaaaaccgtcttggaaagaatgcagcgtttcttctctaccctctatgaaaactgttttcatatcctagggaaggcaggcccttccatgcagcaagacttctatactgtggaggaccttgctacccagcttctcagctcagcctttgtcaacttgaacaatattcctgactaccgactcagacccatgcttcgtgtctttgtaaagcctctggtgctcttctgtcccccagagcactatgaagccctggtatcccccatcctcggacctcttttcacctacctccatatgaggctttctcagaaatggcaagttatcaaccaaaggagcctgctgtgtggagaagatgaggctgcagatgaaaacccagagtctcaagagatgctggaggagcaactggtgaggatgttaacccgagaagtcatggacctaatcacggtttgctgtgtttcaaagaagggtgctgaccacagtagtgctcccccagcagatggagacgatgaagaaatgatggccacagaggtcaccccctcagctatggcagagcttacagacctgggcaaatgtctgatgaagcatgaggatgtttgtacagcgctattaattacagccttcaattccctggcctggaaagatactctgtcctgccagaggacaacctcacagctctgctggcctctcctcaaacaagtgctgtcagggacactgctcgcagatgcagttacgtggcttttcaccagtgtgctgaaaggcttacagatgcacgggcagcacgacgggtgcatggcttccctggtccatctggccttccagatatacgaggcactgcgccccaggtacctggagataagagctgtaatggagcaaatccctgaaatacagaaggactcactggaccagtttgactgcaagcttttaaacccctccctgcagaaagtggctgacaagcgccgaaaggaccaattcaaacgcctcattgctggttgcattgggaaacccttgggagagcagttccgaaaagaagttcacattaagaatcttccctcacttttcaaaaaaacaaagccaatgctggagacggaggtgctggacaatgatgggggtggcctggccaccatctttgaaccctgaatcaagcttttgggcatcctt

SEQ ID NO: 205571 - DNA, 3615 bp, Artificial Sequence
  derived and/or modified sequence
atggctatggatcaagtcaatgctctttgtgaacagctagtgaaggccgttacagttatgatggacccgaatagcacccagcgctaccgactggaagccttgaagttctgtgaggagtttaaggaaaaatgtcccatctgcgtgccctgtgggctgaggcttgccgaaaaaacacaagtggcgattgtgcggcacttcgggctgcagattctagaacatgtagtcaagttcaggtggaacggaatgtcgcgcctagaaaaggtgtacttgaaaaactctgttatggagctgatcgcaaatggcactttgaatatcctagaagaagagaaccacattaaagatgctctctctagaatcgtggttgaaatgataaagagagaatggccccagcattggccggacatgctgattgaactcgatacattgagcaagcagggagagacgcagaccgaactggtaatgtttattctgttgcgcctagccgaagatgtcgtgactttccaaaccttgcctcctcagcggcggagggacattcagcaaaccctcacccagaacatggagcggatcttttcatttttgcttaatactttacaggagaatgtaaataagtatcagcaggtgaagacagatactagtcaggagagcaaggctcaggctaattgcagggttggagtggccgcattgaatacactggccggctacatcgactgggtgagcatgagccacattacagcagagaactgtaagttactagagatcttatgtctcctcctaaacgagcaggagctgcagctgggcgctgccgaatgtctgctaatcgcagtgtctcgcaaaggtaagctggaggaccgaaaaccgctcatggtgctgttcggcgacgtggccatgcattacatcctgagtgcagcccagacagctgatggaggcggactggtggagaaacattatgtttttttgaaacggttatgccaggttctgtgcgctctggggaatcagctctgtgctctgctgggagccgattccgacgtggagacacccagcaatttcggaaagtatctcgagtcctttctggccttcacgacgcacccctcgcagttcctgcggtcttcgacacagatgacttggggcgccctgtttaggcatgagatcctgagccgagaccctctgctgttggccatcatccctaagtacctccgcgcaagcatgaccaacctggtgaagatgggcttcccttcaaagaccgattcacctagttgtgaatacagccggttcgacttcgacagtgacgaagatttcaatgctttctttaactcctccagagctcagcagggagaagtaatgaggctggcctgccgacttgaccccaagacttcatttcagatggctggtgagtggctgaagtatcaactctctacatttctggacgcaggtagtgtaaattcttgctctgctgttggcaccggtgagggtagtctgtgtagtgtgttctctccctcctttgttcaatgggaggcaatgacactgttcctcgagagcgttattacccaaatgttccgcactctcaaccgcgaagagattccagtcaatgatggcatcgaactcctccaaatggtgttgaatttcgataccaaagacccactgatactgtcttgtgtccttacaaacgtaagcgcacttttccccttcgttacatatcgacccgagttcctgccacaggtcttcagcaaactctttagcagtgtgacatttgaaacggtggaggaatcaaaggcaccccgcactcgcgccgttagaaacgtgagaaggcacgcctgctctagcataattaaaatgtgtagggactacccccagctcgtgttgccaaattttgacatgctctacaaccacgtgaagcagctcctgtcgaatgaactgttgctgacccagatggagaagtgcgccttaatggaagctttagtgcttatctccaaccagtttaagaactacgaaagacagaaggtcttcttagaggagctgatggctcccgtggccagcatctggctgagccaagacatgcatcgcgtcctaagtgacgttgacgcatttattgcttacgttggtacagatcagaaatcatgcgatcctgggctggaggatccttgtgggctcaacagagcccgcatgtctttttgtgtatactcaatcctgggcgtggtaaagagaacctgctggcccactgatctcgaagaagccaaagcaggcgggtttgttgtgggctatacctcatcaggtaaccccatctttagaaacccctgtacagagcagattctgaagctgttggacaacctactggctctaattagaacacataacacactgtacgctcccgagatgctcgccaagatggcggaaccttttaccaaagcactggacatgctggatgccgaaaagtcagccattctgggcctgccccagcctttgcttgaactgaatgactcacctgtattcaagaccgtgcttgaaaggatgcagcgcttcttcagtactttatatgagaactgttttcacatcctggggaaggcaggccctagtatgcagcaggatttttacactgtggaagacctagccacacaactgctgagctcggcatttgtcaaccttaacaatatccctgattatagactgcgccctatgcttcgtgtgtttgtgaaacccctagtccttttctgcccaccggaacactacgaagcactggtctcccctattctcgggcctctcttcacctacctgcacatgcggctctctcagaagtggcaggttatcaaccagcgctctttgctttgtggtgaggatgaggccgccgatgagaacccagagtctcaggagatgctcgaggaacagctggtccgcatgctgactcgagaggttatggacttgatcactgtctgttgcgttagcaaaaaaggcgctgaccattccagcgcgccacccgctgatggagatgacgaggaaatgatggccaccgaagtgacaccatccgctatggccgaactgactgacttgggcaagtgtcttatgaagcatgaggacgtctgtacggcactgctgataaccgcgttcaatagtctggcgtggaaagacaccttaagctgccagcgtactacctcccagctgtgttggcccctgctcaagcaagtgctatcaggaactctgcttgccgatgcagttacatggctgtttacttcggtgttgaagggtctgcagatgcatggccagcacgatggctgcatggcaagccttgtgcacctagcctttcagatctacgaggcactaaggccaaggtatcttgaaatcagggctgtcatggaacaaattcccgaaattcagaaggactccctcgaccaattcgattgcaagttgcttaacccctccctgcagaaggtggccgacaaacgacgcaaggaccaattcaaacgcctcattgcagggtgtataggaaaacctctgggcgaacagtttcgaaaagaggttcacattaagaacctgccttcccttttcaagaagaccaagcctatgctagagacggaagtactggacaacgacggcggaggactcgcaaccattttcgaaccctag

SEQ ID NO: 205572 - DNA, 513 bp, Artificial Sequence
  derived and/or modified sequence
atggccggggagtggttaaaatatcagctgagtacatttctggatgccggctctgtcaacagctgttcggctgtgggaactggtgaggggtcgctctgcagcgtgttcagccctagtttcgtgcagtgggaagccatgactttattcttagagtctgtaatcacacagatgttccgcacactgaacagagaagagataccagtaaacgacggaatcgagttgttacagatggtcctgaatttcgacactaaggacccacttattttgagttgcgttttgaccaatgttagcgccctattccctttcgtgacctaccgccctgaatttttaccccaagttttctctaagctgttcagctcagtgacattcgagactgttgaagagtctaagcccccacacttcccacctctgtctgcgtggaaagagatccaggtctggtcttggagagagcaggcgctatgtcggacaaggtccaattacaccaaggtaagccgcaaaggcgtgagagcgtag

SEQ ID NO: 205573 - DNA, 2166 bp, Artificial Sequence
  derived and/or modified sequence
atggcaggggagtggctgaagtaccaactgtcaacctttctggatgccgggagcgtgaactcctgcagtgcagtcgggacaggcgagggaagcttatgcagcgttttctccccctccttcgttcagtgggaggcaatgaccctatttctggagtcagtaatcacccagatgttccggaccttaaatcgagaggagatcccggtgaatgacgggatcgaactactgcagatggtgctcaacttcgatactaaggatccattaatattatcttgcgtccttactaacgtttccgctctgttcccctttgttacctaccgccctgagtttttacctcaggtcttctctaagctgttttctagcgtgaccttcgaaactgttgaggaaagcaaggcccccaggacacgggcagtgcgaaacgttcgtcgacacgcctgctctagtatcattaagatgtgtcgtgattatccacagctcgtcctacccaattttgacatgctttacaaccacgtgaagcagcttctcagcaacgaactcctgctcacccagatggagaaatgtgctctaatggaagccctggtgctaatctctaaccagtttaaaaactacgaaaggcaaaaggttttcctggaggagctgatggcccccgtcgctagcatctggttaagtcaagatatgcatcgcgtcctctctgacgtggatgcttttattgcttacgtggggactgaccagaagagttgcgatcctggactcgaggacccgtgtgggctgaatcgcgcaagaatgagcttttgcgtatacagcattcttggcgtggtcaagcgcacctgttggcccactgacctggaagaagccaaagcaggaggtttcgtagtgggctacacatcaagtggcaaccctattttcaggaatccttgcacggagcagattttaaagcttttagataacctgctcgcgctgattaggacccataacaccctctacgcccctgagatgttagccaaaatggctgaacccttcaccaaggccttggatatgctcgatgccgagaaaagcgcgatccttggtttgcctcaacccctgctggagctaaacgactctccagtgtttaaaaccgtgctagagcggatgcagcggttcttctcaacactctacgagaattgtttccatatacttggtaaagccggtccatccatgcagcaggacttctataccgtggaagaccttgccactcaactgctgtcctctgccttcgtcaatcttaataatatcccagactacaggttgagaccaatgctgcacatcttgagcaagcccctggtcctgttttgtcctcctgaacattatgaagcactcgtatcccccattctcggccccctctttacatacctccacatgaggctttcacagaagtggcaggtgatcaatcagcgaagcctgctttgtggcgaggacgaggcagctgacgagaaccccgagagtcaggagatgctggaggaacaactggtaagaatgctcacacgcgaggtgatggacctgattacagtgtgctgcgtttcaaagaagggcgccgatcatagcagtgctcccccagctgatggagacgacgaggaaatgatggctaccgaggtaaccccaagcgccatggccgaactgaccgacctgggaaaatgcctcatgaaacatgaggatgtgtgtacagccctattgataaccgctttcaactccctagcctggaaggacacattgtcttgccagcgcactacttctcagttgtgctggccattgctgaagcaagtgctctctggcaccctgcttgcagatgccgtgacatggttattcacaagtgtcctgaaggggctccagatgcatggtcagcacgacggctgcatggcctcactcgtgcacctggccttccagatctacgaagctctccggccgcgatatttagagattagggcagttatggaacagatacctgaaatccagaaagactcgttggaccagttcgactgcaaactcctgaacccatccttacagaaggtcgcggataaacggagaaaggatcagttcaaacgcctcatagccggatgcataggtaagccacttggggaacagtttcgtaaagaggtgcacattaaaaatctcccctttgtggctgacctctag

SEQ ID NO: 205574 - DNA, 2211 bp, Artificial Sequence
  derived and/or modified sequence
atgcattacatcctctccgccgctcaaacagcggatggcggcggtctggtggagaagcactatgtctttctcaaaaggctatgtcaggtgctgtgcgcccttggcaaccagctgtgcgctctgttgggcgccgattccgatgtggagactccctcgaatttcggcaaatatctggagtcattcttggcgtttactacgcatccttctcagtttctgagaagttccacacagatgacttggggtgccctgttcaggcatgagattctgtcaagggaccctcttctgctagcaataattccgaagtacctgagggcctccatgactaatctggtgaaaatggggttcccctcgaagacggattctccctcctgcgagtattcacggttcgacttcgattcagacgaagacttcaatgccttctttaactcaagcagggcgcaacagggggaagttatgcgccttgcctgccgactggaccctaaaacatccttccagatggcaggggaatggctgaagtatcagctctcaaccttcctggatgctggctcagttaattcctgttcagccgtagggacaggggagggatccctatgtagcgtgttcagtccatccttcgtccaatgggaggccatgacattgtttttggagagtgtaatcacacagatgttccggacactgaaccgagaagagatccccgttaacgacggaatcgagttattgcagatggtactgaacttcgacaccaaggatcccctgatcctttcatgtgtcctaactaatgtttccgctttgtttccatttgtaacttatcgccccgaattccttccacaagtgttctctaaactctttagctccgtgactttcgaaacagtggaagagtctaaagcaccgcgcacgcgagccgtgaggaacgtgagaagacatgcgtgtagttctataatcaagatgtgtagagactatccgcaactggtgctgccaaatttcgacatgctgtataatcacgtgaaacagctgctgagcaatgagcttttgttgactcaaatggaaaaatgtgctctgatggaagccctagttctaatctctaatcaattcaaaaactatgaaaggcaaaaggtttttctggaagagctgatggctcctgtagccagtatatggctgtcccaggatatgcatcgggtgctttccgatgtggacgctttcattgcttatgtggggacagatcagaagtcttgcgatcctggtcttgaagatccttgcggcttgaatcgcgcccgtatgtcattttgcgtgtactcgatcctgggcgtggtcaagcgtacatgttggcccacagatttggaagaagcaaaggccggaggattcgtggtgggttatacctcaagcggaaatccaatcttcagaaatccatgcacagagcaaatcttaaaactgttggacaacttgctggccctaattcgaacacacaataccttgtacgctcccgaaatgctggctaagatggctgaacctttcaccaaggcactggacatgttggacgccgaaaagagcgcaattctgggtctgccccagcctctcctggagctgaacgattcccccgtgttcaagactgtattagaacgcatgcagaggttcttcagtacgctatatgagaactgttttcacatcctgggaaaggctggcccctcaatgcagcaggacttctataccgtcgaggatttggctacccagttactctcctcagcatttgtgaatttgaataacattcctgactatcgcttgagacccatgctgcacatcctttccaagccactggtgctcttctgcccccctgagcactatgaggctttggtctcacccatattggggccccttttcacctaccttcatatgagactgagccaaaaatggcaggtgatcaaccagagaagcctcttgtgcggcgaggacgaggcagccgacgagaaccctgaatcccaggagatgttagaagaacaactggtgagaatgcttacaagggaggtcatggatctcattaccgtatgttgcgtgagcaagaaaggcgcagaccatagtagcgcaccacccgctgatggagatgatgaagaaatgatggccaccgaagtgacccccagcgcaatggccgaactaactgacctggtgtcaatccaatctactgacaaaagggtgagccctcgcgcagaggtggattag

SEQ ID NO: 205575 - DNA, 2499 bp, Artificial Sequence
  derived and/or modified sequence
atgacatggggggccctgttcaggcatgagattctttctcgagatccacttctgctggctatcattccgaaatatttgcgggcatccatgaccaacttggttaaaatggggttcccctcaaaaactgattcccctagctgcgaatactcgaggtttgatttcgactctgatgaagactttaatgcgttctttaattccagcagagcgcaacagggtgaagttatgcgcctggcctgcaggctggaccccaagacttcctttcaaatggctggcgagtggctaaaatatcagctgagcacctttcttgatgccggatcagtcaactcatgttctgccgtggggacgggcgaggggagtttgtgttccgtcttcagcccctcttttgtccagtgggaggcaatgaccctgtttctcgagagtgttatcacacaaatgtttcgaaccctgaaccgtgaggaaattcccgtgaacgacggtatcgagctcctgcagatggtgctcaactttgataccaaggatccactgattctctcatgcgtgctgactaatgtctcagccctgttcccgtttgtgacctaccggcccgaatttctgccacaagttttctccaagttgttcagcagtgtcacattcgaaacagttgaggaaagcaaagctccacgtacccgtgccgtccgcaacgtaagacgtcacgcatgttccagtattataaagatgtgcagagactacccacagctggtgctacctaattttgatatgctttataatcatgttaagcagcttctgagcaacgaacttcttctgacccaaatggagaaatgtgcattgatggaggcgctggtattaataagcaatcagttcaaaaactatgagcgacagaaggtgttcctggaggaactcatggcccccgtggccagtatatggcttagccaagacatgcacagggtgctatccgatgtcgacgctttcattgcctacgttggtaccgaccaaaagagttgtgaccctggcctggaggatccctgtgggctcaatagggctagaatgagcttttgtgtttattctattttaggcgtggtgaaacggacctgctggcccaccgatcttgaggaggcaaaggcaggcggtttcgttgttggatacacaagcagtgggaatcccatatttagaaatccctgcaccgagcagatcctgaagttgctcgataacctgctcgctctgattcgcacccacaataccctctacgccccggaaatgctggcaaaaatggccgagcccttcacaaaggcactcgacatgctggatgcagagaagtccgctattctgggcctgcctcagcccctgctagagctcaatgacagcccagtgttcaaaaccgtgctggagcggatgcagaggttcttttcaacactctacgagaattgcttccacatcctgggcaaggctggcccatctatgcagcaggatttctatacggtggaagacttggccactcagctcctgagctccgccttcgtcaatcttaacaacatcccagactaccggctcagacctatgttacgggtgttcgtcaagcctttggtgcttttttgcccacccgagcactacgaagctttagtttcgccaattcttgggcctctttttacttacttacatatgaggctgagccagaagtggcaggtaatcaatcagaggtccttactttgcggcgaagacgaagcggctgatgagaaccctgagtcacaggagatgctggaagaacagctggtaagaatgcttactcgcgaggtgatggatctgatcacagtatgttgcgtctcaaagaaaggagccgatcactccagtgccccacccgccgatggggacgacgaagagatgatggccacagaggtcaccccctctgctatggcggaattaaccgatctgggaaaatgccttatgaagcacgaggatgtttgcactgctctactgataaccgccttcaactctctggcttggaaagacacgctttcatgtcagcgcaccacctcccagctgtgttggcctctgctcaaacaagtgctgtctggcaccctccttgcagacgccgttacatggctctttacgtctgtgttaaaaggacttcagatgcacggccagcacgacggatgcatggcatctctggtccacctggcctttcagatctacgaggcgctgcgaccccgatacctggaaatcagagccgtaatggagcaaatacctgaaatacaaaaggactccttagaccagttcgattgcaagctgctgaatccaagcttgcaaaaagtggccgataaacgacggaaggatcaatttaaaaggttaattgcagggtgtatcgggaagcccctgggcgagcagtttcggaaggaggtccatatcaaaaacctgcccagcttgttcaagaagaccaagcctatgctcgagacagaagtgctcgacaatgacggcggcggactcgcgaccattttcgagccctag

SEQ ID NO: 205576 - DNA, 3615 bp, Artificial Sequence
  derived and/or modified sequence
atggccatggaccaggtgaatgccctgtgtgagcagctggtgaaggctgtgacagtgatgatggaccccaacagcacccagcgctaccgcctggaggccctgaagttctgtgaggagttcaaggagaagtgccccatctgtgtgccctgtggcctgcggctggccgagaagacccaggtggccatcgtgcgccacttcggcctgcagatcctggagcacgtggtgaagttccgctggaatggcatgagccggctggagaaggtgtacctgaagaacagcgtgatggagctgattgccaacggcaccctgaacatcctggaggaggagaaccacatcaaggatgccctgagcagaattgtggtggagatgatcaagcgggagtggccccagcactggccagacatgctgattgagctggacaccctgagcaagcagggcgagacccagacagagctggtgatgttcatcctgctgcggctggccgaggatgtggtgaccttccagaccctgcccccccagaggagaagagacatccagcagaccctgacccagaacatggagcgcatcttctccttcctgctgaacaccctgcaggagaatgtgaacaagtaccagcaggtgaagacagacaccagccaggagagcaaggcccaggccaactgccgggtgggcgtggccgccctgaacaccctggccggctacatcgactgggtgtccatgagccacatcacagctgagaactgcaagctgctggagatcctgtgcctgctgctgaatgagcaggagctgcagctgggcgctgctgaatgtctgctgattgctgtgtccaggaagggcaagctggaggacaggaagcccctgatggtgctgtttggagatgtggccatgcactacatcctgtctgctgcccagacagcagatggcggcggcctggtggagaagcactacgtgttcctgaagaggctgtgccaggtgctgtgtgccctgggcaaccagctgtgtgccctgctgggcgctgacagtgatgtggagacccccagcaactttgggaagtacctggagagcttcctggccttcaccacccaccccagccagttcctgcggagcagcacccagatgacctggggcgccctcttcagacatgagatcctgagccgggaccccctgctgctggccatcatccccaagtacctgcgggcctccatgaccaacctggtgaagatgggcttccccagcaagacagacagccccagctgtgagtacagcagatttgattttgacagtgatgaggacttcaatgccttcttcaacagcagccgggcccagcagggcgaggtgatgaggctggcctgccgcctggaccccaagaccagcttccagatggccggggagtggctgaagtaccagctgagcaccttcctggatgctggctctgtgaacagctgcagcgctgtgggcactggagagggcagcctgtgcagcgtcttcagccccagctttgtgcagtgggaggccatgaccctcttcctggagagcgtcatcacccagatgttccgcaccctgaaccgggaggagatccctgtgaatgatggcatcgagctgctgcagatggtgctgaactttgacaccaaggaccccctcatcctgagctgtgtgctgaccaacgtgtctgccctcttcccctttgtgacctacagacctgagttcctgccccaggtgttcagcaagctgttcagctctgtgacctttgaaacagtggaggagagcaaggcccccaggaccagggctgtgagaaatgtgagaagacatgcctgcagcagcatcatcaagatgtgccgggactacccccagctggtgctgcccaactttgacatgctgtacaaccacgtgaagcagctgctgagcaatgagctgctgctgacccagatggagaagtgtgccctgatggaggccctggtgctgatcagcaaccagttcaagaactatgaaaggcagaaggtgttcctggaggagctgatggcccctgtggccagcatctggctgagccaggacatgcaccgggtgctgagtgatgtggatgccttcatcgcctacgtgggcacagaccagaagagctgtgaccccggcctggaggacccctgtggcctgaacagagccaggatgtccttctgtgtgtacagcatcctgggcgtggtgaagaggacctgctggcccacagacctggaggaggccaaggccggcggctttgtggtgggctacaccagcagcggcaaccccatcttcaggaacccctgcacagagcagatcctgaagctgctggacaacctgctggccctgatccgcacccacaacaccctgtatgcccctgagatgctggccaagatggccgagcccttcaccaaggccctggacatgctggatgctgagaagagcgccatcctgggcctgccccagcccctgctggagctgaatgacagccctgtgttcaagacagtgctggagaggatgcagcgcttcttcagcaccctgtatgagaactgcttccacatcctgggcaaggccggccccagcatgcagcaggacttctacacagtggaggacctggccacccagctgctgagcagcgcctttgtgaacctgaacaacatcccagactaccgcctgcggcccatgctgcgggtgtttgtgaagcccctggtgctcttctgccccccagagcactatgaggccctggtgagccccatcctgggccccctcttcacctacctgcacatgaggctgagccagaagtggcaggtgatcaaccagaggagcctgctgtgtggagaagatgaggccgcagatgaaaatcctgagagccaggagatgctggaggagcagctggtgaggatgctgacccgggaggtgatggacctgatcaccgtgtgctgcgtgtccaagaagggagctgaccacagcagcgcccccccagcagatggagatgatgaggagatgatggccacagaggtgacccccagcgccatggccgagctgacagacctgggcaagtgcctgatgaagcatgaagatgtgtgcacagccctgctgatcacagccttcaacagcctggcctggaaggacaccctgagctgccagaggaccaccagccagctgtgctggcccctgctgaagcaggtgctgagcggcaccctgctggctgatgctgtgacctggctgttcacctctgtgctgaagggcctgcagatgcacggccagcatgatggctgcatggccagcctggtgcacctggccttccagatctatgaggccctgcggccccgctacctggagatccgggctgtgatggagcagatccctgagatccagaaggacagcctggaccagtttgactgcaagctgctgaaccccagcctgcagaaggtggccgacaagaggaggaaggaccagttcaagaggctgattgctggctgcatcggcaagcccctgggggagcagttcaggaaggaggtgcacatcaagaacctgcccagcctcttcaagaagaccaagcccatgctggagacagaggtgctggacaatgatggcggcggcctggccaccatctttgagccctag

SEQ ID NO: 205577 - DNA, 513 bp, Artificial Sequence
  derived and/or modified sequence
atggccggggagtggctgaagtaccagctgagcaccttcctggatgctggctctgtgaacagctgcagcgctgtgggcactggagagggcagcctgtgcagcgtcttcagccccagctttgtgcagtgggaggccatgaccctcttcctggagagcgtcatcacccagatgttccgcaccctgaaccgggaggagatccctgtgaatgatggcatcgagctgctgcagatggtgctgaactttgacaccaaggaccccctcatcctgagctgtgtgctgaccaacgtgtctgccctcttcccctttgtgacctacagacctgagttcctgccccaggtgttcagcaagctgttcagctctgtgacctttgaaacagtggaggagagcaagccaccccacttcccccccctgagcgcctggaaggagatccaggtgtggagctggagggagcaggccctgtgcaggaccaggagcaactacaccaaggtgtccaggaagggcgtgcgggcctag

SEQ ID NO: 205578 - DNA, 2166 bp, Artificial Sequence
  derived and/or modified sequence
atggccggggagtggctgaagtaccagctgagcaccttcctggatgctggctctgtgaacagctgcagcgctgtgggcactggagagggcagcctgtgcagcgtcttcagccccagctttgtgcagtgggaggccatgaccctcttcctggagagcgtcatcacccagatgttccgcaccctgaaccgggaggagatccctgtgaatgatggcatcgagctgctgcagatggtgctgaactttgacaccaaggaccccctcatcctgagctgtgtgctgaccaacgtgtctgccctcttcccctttgtgacctacagacctgagttcctgccccaggtgttcagcaagctgttcagctctgtgacctttgaaacagtggaggagagcaaggcccccaggaccagggctgtgagaaatgtgagaagacatgcctgcagcagcatcatcaagatgtgccgggactacccccagctggtgctgcccaactttgacatgctgtacaaccacgtgaagcagctgctgagcaatgagctgctgctgacccagatggagaagtgtgccctgatggaggccctggtgctgatcagcaaccagttcaagaactatgaaaggcagaaggtgttcctggaggagctgatggcccctgtggccagcatctggctgagccaggacatgcaccgggtgctgagtgatgtggatgccttcatcgcctacgtgggcacagaccagaagagctgtgaccccggcctggaggacccctgtggcctgaacagagccaggatgtccttctgtgtgtacagcatcctgggcgtggtgaagaggacctgctggcccacagacctggaggaggccaaggccggcggctttgtggtgggctacaccagcagcggcaaccccatcttcaggaacccctgcacagagcagatcctgaagctgctggacaacctgctggccctgatccgcacccacaacaccctgtatgcccctgagatgctggccaagatggccgagcccttcaccaaggccctggacatgctggatgctgagaagagcgccatcctgggcctgccccagcccctgctggagctgaatgacagccctgtgttcaagacagtgctggagaggatgcagcgcttcttcagcaccctgtatgagaactgcttccacatcctgggcaaggccggccccagcatgcagcaggacttctacacagtggaggacctggccacccagctgctgagcagcgcctttgtgaacctgaacaacatcccagactaccgcctgcggcccatgctgcacatcctgagcaagcccctggtgctcttctgccccccagagcactatgaggccctggtgagccccatcctgggccccctcttcacctacctgcacatgaggctgagccagaagtggcaggtgatcaaccagaggagcctgctgtgtggagaagatgaggccgcagatgaaaatcctgagagccaggagatgctggaggagcagctggtgaggatgctgacccgggaggtgatggacctgatcaccgtgtgctgcgtgtccaagaagggagctgaccacagcagcgcccccccagcagatggagatgatgaggagatgatggccacagaggtgacccccagcgccatggccgagctgacagacctgggcaagtgcctgatgaagcatgaagatgtgtgcacagccctgctgatcacagccttcaacagcctggcctggaaggacaccctgagctgccagaggaccaccagccagctgtgctggcccctgctgaagcaggtgctgagcggcaccctgctggctgatgctgtgacctggctgttcacctctgtgctgaagggcctgcagatgcacggccagcatgatggctgcatggccagcctggtgcacctggccttccagatctatgaggccctgcggccccgctacctggagatccgggctgtgatggagcagatccctgagatccagaaggacagcctggaccagtttgactgcaagctgctgaaccccagcctgcagaaggtggccgacaagaggaggaaggaccagttcaagaggctgattgctggctgcatcggcaagcccctgggggagcagttcaggaaggaggtgcacatcaagaacctgccctttgtggccgacctgtag

SEQ ID NO: 205579 - DNA, 2211 bp, Artificial Sequence
  derived and/or modified sequence
atgcactacatcctgtctgctgcccagacagcagatggcggcggcctggtggagaagcactacgtgttcctgaagaggctgtgccaggtgctgtgtgccctgggcaaccagctgtgtgccctgctgggcgctgacagtgatgtggagacccccagcaactttgggaagtacctggagagcttcctggccttcaccacccaccccagccagttcctgcggagcagcacccagatgacctggggcgccctcttcagacatgagatcctgagccgggaccccctgctgctggccatcatccccaagtacctgcgggcctccatgaccaacctggtgaagatgggcttccccagcaagacagacagccccagctgtgagtacagcagatttgattttgacagtgatgaggacttcaatgccttcttcaacagcagccgggcccagcagggcgaggtgatgaggctggcctgccgcctggaccccaagaccagcttccagatggccggggagtggctgaagtaccagctgagcaccttcctggatgctggctctgtgaacagctgcagcgctgtgggcaccggggagggcagcctgtgcagcgtcttcagccccagctttgtgcagtgggaggccatgaccctcttcctggagagcgtcatcacccagatgttccgcaccctgaaccgggaggagatccctgtgaatgatggcatcgagctgctgcagatggtgctgaactttgacaccaaggaccccctcatcctgagctgtgtgctgaccaacgtgtctgccctcttcccctttgtgacctacagacctgagttcctgccccaggtgttcagcaagctgttcagctctgtgacctttgagaccgtggaggagagcaaggcccccaggaccagggctgtgagaaatgtgagaagacatgcctgcagcagcatcatcaagatgtgccgggactacccccagctggtgctgcccaactttgacatgctgtacaaccacgtgaagcagctgctgagcaatgagctgctgctgacccagatggagaagtgtgccctgatggaggccctggtgctgatcagcaaccagttcaagaactatgagcggcagaaggtgttcctggaggagctgatggcccctgtggccagcatctggctgagccaggacatgcaccgggtgctgagtgatgtggatgccttcatcgcctacgtgggcacagaccagaagagctgtgaccccggcctggaggacccctgtggcctgaacagagccaggatgtccttctgtgtgtacagcatcctgggcgtggtgaagaggacctgctggcccacagacctggaggaggccaaggccggcggctttgtggtgggctacaccagcagcggcaaccccatcttcaggaacccctgcacagagcagatcctgaagctgctggacaacctgctggccctgatccgcacccacaacaccctgtatgcccctgagatgctggccaagatggccgagcccttcaccaaggccctggacatgctggatgctgagaagagcgccatcctgggcctgccccagcccctgctggagctgaatgacagccctgtgttcaagacagtgctggagaggatgcagcgcttcttcagcaccctgtatgagaactgcttccacatcctgggcaaggccggccccagcatgcagcaggacttctacacagtggaggacctggccacccagctgctgagcagcgcctttgtgaacctgaacaacatcccagactaccgcctgcggcccatgctgcacatcctgagcaagcccctggtgctcttctgccccccagagcactatgaggccctggtgagccccatcctgggccccctcttcacctacctgcacatgaggctgagccagaagtggcaggtgatcaaccagaggagcctgctgtgtggggaggatgaagctgctgatgagaaccctgagagccaggagatgctggaggagcagctggtgaggatgctgacccgggaggtgatggacctgatcaccgtgtgctgcgtgtccaagaagggagctgaccacagcagcgcccccccagcagatggagatgatgaggagatgatggccacagaggtgaccccatctgccatggccgagctgacagacctggtgtccatccagagcacagacaagagggtgagccccagggctgaggtggactag

SEQ ID NO: 205580 - DNA, 2499 bp, Artificial Sequence
  derived and/or modified sequence
atgacctggggcgccctcttcagacatgagatcctgagccgggaccccctgctgctggccatcatccccaagtacctgcgggcctccatgaccaacctggtgaagatgggcttccccagcaagacagacagccccagctgtgagtacagcagatttgattttgacagtgatgaggacttcaatgccttcttcaacagcagccgggcccagcagggcgaggtgatgaggctggcctgccgcctggaccccaagaccagcttccagatggccggggagtggctgaagtaccagctgagcaccttcctggatgctggctctgtgaacagctgcagcgctgtgggcactggagagggcagcctgtgcagcgtcttcagccccagctttgtgcagtgggaggccatgaccctcttcctggagagcgtcatcacccagatgttccgcaccctgaaccgggaggagatccctgtgaatgatggcatcgagctgctgcagatggtgctgaactttgacaccaaggaccccctcatcctgagctgtgtgctgaccaacgtgtctgccctcttcccctttgtgacctacagacctgagttcctgccccaggtgttcagcaagctgttcagctctgtgacctttgaaacagtggaggagagcaaggcccccaggaccagggctgtgagaaatgtgagaagacatgcctgcagcagcatcatcaagatgtgccgggactacccccagctggtgctgcccaactttgacatgctgtacaaccacgtgaagcagctgctgagcaatgagctgctgctgacccagatggagaagtgtgccctgatggaggccctggtgctgatcagcaaccagttcaagaactatgaaaggcagaaggtgttcctggaggagctgatggcccctgtggccagcatctggctgagccaggacatgcaccgggtgctgagtgatgtggatgccttcatcgcctacgtgggcacagaccagaagagctgtgaccccggcctggaggacccctgtggcctgaacagagccaggatgtccttctgtgtgtacagcatcctgggcgtggtgaagaggacctgctggcccacagacctggaggaggccaaggccggcggctttgtggtgggctacaccagcagcggcaaccccatcttcaggaacccctgcacagagcagatcctgaagctgctggacaacctgctggccctgatccgcacccacaacaccctgtatgcccctgagatgctggccaagatggccgagcccttcaccaaggccctggacatgctggatgctgagaagagcgccatcctgggcctgccccagcccctgctggagctgaatgacagccctgtgttcaagacagtgctggagaggatgcagcgcttcttcagcaccctgtatgagaactgcttccacatcctgggcaaggccggccccagcatgcagcaggacttctacacagtggaggacctggccacccagctgctgagcagcgcctttgtgaacctgaacaacatcccagactaccgcctgcggcccatgctgcgggtgtttgtgaagcccctggtgctcttctgccccccagagcactatgaggccctggtgagccccatcctgggccccctcttcacctacctgcacatgaggctgagccagaagtggcaggtgatcaaccagaggagcctgctgtgtggagaagatgaggccgcagatgaaaatcctgagagccaggagatgctggaggagcagctggtgaggatgctgacccgggaggtgatggacctgatcaccgtgtgctgcgtgtccaagaagggagctgaccacagcagcgcccccccagcagatggagatgatgaggagatgatggccacagaggtgacccccagcgccatggccgagctgacagacctgggcaagtgcctgatgaagcatgaagatgtgtgcacagccctgctgatcacagccttcaacagcctggcctggaaggacaccctgagctgccagaggaccaccagccagctgtgctggcccctgctgaagcaggtgctgagcggcaccctgctggctgatgctgtgacctggctgttcacctctgtgctgaagggcctgcagatgcacggccagcatgatggctgcatggccagcctggtgcacctggccttccagatctatgaggccctgcggccccgctacctggagatccgggctgtgatggagcagatccctgagatccagaaggacagcctggaccagtttgactgcaagctgctgaaccccagcctgcagaaggtggccgacaagaggaggaaggaccagttcaagaggctgattgctggctgcatcggcaagcccctgggggagcagttcaggaaggaggtgcacatcaagaacctgcccagcctcttcaagaagaccaagcccatgctggagacagaggtgctggacaatgatggcggcggcctggccaccatctttgagccctag

SEQ ID NO: 205581 - DNA, 3615 bp, Artificial Sequence
  derived and/or modified sequence
atggccatggaccaggtgaacgccctgtgcgagcagctggtgaaggccgtgactgtcatgatggacccgaattctactcagagataccgcttggaggctttgaaattctgcgaagaattcaaggaaaagtgcccaatctgtgtgccttgtggcttaagattagcggagaagactcaggttgccatcgtcagacacttcgggctgcaaatactcgaacacgtcgtgaaatttagatggaatggaatgtcccgtctggagaaagtgtatctcaagaacagcgtgatggaactcattgccaacggtacgctgaatatactggaagaagagaaccacataaaggatgcactgtcgaggattgtcgtcgaaatgattaagagagaatggccacaacactggcccgatatgctcatcgaactcgacacgttgagcaagcagggagaaacccagactgaactcgtcatgttcattctgctccgtctggcagaggatgtcgtgacattccaaacgctcccaccacagcggcgtcgggacattcaacaaacactgacacagaacatggaaaggatctttagtttcctcttaaacactctgcaggaaaacgtgaacaaatatcaacaagtgaaaaccgacacttcccaagaatctaaagcacaagccaactgtagggtgggagttgctgccctcaatactctggctggatacatcgattgggtgtcaatgtcccatattacagcagagaattgtaaactgctcgagatactctgcctgctgttgaatgagcaggaactacagcttggggcggctgagtgcctactaattgccgtcagccgcaagggaaaacttgaagatcggaagccacttatggtgttattcggggacgtagcgatgcattatattcttagtgcagcacaaacggctgatgggggtgggctggtcgagaagcactacgtcttcctgaaacgcctgtgccaggtgctctgcgctctggggaatcaactatgtgcactcctgggtgcggactccgatgtggaaacaccttccaatttcggaaaatacctggaatcatttctagccttcacaactcatccgagccagttcctgaggtcttctacccagatgacttggggtgctctctttcgacacgaaatcctttcaagagacccgcttctgctggcgataataccaaaatatctccgcgcctctatgacgaacctggtgaaaatggggttccctagcaagaccgattccccgtcctgcgaatattccagatttgattttgactcagatgaggactttaatgcatttttcaattcgtcgcgggcccaacagggcgaggtgatgagattagcctgccgattagaccctaagacctcattccagatggccggcgagtggctgaagtaccaactttccacctttctggacgctgggagtgtgaactcatgcagtgctgtgggcaccggcgagggcagcctttgctcagtcttttcccccagctttgtccagtgggaagctatgacactcttcctcgaatctgtcatcacgcagatgttccgaaccttgaatcgggaggagattcctgtcaatgacgggatcgaactattgcagatggtgctgaattttgatacaaaggaccccctgatattatcctgcgtgctgactaacgtgtccgctctgtttccatttgttacataccggcccgagtttttgccccaagtgttcagcaagctctttagcagcgtgacttttgagactgtcgaggaatctaaggcacctagaaccagagctgttaggaacgtccgccgccacgcctgctcctcaatcatcaagatgtgtcgggactaccctcaactggtgttaccaaattttgacatgctatacaatcacgtgaaacagctactgtctaatgagctgttactgacgcagatggagaaatgcgcactcatggaggctctggtgctcatcagcaaccaatttaaaaattacgagcggcaaaaggtattccttgaggaactgatggctccagtggcgagcatttggctgagccaggatatgcacagggtgcttagcgacgtggatgccttcatcgcatacgtggggactgatcagaaatcctgtgaccctggcctcgaagacccttgtgggctgaatcgagctcgtatgtccttttgcgtctattcaattctcggagtagtgaagcgcacctgctggcccactgatctggaggaggccaaggcaggtggatttgttgtgggatacacatcaagcggtaaccccattttcaggaacccctgtaccgagcagatactgaaactgctggacaacctactagccctgatcagaacacacaatactctgtatgccccggagatgctggctaaaatggccgagccctttaccaaggcgctggatatgttagatgccgaaaaatcggccatcctcggcctgcctcaaccactcctcgagctgaatgactcccccgtgtttaaaacagtgctggagagaatgcagcggttcttttctactctctacgagaattgctttcacattctcgggaaggctggtccgagcatgcagcaggatttttacacagtggaggacttagccacgcagctgctctcaagtgcattcgtaaacctgaacaatattccagattatcgcctgcggcctatgttaagggtgttcgtgaagccactggtcctgttttgccctcccgaacattacgaggcactcgtgagcccaatcttaggccccttattcacgtatttacatatgcgcctgagccagaaatggcaggtgattaaccaacgctcattgctctgtggcgaggatgaggcagcggacgagaaccccgaatcacaggagatgctggaagaacaactggtgcgcatgctaacaagagaggtgatggatctcattaccgtgtgttgcgtctctaaaaagggggccgaccacagtagtgcaccacccgcggacggcgatgatgaggaaatgatggctaccgaagtgacaccaagcgccatggcagagttaactgatcttgggaaatgtctcatgaagcatgaggatgtgtgcacagctcttttaataaccgcttttaacagtctggcatggaaggacacgctgtcttgtcagcgcaccacatctcagctgtgctggccccttctcaagcaggtgctcagcggtacgttgctggccgatgcggtgacctggctgtttacctctgtgctcaagggtttacagatgcacggccagcacgatggttgcatggcaagcctggtgcaccttgcctttcagatctatgaagccctgaggccacggtacttggagatccgggccgtgatggagcaaatccccgaaatccaaaaggatagcttggatcagtttgactgcaaacttttaaatccctccctgcagaaagtcgcggacaagcgccggaaggaccagtttaagcggttgattgccgggtgtataggaaaaccactgggtgagcaattccgcaaagaggtgcacatcaagaacttaccttctctgtttaaaaaaaccaaacctatgcttgaaaccgaggtgctagataatgacgggggaggtcttgcaaccatatttgaaccttag

SEQ ID NO: 205582 - DNA, 513 bp, Artificial Sequence
  derived and/or modified sequence
atggccggcgagtggctgaagtaccagctgagcaccttcctggacgctggctccgtaaacagttgcagcgccgtaggcaccggtgagggcagcctgtgctctgttttttcccctagcttcgtccagtgggaggcaatgactctgttcctggagtctgttataacacagatgtttcgcaccctaaatcgggaagagatcccagtgaatgacggcatcgagctgctccaaatggttctgaatttcgatactaaagatcctctgattcttagctgcgtactcaccaacgttagcgctcttttcccgttcgtgacatacaggcccgagttcttgcctcaagtcttttccaagctgttctcttcggtcacctttgagaccgtagaggagagcaagcctccccatttccccccgctgtctgcctggaaggagatccaggtctggagctggagggaacaagccctgtgtagaacccgtagtaactacacaaaggtctcacgcaagggagtcagggcgtag

SEQ ID NO: 205583 - DNA, 2166 bp, Artificial Sequence
  derived and/or modified sequence
atggccggcgagtggctgaagtaccagctgagcaccttcctggacgccggatccgtaaacagttgctctgcagtcggcactggagagggctccctgtgtagcgtattttctccatccttcgtacagtgggaggctatgaccctgtttctggagtccgtcattacacaaatgttcagaacattgaatcgagaagaaatccccgtcaatgacgggattgagctactccagatggtgttaaacttcgataccaaagatccgttgatcctctcctgtgtccttacaaacgtcagtgccctttttccttttgttacgtaccgacctgaattcttacctcaggtgttctccaaactgttttcatcagtgacattcgaaacagtcgaggagtccaaggctccaagaacacgcgccgtaagaaatgtgagaagacatgcatgctcttccatcataaagatgtgccgagactatccacagctggttcttccgaactttgacatgctgtacaatcatgtcaagcagctgctctcaaacgagctgctcctaactcaaatggagaaatgtgcactcatggaggccctggtgttaatcagtaatcagtttaagaactatgaacggcagaaagtgtttctggaggaattgatggcccccgtcgcgagtatctggctgtcacaggatatgcacagggttctgtctgacgtggacgccttcattgcctatgtcgggactgaccagaaatcttgcgaccctggcctcgaggacccatgcggactaaaccgggctagaatgagcttctgcgtgtactccatcctcggggtcgttaaacggacatgttggcccacagacctggaggaagctaaggccggaggattcgttgtcggctacaccagctctggcaatcccatcttccgtaacccctgtacggaacaaatcttgaaactcctcgataacttgcttgccctcattcgtactcacaataccctgtatgccccggagatgttggcgaagatggctgaaccatttacgaaggccttggacatgctcgatgctgagaaaagtgccatactcggccttccccagcctcttctggaacttaatgatagcccagtctttaagaccgtgttagaaaggatgcagagattcttcagcacattatacgagaactgttttcatatcctaggaaaagccggcccatcgatgcagcaagatttttacaccgtggaagacctcgctacccagctgttgtcttctgcattcgtcaatttgaacaacatcccggattacaggctgcgtccaatgttgcacatcctgagcaagccactggtgttattttgtccgccagaacattacgaggcactggtcagccctatcctcggacccttattcacttatttacatatgcgcctctcacaaaagtggcaggtcataaaccagcgatctttactgtgcggggaggatgaggcagcagatgaaaatcccgagtcccaagaaatgcttgaagagcagttggtgcgtatgctcaccagggaggtgatggacctgatcactgtgtgctgcgtctctaaaaagggggcagatcatagctcggcaccccccgcagacggcgacgacgaagaaatgatggctacagaagttaccccctctgcgatggcagagctcaccgatctggggaagtgtcttatgaaacacgaagacgtttgcaccgctttattaatcactgcctttaactctctggcctggaaagacacactgtcatgccagagaaccacctctcagttgtgttggcccctccttaagcaggtgctcagcggcacactcctcgctgatgctgtgacctggctcttcaccagtgtgctgaaaggcctgcagatgcacggacagcatgacgggtgcatggcaagcctggtgcatctcgcttttcagatctatgaggctctcaggcccagatacctcgagattagggccgtgatggagcagattccggagatacagaaagatagcctggatcaattcgattgcaagctcctgaacccttctctgcagaaggttgccgacaaacgtagaaaagaccaatttaaacgattgattgccggttgcatcggaaagcctcttggcgaacagttccgcaaagaggtgcacattaagaatctgccttttgtggccgatctttag

SEQ ID NO: 205584 - DNA, 2211 bp, Artificial Sequence
  derived and/or modified sequence
atgcactacatcctgagcgccgcccagaccgccgacggcggcggcctggtcgagaaacactacgtgtttctgaaacgcctatgccaggtgctgtgcgccttgggtaatcagttgtgcgccctgttgggagccgactccgacgttgagaccccaagtaattttgggaaatacctggagtcatttttggcttttaccacccacccttctcagtttcttcgttcgtctactcagatgacttggggtgccctctttcggcatgaaatcctgagccgcgatccactgttactggccattatacccaagtacttacgcgcaagtatgacaaatctggtgaaaatgggatttccatcaaaaaccgactcaccctcttgtgagtacagtaggtttgactttgactcagatgaggattttaacgcattcttcaattcctcccgagcccagcagggtgaagttatgcggctcgcttgcagattagatcccaaaactagcttccagatggctggcgagtggcttaagtaccagctttccacgtttctggatgccggatcggtcaattcatgtagtgccgttgggaccggagaaggatcattgtgctcggtgttctctccatcattcgtgcaatgggaggcaatgactctgttcttagaaagtgtcataacccaaatgttccgaactttgaaccgtgaggagatcccggtgaatgacgggatcgaattgctccagatggtgctcaactttgatacaaaagaccctttgattctgagctgtgtgctaacaaatgtgagcgccctctttccctttgtcacttaccgccccgaattcctgccccaggtgttttccaagctgttcagtagcgtgacatttgagaccgtggaggagagcaaggctcccaggactcgggccgtgcgtaatgtgagaagacacgcttgctcctccattattaagatgtgccgggactatccgcagctggtgctgcctaactttgacatgttgtataatcatgtgaagcaacttttatctaatgagcttctcttgactcaaatggaaaaatgtgcactgatggaggctctggtactcatttctaatcagttcaaaaattacgagagacagaaggtctttttggaagaactcatggctccagtagcctcaatttggctgagtcaagacatgcaccgagtcctgtcggatgtcgatgccttcattgcatacgtggggaccgaccaaaagagctgcgacccggggcttgaggacccttgtggcctaaatcgggcgcggatgagtttttgtgtgtactctatcctgggagtggttaaacgcacgtgctggccaacagacctggaggaggcgaaggctggcgggttcgttgtcggatatacctcctccggaaacccaattttccggaacccatgcaccgaacagatcctcaaattgcttgacaacttgctggctctgatacgcacacacaacaccctgtatgcacctgaaatgctggctaagatggccgaaccttttactaaggccctggatatgcttgacgctgagaagtccgctatactaggtttgccgcagccattgctggagctcaatgacagtcctgtattcaagactgtgcttgagaggatgcaaaggttcttctccaccctgtacgaaaactgctttcacatacttggtaaagctggcccctctatgcagcaggatttttacacagtcgaagacctggcaacacagttactgtcatccgctttcgttaatctaaacaacatccctgattatcgcttacggcccatgttacatatcctcagcaaaccactggtgctgttttgtcctccagagcactacgaagccctggtaagccctatccttggtcctctgtttacatacttgcatatgaggctctcacaaaaatggcaagtcatcaaccagcggtcactgctgtgcggggaggacgaagccgccgacgaaaatcccgaaagtcaggaaatgctggaggagcagctcgtccgtatgttgacgagggaggtcatggatctgataacggtctgttgcgtgtctaagaagggcgccgaccacagttcggcaccaccagctgatggcgatgatgaggagatgatggctactgaggtaacccctagtgcaatggccgaactgaccgacctggtctccattcagtcaaccgataagcgtgtttccccccgtgcagaagttgattag

SEQ ID NO: 205585 - DNA, 2499 bp, Artificial Sequence
  derived and/or modified sequence
atgacctggggcgccctgttccggcacgagatcctgagccgggacccactgttgttggccattataccaaagtacctcagagcatccatgactaacttggttaaaatgggatttccctccaagactgattcccctagttgcgaatactccaggttcgatttcgactcggatgaagacttcaatgctttttttaacagctcacgcgctcagcagggcgaagtgatgcgactggcctgccggctcgatcctaagacctcattccagatggccggggagtggctgaagtaccaactgagcaccttccttgatgccggcagcgtaaatagctgctccgcagtggggaccggagagggctccctgtgctccgttttctctccttcgttcgtacagtgggaggcaatgacactgtttcttgagtccgtgatcacgcaaatgttccggacgttaaatcgtgaagaaatcccagtcaatgatgggatcgagctgctccagatggtacttaattttgacacaaaggacccattgatactcagctgtgtgctgactaacgtttccgcacttttcccatttgtaacttaccggcccgagttcttgcctcaggtattctctaaactatttagttccgtcacatttgagacagttgaggagtctaaagctccacgaacacgggccgtgcggaatgtgcgtaggcacgcttgtagcagcatcataaagatgtgccgtgactatccccagctggttttgcccaatttcgatatgctgtataaccacgtcaaacagttgctgagtaatgaactgctgttgactcagatggagaagtgcgccctcatggaggctcttgtccttataagcaatcagttcaagaattatgagcggcaaaaagtgtttcttgaggaattaatggctcctgtggctagtatatggctttcccaggacatgcatcgagtgctcagtgacgtggatgcctttatcgcttatgtaggcaccgaccagaaaagctgtgatccaggcctggaagacccctgtggcttaaacagggctaggatgtccttctgcgtatacagtatactcggagtggtaaagaggacatgttggcctaccgacctcgaagaggccaaggccggaggattcgtggttgggtacacaagctctgggaatcccatatttcgcaatccctgcaccgagcaaattcttaaactcttggataacctactagcgctcatccggacacacaacacgttgtatgccccggagatgttggccaaaatggccgagccttttactaaggctctggatatgctggacgctgaaaagtcagccatcctcgggctgccccagcccttactcgaactgaacgattctcccgtgtttaagactgtgctcgaaaggatgcaaaggttcttttctactctgtacgagaactgcttccacattctggggaaggccggaccgagcatgcagcaggatttctataccgtcgaggacctcgccacacaactgctcagttcggcttttgtgaacttaaacaacattcccgattacagattgcggcctatgctgagggtttttgtgaagccactcgttctcttctgtcctcccgagcactatgaagcccttgtgtctccgatcctgggacccctctttacgtaccttcatatgcggctgtcccagaagtggcaggtgatcaaccagagatcccttttgtgcggagaagacgaggctgcagacgagaatccagagtctcaggagatgctggaagaacagttggtgcgaatgctaaccagagaggttatggacctcattaccgtgtgctgcgtgtcgaagaagggcgccgaccattccagcgcaccccctgctgatggggatgacgaagaaatgatggccaccgaagtgacaccttcagccatggctgaacttacggacctggggaagtgtcttatgaagcacgaggacgtctgtacagcactgctgatcactgcatttaattccctcgcatggaaagacacactgagttgccagcgtaccacatctcagttatgttggcctttgctcaagcaggttctctcaggtaccctgctggccgacgcagtcacctggctgtttaccagtgtcctgaagggcctccagatgcacggccagcacgatgggtgtatggcctctcttgttcatcttgccttccagatctacgaggctctgaggccacgctatttggagattcgtgcagtgatggagcagattcccgagatccagaaggattctctggaccagtttgactgcaaactcttaaatccttccctccagaaagtggcagataagcgccgcaaggatcagttcaaacgcctgattgcgggttgcatcggcaaacccttgggagagcagttcaggaaggaagtgcacatcaaaaacttgccctctcttttcaagaaaactaagccaatgctggagacggaagtcctagataatgatgggggcggcctcgcaactatctttgaaccttag

SEQ ID NO: 205586 - DNA, 3615 bp, Artificial Sequence
  derived and/or modified sequence
atggcgatggatcaggttaacgccctatgcgagcagttggttaaggctgtcaccgtgatgatggatccaaactctacccagagatatagactggaggctctcaaattttgtgaggagtttaaggagaagtgtccaatctgcgtgccctgtggactcagactcgctgagaaaacccaggttgccatcgtgagacatttcggactgcagatactggagcatgttgtgaaattccgctggaacggcatgagccggctggagaaggtgtacctcaagaactctgtcatggagctcatcgctaatggcaccctcaacatcctggaggaagaaaatcatattaaggacgcccttagccgcattgtagtcgagatgattaaaagggagtggccgcagcattggcctgacatgctgatcgaattagatacgttatcaaagcaaggcgaaacacagacagaactggtcatgttcatccttctgagactggcagaagacgtcgtcacttttcagactctgcctccacagcggcgaagagacattcagcagactctgactcagaatatggagagaattttttcctttctgttaaacactttgcaggaaaacgttaacaaataccagcaagtgaagacagacacatcccaggagtcaaaagcgcaggccaactgtagagtgggcgtagcggctctcaacaccttagccggatatattgactgggttagcatgtcacatatcaccgccgagaattgtaaactgcttgaaattctatgcctgctgctgaacgaacaagagctgcagctaggcgctgccgaatgcctgctaatcgccgtgtctaggaagggtaaattagaagacaggaaacccctcatggtgctcttcggagatgtcgctatgcattacatactgagtgccgctcaaacggctgacggaggcggactcgtggagaaacactacgtattcctcaaaagactgtgtcaggttctctgtgccttaggaaatcagctgtgtgcactgctgggcgctgacagcgatgttgagactccctctaatttcggtaagtatttggagagtttcctggcatttacaactcacccctcccaatttctgcggtccagcacccaaatgacctggggcgcactgtttaggcatgaaatcctttctcgtgatcctcttctgctggcaattatacctaagtacctcagagcctccatgacgaacctcgtaaagatggggttcccgtccaagacagattcgccttcctgcgagtactcccgattcgactttgactccgacgaggactttaatgccttctttaacagttctagggcacagcagggtgaggttatgcggctggcctgccgtctggatcctaaaacctcctttcaaatggctggagagtggctcaagtaccagctgtccaccttcctggatgctggatccgtgaacagttgttccgctgtggggaccggcgagggatccctgtgctccgtttttagtccctctttcgtgcagtgggaggccatgaccttattcttggagagcgtgattacccagatgttccgcacactgaacagagaagagatccctgttaatgatggcattgaactcttgcagatggtgctgaatttcgacaccaaggatcctctaatcctctcatgtgtgttgaccaacgtgagcgcactgtttccctttgtaacctatagacccgaatttctcccacaggttttttctaagctgtttagctctgttacgtttgagacagtagaggagtcgaaagcccctagaaccagagcagtgcgcaacgtgaggcggcacgcctgctctagcatcatcaagatgtgtcgggactatccccaactcgtgctccctaactttgatatgctgtataaccacgtcaagcagcttctctccaacgaattgctactcacacaaatggaaaagtgtgctctgatggaagccctggtgctgatatccaaccaatttaaaaactatgagaggcagaaagtatttttagaagagctcatggctcctgtggcttctatttggttgtcacaggacatgcaccgggtactgagtgacgtggacgctttcatcgcttatgttggtaccgatcagaaatcatgcgaccccggattggaggacccctgcggactgaaccgggcacgtatgtcgttttgtgtttactcaattctcggagtggtcaagaggacatgctggcctaccgatctggaggaagccaaggctggaggcttcgtggtggggtacactagcagcggaaatccaatcttcaggaacccttgcactgaacagatcttgaagctcctagataatctgctggcactcatcaggacacacaataccctatacgcacctgagatgctggcaaaaatggccgagcccttcactaaggccttagacatgttagatgccgaaaaaagcgccattcttggcctccctcagcccctcctcgagctgaatgactcccctgttttcaaaacagtgctggaacgcatgcagcgttttttcagcaccctttatgaaaattgcttccatatcttaggaaaagcaggcccttccatgcagcaggatttctacacggttgaagacttggcgacacagctgctaagctccgcattcgtgaacctgaacaacattcctgactacagacttaggcccatgctgcgggtcttcgtcaagcctttagtgctattctgcccacccgagcactacgaagccctcgtgagccccatcctaggccctctgtttacctatttgcatatgcggctcagccaaaaatggcaggtgattaaccagagaagcttactgtgtggcgaagatgaggcggctgatgagaaccccgagtcgcaagagatgttggaggagcaattagtgcgaatgctgacccgcgaagtaatggacctgattaccgtctgttgtgtgtccaaaaaaggcgctgatcactcctccgcgcctccggcagatggtgacgatgaagaaatgatggcgactgaggtgactcccagcgcgatggccgaactcactgacctgggtaagtgccttatgaaacatgaggacgtgtgtacagcactccttataactgccttcaatagtttggcttggaaggacactctgtcttgtcagcggacaacttctcagctgtgttggcctctcctgaaacaggtgttgtctgggaccctgcttgctgacgctgtgacatggctatttacctctgttctgaaaggattgcagatgcacggtcagcacgacggatgcatggcttccctggtgcacttggcattccagatttatgaagccctcaggcctcgatacctggagataagagcagtgatggaacagatccccgagatccagaaagactcactggaccagttcgattgtaagctgctaaaccctagcttacaaaaagtcgcagacaaacggaggaaggatcagttcaaacgcctgatcgcgggatgtatcgggaagccgctaggcgagcagtttcgaaaggaggtgcacatcaagaatctgccctccctctttaaaaagaccaagcctatgctggaaactgaagtcctggacaacgatggtgggggactggccacaatctttgagccgtag

SEQ ID NO: 205587 - DNA, 513 bp, Artificial Sequence
  derived and/or modified sequence
atggcaggtgaatggttgaagtaccagctaagtaccttcctagacgctgggtccgttaatagttgttcagcagtaggaacaggagagggctctctgtgttcagtcttttcccccagcttcgtacaatgggaggctatgacgctcttccttgagtctgttataacccaaatgtttcggacgctgaaccgggaggagattcccgttaatgatggtattgagctgctccagatggtcctgaacttcgacactaaagacccactgattctgagctgcgttctcacaaatgtcagcgctctgtttccctttgtcacctatcgccctgagttcctccctcaggtgttcagcaaattattcagttcagtcacttttgagacagtggaagagtcgaagccaccccacttccctccactatccgcatggaaggagatacaggtatggtcatggcgagaacaagcgctgtgtcgcactcgctccaactacactaaggtgagtcgtaagggggttcgagcctag

SEQ ID NO: 205588 - DNA, 2166 bp, Artificial Sequence
  derived and/or modified sequence
atggccggtgaatggctcaagtaccaactctccaccttcttggacgctggcagtgtcaacagttgctcagctgtgggaacaggcgaggggtccttgtgctccgtcttcagccccagttttgtccaatgggaggcaatgaccttatttcttgagagtgtgatcacgcagatgttccggacgctaaaccgcgaagagatcccggtaaacgatggtatcgaactcctacagatggttctgaactttgatacaaaagatcctctgatcttatcctgtgtcctaacaaacgtgagcgcactgttcccatttgtgacttatcgtcctgaatttttgccacaggtcttttctaagctcttcagttcggtcacctttgaaaccgtggaggagagtaaggctccgcgtaccagagctgtgagaaatgtgcgcaggcacgcctgttcttctattatcaaaatgtgtcgcgattatccacagcttgtgcttcccaactttgacatgctatacaatcatgtgaagcagctgctctcaaacgagctattactgacgcaaatggagaaatgcgcgctgatggaagccttggtgctgattagtaaccagttcaaaaactacgaaaggcagaaggtttttctcgaggaactgatggcgccagtcgcttcaatctggcttagtcaggacatgcaccgggttctcagtgatgttgacgccttcatcgcttatgttgggaccgaccagaagtcgtgtgatcctggccttgaagacccctgtggactcaacagagctagaatgtccttctgtgtctactccatcctgggcgtggtgaagcgtacttgttggcccactgatctcgaggaggccaaagccggtgggttcgtcgtgggctataccagctcaggcaaccctatttttcggaatccttgtaccgagcagatactcaaactgctggataatctgctcgcactcattaggacccacaacactctctatgcaccagagatgttagccaaaatggctgagccattcacgaaggcgcttgatatgttagacgcagagaagtccgccatacttggcctgccacagccactactggaactaaacgattctcctgtcttcaagaccgtgctggaaagaatgcagcgtttttttagtaccctgtacgagaattgctttcatatcctcggaaaggctggaccttcaatgcagcaagacttctataccgttgaggaccttgctacacagctactgtcatccgccttcgtcaatctaaacaatatcccagattaccgactccggccaatgctgcacattctctcaaagcctctggtcttgttctgtcctccagaacactatgaggcgttggtcagccctatccttggtcccctattcacttatctccatatgcgtctctcccagaagtggcaggttatcaatcagagatccctgctctgcggtgaggacgaggctgctgatgaaaatcccgaatctcaggaaatgcttgaggaacagttggtccgaatgttaacacgcgaggtcatggacttgattacggtgtgctgcgtgtctaagaagggcgcagaccactccagtgcccctcccgctgacggcgatgatgaagagatgatggccaccgaagtgactcctagtgctatggccgaacttacagacctggggaagtgtctcatgaagcatgaagacgtgtgtacagccctattgataacagctttcaattcgttggcatggaaagacacactaagttgccagagaaccacctcccagctgtgctggccgctgctgaagcaggtcctaagcggtacactgctggccgatgcggtcacctggctgtttacttctgtgctgaaaggtctgcagatgcacggtcagcatgacggatgcatggcttctctcgtgcatctggcattccaaatctacgaagctcttcggccaaggtacctggaaatcagggccgtgatggaacagattcctgagatacagaaagacagcctggaccaatttgactgcaaattactgaatccatccttgcagaaagtagcggacaagcggagaaaggatcaatttaagcgcctcattgccggttgcattggaaaacccctaggtgaacagtttaggaaggaagtgcatattaagaacctcccttttgtcgctgatttatag

SEQ ID NO: 205589 - DNA, 2211 bp, Artificial Sequence
  derived and/or modified sequence
atgcactatatcctttccgctgcacagaccgctgacgggggaggacttgtagaaaagcactacgtgtttctgaagaggctttgccaagtcctctgcgctctgggcaatcagttgtgcgcgctgctgggggctgacagcgatgtggagacacctagcaatttcggaaaatacctagaaagctttctagcattcactacacacccttcccagttcctgaggtcttccacccagatgacatggggggcacttttccgacatgaaatcctctcacgggatccattgctgctagccataatccccaagtatctacgagcatcaatgaccaaccttgttaagatgggattcccgtctaagacagattcacctagttgcgagtactctaggttcgacttcgattcggacgaagactttaacgcattttttaacagctcccgagcccagcagggggaagtgatgcgcctcgcctgcaggctggaccctaagacaagctttcagatggcaggggagtggctgaaatatcagttaagcacctttctggacgctggcagcgttaacagttgttccgccgtgggaacgggcgagggttctctatgtagcgtcttttccccatctttcgttcagtgggaggccatgacccttttcctagagtcggttatcactcagatgttccgcacattaaatcgcgaggaaattcccgttaacgatggcatcgagctgttgcagatggtgcttaattttgatacgaaggaccccctcatcctgtcttgtgtgttgaccaacgttagcgccctttttccatttgtaacctacaggccggaattcctcccacaggtattctcgaagttgttctccagcgtgacatttgagacagtcgaggaatccaaggcccctcgcacacgggctgttcgtaatgtcaggagacatgcgtgctcttcgattattaagatgtgtagagactatcctcagctcgtcttacccaattttgatatgctatataatcacgtgaaacaacttcttagcaatgagctgcttctgacccaaatggagaagtgtgccttgatggaggctctggtgctcatcagcaatcagttcaagaactatgaaaggcagaaggtattcctcgaggagcttatggcccctgttgcaagtatatggctgtcccaggacatgcatagagtgctctccgatgtggacgctttcatagcatatgtcggcaccgatcagaagagctgcgatcccggactggaggatccctgcggtctcaatcgagccaggatgagtttttgcgtctactctatcttaggcgttgtgaaaagaacgtgctggcccaccgacctcgaagaggccaaagccggtgggttcgttgtgggatatacttcatccgggaaccccattttccgcaacccatgtacagagcaaatccttaaattgcttgataacctgctcgccttaatcaggacacacaatactctatatgccccagaaatgctggccaaaatggccgagccatttaccaaagcccttgacatgctggatgcagagaaatctgcaatcctggggctcccccagcctctactggagctgaacgactcccccgtgttcaaaacagtgttggaacgcatgcaacgttttttctccactctgtacgagaattgcttccatatactgggcaaagctggaccatctatgcagcaggacttctatactgtggaagatttggcaacccaattattgtcctctgcctttgtcaacctcaataacatccctgactatcgcctcagaccaatgcttcacatcctctctaaaccactggtgttgttctgccctcctgagcattatgaagcactggtgagtcccatcttgggcccattgtttacttacctgcacatgaggttatcccagaagtggcaggttattaatcaacgaagtttattgtgtggcgaagatgaggccgcagatgagaaccctgaatctcaggagatgctggaggagcagttagttcggatgttgaccagggaggtcatggatttgatcactgtttgttgcgtttcaaagaaaggggctgatcattcatccgctccacctgctgacggggacgacgaggagatgatggccacagaggtaacaccttcagccatggcggagctgaccgacctggtaagcattcaatctaccgacaaacgggtcagtcctagggccgaggtggattag

SEQ ID NO: 205590 - DNA, 2499 bp, Artificial Sequence
  derived and/or modified sequence
atgacgtggggggctctgtttaggcatgagattctcagccgtgatccactcctgttggccatcattcccaaatacctacgcgcttccatgaccaatttagtgaagatggggttccctagcaagaccgatagtcctagctgtgagtattcgaggttcgattttgactccgatgaggacttcaatgcattttttaacagctctcgagctcagcaaggagaagttatgcgtctcgcctgccggctggatccgaaaacctctttccagatggctggcgaatggctgaaatatcaactctctaccttccttgatgcaggcagtgtcaattcctgtagcgcggtggggactggtgagggatccctttgtagcgtgttctcccccagctttgtgcagtgggaggccatgacactatttctggagtctgtcataacacagatgtttaggacactcaaccgggaggaaatcccagtgaacgacggcatcgagcttctgcaaatggtgctgaatttcgacacgaaagaccctctgattcttagttgtgtcctcacaaatgtttccgctttgtttcccttcgtgacttaccgcccagagtttttgccgcaggtgttttctaagttatttagctccgtaactttcgaaactgtcgaagaaagtaaagcccctcggacacgcgcagtgcgcaacgtgcggagacatgcttgtagttcaattatcaaaatgtgtagagactacccccaactcgtactgccaaattttgatatgttgtataaccacgtgaagcagttgctgtctaatgaactgttgctgactcagatggagaagtgcgccctgatggaggctctcgtacttatttctaatcagttcaagaattatgagcgtcagaaggtcttcctggaggagctgatggccccagtcgcaagcatttggctgtcacaagatatgcatcgcgtgttatctgacgtagatgcatttatcgcgtatgtgggtacagaccagaagtcttgcgacccaggtctggaagacccgtgcggcctaaaccgggcaaggatgtccttctgtgtctatagtatccttggggtggtgaaaagaacgtgctggccaaccgatcttgaggaagccaaagccggtggctttgtggtaggctacacatcctcaggaaatcccatcttcagaaatccttgtacagaacaaattctaaagctcctggataacctccttgcacttatcaggactcataatacactgtacgctcccgagatgctggcgaaaatggccgagcctttcaccaaggcactcgatatgctagacgccgagaagtctgcaatattagggctaccccagcctttgcttgaactcaatgactcaccagtttttaaaaccgttctggagaggatgcagaggtttttcagcactctttacgagaattgcttccatatcctgggcaaagctggaccttccatgcagcaggacttctatacggtcgaagatctcgccacccagctccttagttccgcctttgttaacctgaacaatattccagactatcggctgcgcccaatgctccgtgtgtttgtcaagcctcttgtgctgttctgtcctcccgaacactacgaggcgctcgtctcacctattcttgggcctctctttacttatttgcacatgcgccttagccagaaatggcaggtgataaatcagagatctcttctgtgtggcgaagacgaggccgctgacgagaatcccgagagtcaggaaatgctggaagaacagctagtcagaatgcttacaagagaggtgatggatctcattacagtctgttgtgttagcaagaaaggggctgatcactctagcgcaccccctgctgatggagacgatgaggaaatgatggcgacggaggtgacccccagtgcaatggcggagctgaccgatctgggaaaatgcctgatgaagcacgaggacgtgtgcactgcactgctgatcaccgccttcaactccctggcttggaaagatacattaagttgtcagcgaacgacttctcaattgtgctggcccctcctgaaacaggtgctctctggcacccttctggccgacgccgtaacgtggctctttaccagcgtgctcaagggactgcaaatgcacggccagcatgatggctgtatggcaagcttggtacatttagccttccaaatctatgaggccctgcgccctaggtatttggagatacgggctgtgatggaacagatccccgagattcaaaaggatagcttagaccagtttgactgtaaacttctgaacccgagcttgcagaaagtagccgacaagcggaggaaggaccagttcaaaaggctaatagctgggtgtatcggcaagcccttgggggaacaatttcgtaaagaggtgcacattaagaatttaccctcgctgttcaaaaagaccaaaccgatgttggaaaccgaagtactcgacaacgacggcggagggttagctactatttttgagccgtag

SEQ ID NO: 205591 - DNA, 3615 bp, Artificial Sequence
  derived and/or modified sequence
atggccatggaccaggtgaacgccctgtgcgagcagctggtgaaggccgtgaccgtgatgatggaccccaacagcacccagagatacagactggaggccctgaagttctgcgaggagttcaaggagaagtgccccatctgcgtgccctgcggcctgagactggccgagaagacccaggtggccatcgtgagacacttcggcctgcagatcctggagcacgtggtgaagttcagatggaacggcatgagcagactggagaaggtgtacctgaagaacagcgtgatggagctgatcgccaacggcaccctgaacatcctggaggaggagaaccacatcaaggacgccctgagcagaatcgtggtggagatgatcaagagagagtggccccagcactggcccgacatgctgatcgagctggacaccctgagcaagcagggcgagacccagaccgagctggtgatgttcatcctgctgagactggccgaggacgtggtgaccttccagaccctgcccccccagagaagaagagacatccagcagaccctgacccagaacatggagagaatcttcagcttcctgctgaacaccctgcaggagaacgtgaacaagtaccagcaggtgaagaccgacaccagccaggagagcaaggcccaggccaactgcagagtgggcgtggccgccctgaacaccctggccggctacatcgactgggtgagcatgagccacatcaccgccgagaactgcaagctgctggagatcctgtgcctgctgctgaacgagcaggagctgcagctgggcgccgccgagtgcctgctgatcgccgtgagcagaaagggcaagctggaggacagaaagcccctgatggtgctgttcggcgacgtggccatgcactacatcctgagcgccgcccagaccgccgacggcggcggcctggtggagaagcactacgtgttcctgaagagactgtgccaggtgctgtgcgccctgggcaaccagctgtgcgccctgctgggcgccgacagcgacgtggagacccccagcaacttcggcaagtacctggagagcttcctggccttcaccacccaccccagccagttcctgagaagcagcacccagatgacctggggcgccctgttcagacacgagatcctgagcagagaccccctgctgctggccatcatccccaagtacctgagagccagcatgaccaacctggtgaagatgggcttccccagcaagaccgacagccccagctgcgagtacagcagattcgacttcgacagcgacgaggacttcaacgccttcttcaacagcagcagagcccagcagggcgaggtgatgagactggcctgcagactggaccccaagaccagcttccagatggccggcgagtggctgaagtaccagctgagcaccttcctggacgccggcagcgtgaacagctgcagcgccgtgggcaccggcgagggcagcctgtgcagcgtgttcagccccagcttcgtgcagtgggaggccatgaccctgttcctggagagcgtgatcacccagatgttcagaaccctgaacagagaggagatccccgtgaacgacggcatcgagctgctgcagatggtgctgaacttcgacaccaaggaccccctgatcctgagctgcgtgctgaccaacgtgagcgccctgttccccttcgtgacctacagacccgagttcctgccccaggtgttcagcaagctgttcagcagcgtgaccttcgagaccgtggaggagagcaaggcccccagaaccagagccgtgagaaacgtgagaagacacgcctgcagcagcatcatcaagatgtgcagagactacccccagctggtgctgcccaacttcgacatgctgtacaaccacgtgaagcagctgctgagcaacgagctgctgctgacccagatggagaagtgcgccctgatggaggccctggtgctgatcagcaaccagttcaagaactacgagagacagaaggtgttcctggaggagctgatggcccccgtggccagcatctggctgagccaggacatgcacagagtgctgagcgacgtggacgccttcatcgcctacgtgggcaccgaccagaagagctgcgaccccggcctggaggacccctgcggcctgaacagagccagaatgagcttctgcgtgtacagcatcctgggcgtggtgaagagaacctgctggcccaccgacctggaggaggccaaggccggcggcttcgtggtgggctacaccagcagcggcaaccccatcttcagaaacccctgcaccgagcagatcctgaagctgctggacaacctgctggccctgatcagaacccacaacaccctgtacgcccccgagatgctggccaagatggccgagcccttcaccaaggccctggacatgctggacgccgagaagagcgccatcctgggcctgccccagcccctgctggagctgaacgacagccccgtgttcaagaccgtgctggagagaatgcagagattcttcagcaccctgtacgagaactgcttccacatcctgggcaaggccggccccagcatgcagcaggacttctacaccgtggaggacctggccacccagctgctgagcagcgccttcgtgaacctgaacaacatccccgactacagactgagacccatgctgagagtgttcgtgaagcccctggtgctgttctgcccccccgagcactacgaggccctggtgagccccatcctgggccccctgttcacctacctgcacatgagactgagccagaagtggcaggtgatcaaccagagaagcctgctgtgcggcgaggacgaggccgccgacgagaaccccgagagccaggagatgctggaggagcagctggtgagaatgctgaccagagaggtgatggacctgatcaccgtgtgctgcgtgagcaagaagggcgccgaccacagcagcgccccccccgccgacggcgacgacgaggagatgatggccaccgaggtgacccccagcgccatggccgagctgaccgacctgggcaagtgcctgatgaagcacgaggacgtgtgcaccgccctgctgatcaccgccttcaacagcctggcctggaaggacaccctgagctgccagagaaccaccagccagctgtgctggcccctgctgaagcaggtgctgagcggcaccctgctggccgacgccgtgacctggctgttcaccagcgtgctgaagggcctgcagatgcacggccagcacgacggctgcatggccagcctggtgcacctggccttccagatctacgaggccctgagacccagatacctggagatcagagccgtgatggagcagatccccgagatccagaaggacagcctggaccagttcgactgcaagctgctgaaccccagcctgcagaaggtggccgacaagagaagaaaggaccagttcaagagactgatcgccggctgcatcggcaagcccctgggcgagcagttcagaaaggaggtgcacatcaagaacctgcccagcctgttcaagaagaccaagcccatgctggagaccgaggtgctggacaacgacggcggcggcctggccaccatcttcgagccctag

SEQ ID NO: 205592 - DNA, 513 bp, Artificial Sequence
  derived and/or modified sequence
atggccggcgagtggctgaagtaccagctgagcaccttcctggacgccggcagcgtgaacagctgcagcgccgtgggcaccggcgagggcagcctgtgcagcgtgttcagccccagcttcgtgcagtgggaggccatgaccctgttcctggagagcgtgatcacccagatgttcagaaccctgaacagagaggagatccccgtgaacgacggcatcgagctgctgcagatggtgctgaacttcgacaccaaggaccccctgatcctgagctgcgtgctgaccaacgtgagcgccctgttccccttcgtgacctacagacccgagttcctgccccaggtgttcagcaagctgttcagcagcgtgaccttcgagaccgtggaggagagcaagcccccccacttcccccccctgagcgcctggaaggagatccaggtgtggagctggagagagcaggccctgtgcagaaccagaagcaactacaccaaggtgagcagaaagggcgtgagagcctag

SEQ ID NO: 205593 - DNA, 2166 bp, Artificial Sequence
  derived and/or modified sequence
atggccggcgagtggctgaagtaccagctgagcaccttcctggacgccggcagcgtgaacagctgcagcgccgtgggcaccggcgagggcagcctgtgcagcgtgttcagccccagcttcgtgcagtgggaggccatgaccctgttcctggagagcgtgatcacccagatgttcagaaccctgaacagagaggagatccccgtgaacgacggcatcgagctgctgcagatggtgctgaacttcgacaccaaggaccccctgatcctgagctgcgtgctgaccaacgtgagcgccctgttccccttcgtgacctacagacccgagttcctgccccaggtgttcagcaagctgttcagcagcgtgaccttcgagaccgtggaggagagcaaggcccccagaaccagagccgtgagaaacgtgagaagacacgcctgcagcagcatcatcaagatgtgcagagactacccccagctggtgctgcccaacttcgacatgctgtacaaccacgtgaagcagctgctgagcaacgagctgctgctgacccagatggagaagtgcgccctgatggaggccctggtgctgatcagcaaccagttcaagaactacgagagacagaaggtgttcctggaggagctgatggcccccgtggccagcatctggctgagccaggacatgcacagagtgctgagcgacgtggacgccttcatcgcctacgtgggcaccgaccagaagagctgcgaccccggcctggaggacccctgcggcctgaacagagccagaatgagcttctgcgtgtacagcatcctgggcgtggtgaagagaacctgctggcccaccgacctggaggaggccaaggccggcggcttcgtggtgggctacaccagcagcggcaaccccatcttcagaaacccctgcaccgagcagatcctgaagctgctggacaacctgctggccctgatcagaacccacaacaccctgtacgcccccgagatgctggccaagatggccgagcccttcaccaaggccctggacatgctggacgccgagaagagcgccatcctgggcctgccccagcccctgctggagctgaacgacagccccgtgttcaagaccgtgctggagagaatgcagagattcttcagcaccctgtacgagaactgcttccacatcctgggcaaggccggccccagcatgcagcaggacttctacaccgtggaggacctggccacccagctgctgagcagcgccttcgtgaacctgaacaacatccccgactacagactgagacccatgctgcacatcctgagcaagcccctggtgctgttctgcccccccgagcactacgaggccctggtgagccccatcctgggccccctgttcacctacctgcacatgagactgagccagaagtggcaggtgatcaaccagagaagcctgctgtgcggcgaggacgaggccgccgacgagaaccccgagagccaggagatgctggaggagcagctggtgagaatgctgaccagagaggtgatggacctgatcaccgtgtgctgcgtgagcaagaagggcgccgaccacagcagcgccccccccgccgacggcgacgacgaggagatgatggccaccgaggtgacccccagcgccatggccgagctgaccgacctgggcaagtgcctgatgaagcacgaggacgtgtgcaccgccctgctgatcaccgccttcaacagcctggcctggaaggacaccctgagctgccagagaaccaccagccagctgtgctggcccctgctgaagcaggtgctgagcggcaccctgctggccgacgccgtgacctggctgttcaccagcgtgctgaagggcctgcagatgcacggccagcacgacggctgcatggccagcctggtgcacctggccttccagatctacgaggccctgagacccagatacctggagatcagagccgtgatggagcagatccccgagatccagaaggacagcctggaccagttcgactgcaagctgctgaaccccagcctgcagaaggtggccgacaagagaagaaaggaccagttcaagagactgatcgccggctgcatcggcaagcccctgggcgagcagttcagaaaggaggtgcacatcaagaacctgcccttcgtggccgacctgtag

SEQ ID NO: 205594 - DNA, 2211 bp, Artificial Sequence
  derived and/or modified sequence
atgcactacatcctgagcgccgcccagaccgccgacggcggcggcctggtggagaagcactacgtgttcctgaagagactgtgccaggtgctgtgcgccctgggcaaccagctgtgcgccctgctgggcgccgacagcgacgtggagacccccagcaacttcggcaagtacctggagagcttcctggccttcaccacccaccccagccagttcctgagaagcagcacccagatgacctggggcgccctgttcagacacgagatcctgagcagagaccccctgctgctggccatcatccccaagtacctgagagccagcatgaccaacctggtgaagatgggcttccccagcaagaccgacagccccagctgcgagtacagcagattcgacttcgacagcgacgaggacttcaacgccttcttcaacagcagcagagcccagcagggcgaggtgatgagactggcctgcagactggaccccaagaccagcttccagatggccggcgagtggctgaagtaccagctgagcaccttcctggacgccggcagcgtgaacagctgcagcgccgtgggcaccggcgagggcagcctgtgcagcgtgttcagccccagcttcgtgcagtgggaggccatgaccctgttcctggagagcgtgatcacccagatgttcagaaccctgaacagagaggagatccccgtgaacgacggcatcgagctgctgcagatggtgctgaacttcgacaccaaggaccccctgatcctgagctgcgtgctgaccaacgtgagcgccctgttccccttcgtgacctacagacccgagttcctgccccaggtgttcagcaagctgttcagcagcgtgaccttcgagaccgtggaggagagcaaggcccccagaaccagagccgtgagaaacgtgagaagacacgcctgcagcagcatcatcaagatgtgcagagactacccccagctggtgctgcccaacttcgacatgctgtacaaccacgtgaagcagctgctgagcaacgagctgctgctgacccagatggagaagtgcgccctgatggaggccctggtgctgatcagcaaccagttcaagaactacgagagacagaaggtgttcctggaggagctgatggcccccgtggccagcatctggctgagccaggacatgcacagagtgctgagcgacgtggacgccttcatcgcctacgtgggcaccgaccagaagagctgcgaccccggcctggaggacccctgcggcctgaacagagccagaatgagcttctgcgtgtacagcatcctgggcgtggtgaagagaacctgctggcccaccgacctggaggaggccaaggccggcggcttcgtggtgggctacaccagcagcggcaaccccatcttcagaaacccctgcaccgagcagatcctgaagctgctggacaacctgctggccctgatcagaacccacaacaccctgtacgcccccgagatgctggccaagatggccgagcccttcaccaaggccctggacatgctggacgccgagaagagcgccatcctgggcctgccccagcccctgctggagctgaacgacagccccgtgttcaagaccgtgctggagagaatgcagagattcttcagcaccctgtacgagaactgcttccacatcctgggcaaggccggccccagcatgcagcaggacttctacaccgtggaggacctggccacccagctgctgagcagcgccttcgtgaacctgaacaacatccccgactacagactgagacccatgctgcacatcctgagcaagcccctggtgctgttctgcccccccgagcactacgaggccctggtgagccccatcctgggccccctgttcacctacctgcacatgagactgagccagaagtggcaggtgatcaaccagagaagcctgctgtgcggcgaggacgaggccgccgacgagaaccccgagagccaggagatgctggaggagcagctggtgagaatgctgaccagagaggtgatggacctgatcaccgtgtgctgcgtgagcaagaagggcgccgaccacagcagcgccccccccgccgacggcgacgacgaggagatgatggccaccgaggtgacccccagcgccatggccgagctgaccgacctggtgagcatccagagcaccgacaagagagtgagccccagagccgaggtggactag

SEQ ID NO: 205595 - DNA, 2499 bp, Artificial Sequence
  derived and/or modified sequence
atgacctggggcgccctgttcagacacgagatcctgagcagagaccccctgctgctggccatcatccccaagtacctgagagccagcatgaccaacctggtgaagatgggcttccccagcaagaccgacagccccagctgcgagtacagcagattcgacttcgacagcgacgaggacttcaacgccttcttcaacagcagcagagcccagcagggcgaggtgatgagactggcctgcagactggaccccaagaccagcttccagatggccggcgagtggctgaagtaccagctgagcaccttcctggacgccggcagcgtgaacagctgcagcgccgtgggcaccggcgagggcagcctgtgcagcgtgttcagccccagcttcgtgcagtgggaggccatgaccctgttcctggagagcgtgatcacccagatgttcagaaccctgaacagagaggagatccccgtgaacgacggcatcgagctgctgcagatggtgctgaacttcgacaccaaggaccccctgatcctgagctgcgtgctgaccaacgtgagcgccctgttccccttcgtgacctacagacccgagttcctgccccaggtgttcagcaagctgttcagcagcgtgaccttcgagaccgtggaggagagcaaggcccccagaaccagagccgtgagaaacgtgagaagacacgcctgcagcagcatcatcaagatgtgcagagactacccccagctggtgctgcccaacttcgacatgctgtacaaccacgtgaagcagctgctgagcaacgagctgctgctgacccagatggagaagtgcgccctgatggaggccctggtgctgatcagcaaccagttcaagaactacgagagacagaaggtgttcctggaggagctgatggcccccgtggccagcatctggctgagccaggacatgcacagagtgctgagcgacgtggacgccttcatcgcctacgtgggcaccgaccagaagagctgcgaccccggcctggaggacccctgcggcctgaacagagccagaatgagcttctgcgtgtacagcatcctgggcgtggtgaagagaacctgctggcccaccgacctggaggaggccaaggccggcggcttcgtggtgggctacaccagcagcggcaaccccatcttcagaaacccctgcaccgagcagatcctgaagctgctggacaacctgctggccctgatcagaacccacaacaccctgtacgcccccgagatgctggccaagatggccgagcccttcaccaaggccctggacatgctggacgccgagaagagcgccatcctgggcctgccccagcccctgctggagctgaacgacagccccgtgttcaagaccgtgctggagagaatgcagagattcttcagcaccctgtacgagaactgcttccacatcctgggcaaggccggccccagcatgcagcaggacttctacaccgtggaggacctggccacccagctgctgagcagcgccttcgtgaacctgaacaacatccccgactacagactgagacccatgctgagagtgttcgtgaagcccctggtgctgttctgcccccccgagcactacgaggccctggtgagccccatcctgggccccctgttcacctacctgcacatgagactgagccagaagtggcaggtgatcaaccagagaagcctgctgtgcggcgaggacgaggccgccgacgagaaccccgagagccaggagatgctggaggagcagctggtgagaatgctgaccagagaggtgatggacctgatcaccgtgtgctgcgtgagcaagaagggcgccgaccacagcagcgccccccccgccgacggcgacgacgaggagatgatggccaccgaggtgacccccagcgccatggccgagctgaccgacctgggcaagtgcctgatgaagcacgaggacgtgtgcaccgccctgctgatcaccgccttcaacagcctggcctggaaggacaccctgagctgccagagaaccaccagccagctgtgctggcccctgctgaagcaggtgctgagcggcaccctgctggccgacgccgtgacctggctgttcaccagcgtgctgaagggcctgcagatgcacggccagcacgacggctgcatggccagcctggtgcacctggccttccagatctacgaggccctgagacccagatacctggagatcagagccgtgatggagcagatccccgagatccagaaggacagcctggaccagttcgactgcaagctgctgaaccccagcctgcagaaggtggccgacaagagaagaaaggaccagttcaagagactgatcgccggctgcatcggcaagcccctgggcgagcagttcagaaaggaggtgcacatcaagaacctgcccagcctgttcaagaagaccaagcccatgctggagaccgaggtgctggacaacgacggcggcggcctggccaccatcttcgagccctag

SEQ ID NO: 205596 - protein, 688 aa, Artificial Sequence
  derived and/or modified sequence
MRGRFAHAQYSRCLRGPCLAEVAAGGGTRSAMAEGSGEVVAVSATGAANGLNNGAGGTSATTCNPLSRKLHKILETRLDNDKEMLEALKALSTFFVENSLRTRRNLRGDIERKSLAINEEFVSIFKEVKEELESISEDVQAMSNCCQDMTSRLQAAKEQTQDLIVKTTKLQSESQKLEIRAQVADAFLSKFQLTSDEMSLLRGTREGPITEDFFKALGRVKQIHNDVKVLLRTNQQTAGLEIMEQMALLQETAYERLYRWAQSECRTLTQESCDVSPVLTQAMEALQDRPVLYKYTLDEFGTARRSTVVRGFIDALTRGGPGGTPRPIEMHSHDPLRYVGDMLAWLHQATASEKEHLEALLKHVTTQGVEENIQEVVGHITEGVCRPLKVRIEQVIVAEPGAVLLYKISNLLKFYHHTISGIVGNSATALLTTIEEMHLLSKKIFFNSLSLHASKLMDKVELPPPDLGPSSALNQTLMLLREVLASHDSSVVPLDARQADFVQVLSCVLDPLLQMCTVSASNLGTADMATFMVNSLYMMKTTLALFEFTDRRLEMLQFQIEAHLDTLINEQASYVLTRVGLSYIYNTVQQHKPEQGSLANMPNLDSVTLKAAMVQFDRYLSAPDNLLIPQLNFLLSATVKEQIVKQSTELVCRAYGEVYAAVMNPINEYKDPENILHRSPQQVQTLLS

SEQ ID NO: 205597 - protein, 657 aa, Artificial Sequence
  derived and/or modified sequence
MAEGSGEVVAVSATGAANGLNNGAGGTSATTCNPLSRKLHKILETRLDNDKEMLEALKALSTFFVENSLRTRRNLRGDIERKSLAINEEFVSIFKEVKEELESISEDVQAMSNCCQDMTSRLQAAKEQTQDLIVKTTKLQSESQKLEIRAQVADAFLSKFQLTSDEMSLLRGTREGPITEDFFKALGRVKQIHNDVKVLLRTNQQTAGLEIMEQMALLQETAYERLYRWAQSECRTLTQESCDVSPVLTQAMEALQDRPVLYKYTLDEFGTARRSTVVRGFIDALTRGGPGGTPRPIEMHSHDPLRYVGDMLAWLHQATASEKEHLEALLKHVTTQGVEENIQEVVGHITEGVCRPLKVRIEQVIVAEPGAVLLYKISNLLKFYHHTISGIVGNSATALLTTIEEMHLLSKKIFFNSLSLHASKLMDKVELPPPDLGPSSALNQTLMLLREVLASHDSSVVPLDARQADFVQVLSCVLDPLLQMCTVSASNLGTADMATFMVNSLYMMKTTLALFEFTDRRLEMLQFQIEAHLDTLINEQASYVLTRVGLSYIYNTVQQHKPEQGSLANMPNLDSVTLKAAMVQFDRYLSAPDNLLIPQLNFLLSATVKEQIVKQSTELVCRAYGEVYAAVMNPINEYKDPENILHRSPQQVQTLLS

SEQ ID NO: 205598 - DNA, 2067 bp, Artificial Sequence
  derived and/or modified sequence
atgaggggtcgattcgcccacgcacaatacagtcgttgtctccggggaccttgtctagccgaggtggctgctgggggcggaacaaggtcagcaatggcggagggaagcggtgaggtcgtggcagtcagcgcgaccggcgccgccaatggactaaacaatggcgccgggggcacatccgctacaacttgcaacccattgagtagaaaattgcacaaaatcctggaaacccgtttggacaacgacaaagaaatgctcgaagcactgaaggccctgagcacctttttcgtcgaaaattccctgagaactaggaggaatctgcgaggagacattgaacgcaaatcgctggcgatcaacgaggagtttgtctccatttttaaagaagtgaaggaagagctcgagtcaatcagcgaagacgttcaggcgatgtccaactgctgtcaagatatgacctctcgcctgcaggctgctaaggagcaaacccaggatttaattgtgaaaacaaccaagctccaatcggagagtcagaagcttgagattcgagcgcaggtagctgatgcgtttctgagcaagttccagctcacgagtgacgaaatgagcctgttgagagggactagggagggccctattactgaggacttcttcaaggctctgggtagggttaaacagatacataacgacgttaaagtattactacggacaaaccagcagacagccggcctggagatcatggagcagatggctctgttgcaggaaaccgcctacgagagactgtataggtgggcccagagcgaatgccggacactgacccaggagagttgtgatgtctcgcctgtgctcacgcaagcaatggaggccctgcaggacagacctgtgctgtacaagtatactctggacgagttcggaaccgcgagacgctccacagtggttcgtgggtttattgatgctctcaccaggggtgggcctggcggcacacctagacctatcgagatgcatagtcacgacccactcaggtacgtgggggatatgctggcctggctacatcaagccactgcatctgagaaagagcacttggaggctctactgaagcatgtgacgacccaaggcgtggaggaaaacatccaggaggtcgttggccatatcaccgaaggggtttgccggccactgaaggttcgcattgagcaggttatcgttgccgagccaggcgctgtgctcttgtacaagatctcaaatctattaaagttctaccatcacacgatctctggcattgtcggcaacagcgccacggccttgctcaccacgatcgaggaaatgcacctgctcagtaagaagatcttttttaattcactttcactgcatgccagcaagttgatggacaaggtagaattgccgccccccgacctaggtccctcgtctgctctcaatcagactctaatgttactccgcgaggttctcgcttctcacgattctagcgtcgtgcccctggatgcacgtcaagccgacttcgtgcaggtcctctcctgtgtcctcgatcctctactgcaaatgtgcacggtgagcgcgtcaaaccttggaaccgcggacatggccaccttcatggtgaactcattatacatgatgaaaacgaccctagctctgttcgaattcaccgacagaagactcgagatgctccagtttcagatcgaggcacacctggacacactgattaacgaacaggccagttacgtgctaacccgcgtcgggctgtcgtacatatacaacaccgtgcagcagcacaaaccagagcaagggagcctcgccaacatgcccaacctggactccgttacccttaaggccgccatggtgcagttcgatagatacctgtccgcgccagacaacctcttgattcctcaactgaattttctgttgagcgccacagtaaaagaacagatcgtaaaacagagcactgaacttgtttgcagagcctacggagaggtatacgcagccgtcatgaacccgattaatgagtacaaagacccggagaacatccttcatcggtctccccaacaggtccagacattactcagctag

SEQ ID NO: 205599 - DNA, 1974 bp, Artificial Sequence
  derived and/or modified sequence
atggcagaaggctccggagaggtggttgcagtaagtgctacaggggccgccaacggccttaacaacggggctggcgggacctcagccacaacttgtaacccactgagccgaaagctccacaagatcttggagacacggctcgacaacgataaggagatgctggaagccctaaaagcactttctacgttcttcgtcgaaaactccttgaggacaagacggaacctccggggcgacatagagcgaaagagccttgccattaatgaagaattcgtgagcatctttaaggaagtaaaggaagaactggaaagtatcagtgaagatgtgcaggccatgtcaaattgttgccaagatatgacttcccggctgcaggccgcaaaggagcagacccaggacttgattgtgaagactaccaagttgcagtctgagtctcaaaagctggaaatcagagcccaagtcgccgacgctttcctctctaagttccaactcacatctgatgaaatgagcctgctgcggggcactcgggagggacccatcacggaggactttttcaaggcgctcggccgagttaaacagatccacaacgacgtgaaagttcttcttagaacaaaccaacagacggcgggacttgaaataatggaacagatggcgttacttcaggaaaccgcatatgagaggctatatcgctgggcccagtctgaatgcagaacactaactcaggagtcatgcgatgtgtccccggtcctcactcaagccatggaggcactgcaggaccgaccagttctgtataagtacacgcttgacgagttcggaactgctcgccgatctactgtggtgaggggattcattgatgcactgactcggggaggacccggcgggacgccgaggcctatcgagatgcacagccacgaccccctacggtacgtgggcgacatgcttgcctggctgcaccaggctaccgcatctgagaaggaacaccttgaggcactccttaagcacgttacgacgcaaggcgtcgaagagaatattcaagaggtggttggccatattaccgaaggcgtatgcaggccactcaaggttcggattgaacaggttatagtagcagagccgggagccgtgctcctctacaagatatctaacttactaaagttttaccaccacactatttctggaattgtgggcaattccgctacagccctcttaacgacgatagaggagatgcaccttctgagtaaaaagatcttcttcaattccctgtctttgcatgcctccaaactgatggacaaggtggagttaccgccccctgacttaggcccaagtagtgcattaaaccagacactgatgctgctgcgtgaagttctggcgtcccatgattcatcggtcgtccccctggatgctaggcaggcagattttgtgcaagtgctctcttgtgtcctcgacccactgctgcagatgtgtacagtttccgcctcaaacttgggaactgccgacatggctactttcatggtcaacagtctatatatgatgaagacaacactcgcgttatttgagttcaccgacagaaggttggaaatgttgcagttccaaatagaggctcatctggacacactgattaacgaacaggcctcctatgtgctcacccgagtaggactgtcatacatctataacaccgtccagcagcataaacccgagcagggatccttggctaacatgccaaatctcgacagcgtgaccctgaaagctgctatggttcagtttgatcgctacttatctgcacctgacaacctcctcataccccagctcaatttcttattgtcagccaccgtgaaagagcagattgtaaaacagtctacggagttggtgtgccgagcatacggggaagtgtacgctgctgtaatgaaccctatcaacgaatataaggatcctgaaaacatcctccatcgaagtcctcagcaagttcagaccttgctgtcctag

SEQ ID NO: 205600 - DNA, 2067 bp, Artificial Sequence
  derived and/or modified sequence
atgaggggccgctttgcccacgcccagtacagccgctgcctgcggggcccctgcctggccgaggtggccgccggcggcggcaccaggtctgccatggccgagggcagcggggaggtggtggccgtgtctgccactggagctgccaacggcctgaacaatggagctgggggcaccagcgccaccacctgcaaccccctgagcaggaagctgcacaagatcctggagacccggctggacaatgacaaggagatgctggaggccctgaaggccctgagcaccttctttgtggagaacagcctgcggaccaggaggaacctgcggggggacatcgagaggaagagcctggccatcaatgaggagtttgtgtccatcttcaaggaggtgaaggaggagctggagagcatcagtgaagatgtgcaggccatgagcaactgctgccaggacatgaccagccggctgcaggccgccaaggagcagacccaggacctgattgtgaagaccaccaagctgcagagcgagagccagaagctggagatccgggcccaggtggctgatgccttcctgagcaagttccagctgaccagtgatgagatgagcctgctgcggggcacccgggagggccccatcacagaggacttcttcaaggccctgggccgggtgaagcagatccacaatgatgtgaaggtgctgctgcggaccaaccagcagacagctggcctggagatcatggagcagatggccctgctgcaggagacagcctatgaaagactctaccgctgggcccagagcgagtgcaggaccctgacccaggagagctgtgatgtgtcccctgtgctgacccaggccatggaggccctgcaggacaggcctgtgctgtacaagtacaccctggatgaatttggaacagcccggcgcagcacagtggtgcggggcttcattgatgccctgacccggggcggccctgggggcaccccccggcccatcgagatgcacagccatgaccccctgcgctacgtgggggacatgctggcctggctgcaccaggccacagccagcgagaaggagcacctggaggccctgctgaagcacgtgaccacccagggcgtggaggagaacatccaggaggtggtgggccacatcacagaaggagtgtgccggcccctgaaggtgcgcatcgagcaggtgattgtggccgagcccggggctgtgctgctgtacaagatcagcaacctgctgaagttctaccaccacaccatcagcggcatcgtgggcaacagcgccacagccctgctgaccaccatcgaggagatgcacctgctgagcaagaagatcttcttcaacagcctgagcctgcacgccagcaagctgatggacaaggtggagctgcccccaccagacctgggccccagcagcgccctgaaccagaccctgatgctgctgcgggaggtgctggccagccatgacagctctgtggtgcccctggatgcccggcaggccgactttgtgcaggtgctgagctgtgtgctggaccccctgctgcagatgtgcaccgtgtctgccagcaacctgggcacagctgacatggccaccttcatggtgaacagcctgtacatgatgaagaccaccctggccctgtttgagttcacagaccggcggctggagatgctgcagttccagatcgaggcccacctggacaccctcatcaatgagcaggccagctatgtgctgaccagggtgggcctgagctacatctacaacacagtgcagcagcacaagccagagcagggcagcctggccaacatgcccaacctggacagcgtgaccctgaaggccgccatggtgcagtttgaccgctacctgagcgccccagacaacctgctgatcccccagctgaacttcctgctgagcgccaccgtgaaggagcagatcgtgaagcagagcacagagctggtgtgccgggcctatggagaggtgtatgctgctgtgatgaaccccatcaatgagtacaaggaccctgagaacatcctgcacaggagcccccagcaggtgcagaccctgctgtcctag

SEQ ID NO: 205601 - DNA, 1974 bp, Artificial Sequence
  derived and/or modified sequence
atggccgagggcagcggggaggtggtggccgtgtctgccaccggggccgccaacggcctgaacaacggggccggcggcaccagcgccaccacctgcaaccccctgagcaggaagctgcacaagatcctggagacccggctggacaatgacaaggagatgctggaggccctgaaggccctgagcaccttctttgtggagaacagcctgcggaccaggaggaacctgcggggggacattgaaaggaagagcctggccatcaatgaggagtttgtgtccatcttcaaggaggtgaaggaggagctggagagcatcagtgaagatgtgcaggccatgagcaactgctgccaggacatgaccagccggctgcaggccgccaaggagcagacccaggacctgattgtgaagaccaccaagctgcagagcgagagccagaagctggagatccgggcccaggtggctgatgccttcctgagcaagttccagctgaccagtgatgagatgagcctgctgcggggcacccgggagggccccatcacagaggacttcttcaaggccctgggccgggtgaagcagatccacaatgatgtgaaggtgctgctgcggaccaaccagcagacagctggcctggagatcatggagcagatggccctgctgcaggagacagcctatgagcggctgtaccgctgggcccagagtgaatgtaggaccctgacccaggagagctgtgatgtgtcccctgtgctgacccaggccatggaggccctgcaggacaggcctgtgctgtacaagtacaccctggatgaatttggaacagcccggcgcagcacagtggtgcggggcttcattgatgccctgacccggggcggccctgggggcaccccccggcccatcgagatgcacagccatgaccccctgcgctacgtgggggacatgctggcctggctgcaccaggccacagccagcgagaaggagcacctggaggccctgctgaagcacgtgaccacccagggcgtggaggagaacatccaggaggtggtgggccacatcacagagggcgtgtgccggcccctgaaggtgagaattgagcaggtgattgtggccgagcctggagctgtgctgctgtacaagatcagcaacctgctgaagttctaccaccacaccatctctggaattgtgggcaacagcgccacagccctgctgaccaccatcgaggagatgcacctgctgagcaagaagatcttcttcaacagcctgagcctgcacgccagcaagctgatggacaaggtggagctgcccccaccagacctgggccccagcagcgccctgaaccagaccctgatgctgctgcgggaggtgctggccagccatgacagctctgtggtgcccctggatgcccggcaggccgactttgtgcaggtgctgagctgtgtgctggaccccctgctgcagatgtgcaccgtgtctgccagcaacctgggcacagctgacatggccaccttcatggtgaacagcctgtacatgatgaagaccaccctggccctgtttgagttcacagaccggcggctggagatgctgcagttccagatcgaggcccacctggacaccctcatcaatgagcaggccagctatgtgctgaccagggtgggcctgagctacatctacaacacagtgcagcagcacaagccagagcagggcagcctggccaacatgcccaacctggacagcgtgaccctgaaggccgccatggtgcagtttgaccgctacctgagcgccccagacaacctgctgatcccccagctgaacttcctgctgagcgccaccgtgaaggagcagatcgtgaagcagagcacagagctggtgtgccgggcctacggggaggtgtatgctgctgtgatgaaccccatcaatgagtacaaggaccctgagaacatcctgcacaggagcccccagcaggtgcagaccctgctgtcctag

SEQ ID NO: 205602 - DNA, 2067 bp, Artificial Sequence
  derived and/or modified sequence
atgcggggccggttcgcccacgcccagtacagccggtgcctgcggggcccatgcctggctgaggtggccgcgggagggggaacacggagcgccatggccgaaggatctggcgaggttgtggctgtgtcagcaacgggcgccgccaacgggcttaacaacggcgccggaggaacctctgcgactacttgcaatcctctgtctaggaagctgcataagattttggagacccgactagataacgacaaggagatgttggaagcgcttaaggcactgagcacattttttgtggagaattcactgaggacaagaagaaatctcagaggcgacatcgagcgcaaatctttggccattaacgaggaatttgtgtcaatattcaaagaagtgaaggaggagctggaatcaatctctgaggacgtgcaggctatgtccaactgctgccaggatatgacatctagattgcaggccgcgaaggagcagactcaggatttaatcgtcaaaaccaccaaacttcagtcagaaagccagaagctcgaaatacgagcccaagtggccgacgcctttctgagtaaattccagctgacatctgatgagatgtcgttgttgcggggcactcgggagggaccgattaccgaagatttcttcaaggccctgggccgggtcaaacagattcacaatgacgtcaaggtgctgctcagaaccaaccagcaaaccgcaggcttagagatcatggagcagatggccctgctgcaagagactgcttatgaacggctttatcgttgggctcagtccgaatgccgcaccctcacacaggagtcatgcgacgtgagccccgtactgacccaggccatggaggccctgcaggaccggcctgtgctctataaatacaccctagatgagttcgggacagcgcgacggtctaccgtagtgcggggattcattgatgcccttacccgaggcggacctggtggcaccccccgacctatcgagatgcactctcatgatcccctcagatatgtgggcgatatgttagcctggctgcaccaggctaccgcgagcgaaaaagagcacctggaggccctgctcaaacacgtgactacccagggggtggaggagaacatccaggaagtggttggccatatcactgaaggggtgtgtagacctctcaaggtccgaattgaacaagtgatcgtggctgagccgggcgccgtgctgctgtacaagattagcaatctcttgaaattctaccatcacacgatctctggcatcgtgggaaactccgccaccgccctgctaacgaccattgaagaaatgcacttgctaagtaagaagatattctttaattccctcagccttcatgcctccaaactcatggacaaggttgaacttccacctcctgatcttggcccaagctctgctcttaatcagactcttatgttgctgcgcgaagtgctggcatctcatgacagttccgtcgtgcccctggatgccagacaggctgattttgtccaggtgctatcatgtgttctggacccgttattgcagatgtgtaccgtgtcagcttctaacctagggaccgcagacatggcgacattcatggtgaatagcctgtatatgatgaagaccacattggcgctcttcgaatttactgacaggcggctcgaaatgctccagtttcagattgaggcacacttagacactttaattaatgagcaggcttcctatgtcctcaccagagtcgggctgtcctatatttacaatacagtccaacagcacaaaccagagcaaggaagcctggccaacatgcctaatctcgactctgtgacccttaaggctgctatggtccaattcgatcggtatctgagcgccccagacaatttgctcattccacagctgaatttccttttatccgcaacagtgaaagagcagatcgtgaaacagtcaactgaacttgtctgcagagcatacggcgaggtgtatgctgccgttatgaatccaatcaacgaatataaggatccagagaacatcctgcaccggtccccgcaacaggtgcagaccctgctcagttag

SEQ ID NO: 205603 - DNA, 1974 bp, Artificial Sequence
  derived and/or modified sequence
atggccgagggcagcggcgaggtggtggccgtgagcgccaccggcgccgctaatggactcaacaatggagcaggcggtacgtctgccactacttgtaaccctctatctcgaaagttgcataagatcctggagaccagactggataatgataaggagatgctcgaggctcttaaagccttgtccacatttttcgttgaaaatagtttgcggaccagaagaaacctaagaggagatatcgaacgaaaaagcctggccattaatgaagaatttgtgtccatcttcaaggaagtgaaagaagaactggagtccatttctgaagatgtccaggcgatgtcaaattgttgtcaggatatgacatccaggctacaggctgctaaggagcagacacaggacctcatagtgaaaaccaccaaactccagtctgagtcacagaaactggagattcgtgcacaggtggccgacgctttcctaagcaaattccagctgacgtcagacgaaatgagcttgctgcgcggcaccagagaaggccctataacagaagatttttttaaagcactcggcagggtcaaacagattcacaacgacgttaaggtacttctgcgtaccaaccagcaaaccgccggactggaaattatggaacaaatggctctgctgcaagagacagcctatgagcgcctgtaccgctgggcgcaatctgagtgcagaaccctgacccaggagtcatgcgatgtgagccctgtgttgacccaggccatggaggctcttcaggatcgtccagtattgtataaatacaccctagacgaattcggcacggctcggcgcagcaccgtcgtccggggctttatcgatgcactgacacgagggggacctggagggacccctagacccattgagatgcactctcatgaccctctgaggtatgtaggggatatgctggcttggctgcatcaggctacagcctccgaaaaggaacatctcgaggcgctgctgaagcatgttaccactcagggtgtggaagagaacattcaagaggttgttggacacatcacagagggggtgtgtcgccccttgaaggtgcgcatcgaacaagtgatcgttgctgaaccgggggcagtgctcttgtacaagatcagcaatctgctcaagttctaccatcacacaatatcagggattgttggcaacagtgcaacggctctcctaaccactatagaggaaatgcacttgcttagcaagaaaatttttttcaatagtctgagtctgcacgcaagcaagcttatggacaaagtggagctacccccgccagacctgggaccatcaagcgccctgaatcagacactgatgctattaagggaggtgctggcgagtcacgatagcagtgtcgtccccctggacgcccgacaagcagattttgtgcaagtcctctcttgcgtgttagatccactactgcagatgtgcaccgtttcagcttcaaacttgggcactgctgacatggctacttttatggtgaattcactatatatgatgaagaccacattagctctttttgagtttactgataggcgcctcgagatgctgcagtttcagatcgaagcccatctggatacgcttatcaatgagcaggcaagctacgtccttacgagggtgggattgtcctacatttataatacggtgcagcagcacaaacccgaacagggtagcctagctaacatgcccaatttggactccgtgactctgaaggccgccatggtgcaatttgatcgctatctttctgctcccgacaacctgctcataccacagctgaatttcctgctgagcgctacggtaaaggagcagatcgttaagcagtctactgagctggtgtgccgagcatatggtgaagtttatgctgccgtgatgaatcccatcaacgaatacaaagacccggaaaacatactgcatcggagcccgcagcaggtgcaaaccttgctttcttag

SEQ ID NO: 205604 - DNA, 2067 bp, Artificial Sequence
  derived and/or modified sequence
atgcgtggcaggttcgcacatgcccagtactccagatgtctccgcggtccatgtctggccgaggtcgcagcaggcggaggcacgcgatccgctatggctgaaggatctggagaggtcgttgctgtcagcgccactggtgccgctaacgggctgaacaacggtgccggagggacaagtgccacaacttgtaaccctctctctaggaaactgcacaagatcttagaaacccgactggacaatgacaaagagatgttggaagcccttaaggcattgagtacattctttgtggaaaattctctcaggaccaggcgtaatctgcgtggcgatattgagcgcaagtctctcgccatcaatgaggaatttgttagcatattcaaagaagtgaaggaggagcttgagtccatttccgaggacgtgcaagccatgtccaactgttgtcaggacatgacctctcggctgcaggccgctaaagaacagactcaggacctgatagtgaaaactactaagctccagtccgagtctcagaagctggagatacgggcacaagtggcagatgccttcctgtccaaatttcaactaacctctgacgaaatgagcctcctgcgcggaactcgtgaaggaccgatcaccgaggactttttcaaagctcttgggagggtgaagcagatccataacgacgtcaaggttctgcttcgcacgaatcagcagactgccggtcttgagataatggaacaaatggctttgctgcaggaaacagcttacgaaagactctaccgctgggcgcaaagtgaatgtagaacgctgactcaggagtcctgtgacgtgtctccagtgttgacccaagctatggaggccctgcaggaccggcctgtcctgtacaagtatactctcgacgaattcgggaccgctcgacgttccacagtggtacgtggctttatcgatgccctcactagggggggacccggagggacaccacgccctatcgagatgcatagccatgacccactgcgctacgtcggggacatgttagcatggcttcaccaggcaactgccagtgaaaaggaacatcttgaggcactgcttaagcatgtgaccacacagggcgtggaagaaaatatccaggaggtggtgggacatattacagagggggtgtgccgcccactgaaggtgcgaatcgagcaggtcattgtcgccgagcctggagccgtgcttctctacaaaatttccaatctgctaaagttttaccaccataccatctcaggcattgtgggtaacagcgccacggccctgctcactaccatcgaggaaatgcatttactgtccaaaaagattttcttcaattctttgtccttacacgccagtaagctgatggataaagtcgaactacccccacccgacctgggccctagctctgcactgaaccagaccttgatgctccttcgtgaggttttagcctctcatgactcttcagtggttccactggatgccaggcaggcggactttgtgcaggttctgtcttgcgtcctcgatccattgttgcagatgtgcaccgtgagtgcctcaaatttgggtaccgctgatatggccacatttatggtgaactccctctacatgatgaagaccacccttgcgcttttcgagtttaccgaccggagattggaaatgcttcagttccagatcgaagctcacctcgacaccttgatcaatgagcaggcttcctacgttctgacccgtgttgggctctcttatatttacaacactgtgcagcagcacaaacctgagcagggtagtctggcaaacatgcccaacttggacagcgtgacacttaaggcagcaatggtccaattcgaccgatatctgtccgccccagataacctacttatccctcaactaaacttcctacttagcgcaacagtgaaggaacagattgttaagcagtcgactgaacttgtctgtcgggcatatggggaagtgtacgccgctgtgatgaatcccattaacgaatataaggaccctgagaatatcttgcacagatcgccgcaacaggtgcaaactctgctgagctag

SEQ ID NO: 205605 - DNA, 1974 bp, Artificial Sequence
  derived and/or modified sequence
atggctgagggcagcggggaggtggtcgctgtgtcagccactggcgcagctaacgggttgaataatggggcagggggaacctccgccaccacgtgcaatccactctcgcgaaagctccacaagattttggaaactaggctcgataatgataaggagatgctcgaggccctaaaagccttgagcaccttttttgttgagaactctcttcgaacacgtaggaacctaagaggcgatattgaaagaaaatcactcgcgatcaacgaggagttcgtatccatatttaaggaagttaaagaggaattagaatctatatccgaagacgtgcaggcaatgagcaattgctgtcaggacatgacaagcagactgcaggctgccaaggaacaaactcaggatctgattgtgaaaaccacaaaattgcaaagcgaatctcagaaacttgaaatcagggctcaagtggccgacgcctttctttccaaatttcagcttacttctgacgaaatgtctctgcttagggggactcgagaggggcctattacagaggacttttttaaagccctaggccgagttaagcagatccacaacgatgtcaaagtgctgctaagaacaaatcaacaaacggcagggttggaaataatggagcagatggcgctccttcaggaaacggcctacgaaagactatatcgatgggcccaatcggaatgtcggacactgacacaggagtcttgtgacgtgagtcccgtgcttacccaggcgatggaagctcttcaagacagacccgtgctgtacaaatacacgttagatgaattcggaacagcccgtaggagtaccgtcgttagagggtttattgatgctttaacaaggggcggaccaggtggaacaccacgacccatcgagatgcacagccacgatcctttacgctacgttggggacatgctagcgtggctgcaccaggcaaccgcgtccgagaaggaacacctggaagcactgttaaaacatgtgacaacccagggggttgaagagaacatacaggaggtagtcggccacatcaccgaaggggtgtgcaggccactgaaagtcagaatcgagcaggtgattgttgcagagcctggggcagtgctgctctacaaaatatctaacctcttgaaattctatcaccacacgatttccggtatcgtcgggaattcagcaaccgctctgctcactacgatcgaagagatgcacctgctctctaaaaagattttcttcaactcgctctctctccatgccagtaaactgatggacaaggtcgagctgccaccccctgacctgggtcccagttcagcactaaaccagactctcatgctgctgcgcgaggtcctagcctctcatgactcatccgttgtgcctcttgacgcgagacaggctgattttgttcaggtgctgtcttgtgtcctggacccactgctccagatgtgtactgtctccgcatcaaacctcgggaccgctgacatggcaacatttatggtgaactccttgtacatgatgaagactaccctggctttgttcgaatttactgaccggcgactcgaaatgctccagttccaaattgaagcccacctggatacactaatcaatgaacaggctagttatgttctgacacgtgttggcttgtcatatatctataatactgtgcaacaacataaacctgagcagggtagcctggccaacatgccaaatctggattcggtgactctaaaagcggcaatggtacaattcgaccgctacctctcagcccctgataatttgctgattccacaattgaatttccttctgtccgccactgttaaagagcagatcgtaaagcagagtacggagctggtgtgccgagcctacggcgaggtgtacgccgcagtgatgaaccctattaacgaatataaggatccagagaacatcctgcatagatccccacagcaggtgcagaccctattatcctag

SEQ ID NO: 205606 - DNA, 3609 bp, Artificial Sequence
  derived and/or modified sequence
gatgcgcatgcgcggccgatttgcacatgcgcaatactcgcgctgcctccgtggtccctgcctggctgaggtggcagcagggggcgggacgcgcagcgctatggcagagggcagcggggaagtggtcgcagtgtctgcgaccggggctgccaacggcctcaacaatggggcaggcgggacctcggcgacgacctgcaacccgctgtcgcgcaagctgcataagatcctggagacgcggctggacaacgacaaggagatgttagaagctctcaaggcactttcaaccttttttgttgaaaatagtctgcggactcgaagaaatttacgtggagatattgaacgtaaaagtttagccatcaatgaagaatttgtaagcattttcaaggaagtgaaggaggaacttgaaagcataagcgaagatgttcaagcaatgagcaactgttgtcaagatatgacaagtcgcctacaggcagcaaaggaacagactcaagatttaatagtaaaaaccactaagcttcaatctgaaagccaaaaattagagataagagctcaagttgcagatgccttcttatccaagttccaactgacttctgatgaaatgagtcttctccgaggtacaagagaaggacccattactgaggattttttcaaggcactgggaagagtaaaacagattcataatgatgtcaaagttctcttgcgtacaaatcaacaaacggcaggtttagaaattatggaacagatggccttacttcaagaaacggcttatgaaagactttaccgatgggctcaaagtgaatgcagaacattgacacaagaatcatgtgacgtatctccagtattgacacaggcaatggaagccctgcaggacagacctgtcttatataaatataccttagatgaatttggaacagccagaagaagtacagttgttcgtggatttattgatgcgctcacaagagggggccccggaggtacacctagaccaattgaaatgcattctcatgaccctttgaggtatgtaggagatatgttggcttggctccatcaagctactgcttctgaaaaggaacaccttgaagctctcttaaagcatgtaactacacaaggtgttgaagaaaatattcaagaagttgttgggcatatcactgaaggtgtgtgcaggcctctaaaggttcgaattgagcaagtaatagttgctgaacctggggcagttttattatataaaatttctaatctcctcaaattttatcaccatacaatcagtggtattgttggaaatagtgcaactgcattattgactaccattgaagaaatgcatttgctaagcaaaaaaatattcttcaatagcttgagtcttcatgcaagtaaattaatggacaaggttgaactcccaccacctgatcttggaccaagttctgcactaaatcagacactcatgttgctgcgtgaagttttagcatctcacgattcttcagttgtaccattagatgctcgtcaagctgattttgtgcaggttttatcatgtgtcttggatcctctcctacagatgtgtactgtatcagccagcaatttaggcacagctgacatggccactttcatggtcaattcactatatatgatgaagacaacattagctctatttgaattcactgacagacgtctggaaatgctacagtttcagatcgaagcacatttggacacacttataaatgagcaagcctcttatgttttaactagggtaggcttgagttacatctataacactgtacagcaacataaacctgaacagggctctttagctaatatgcccaacctagattctgtgacactgaaggctgcaatggttcagtttgatcgttatctgtcagccccagacaacctattgataccacagctgaactttcttctaagtgccacagtgaaagagcagatcgtaaaacaatctacagaattagtctgcagagcctatggtgaagtgtatgcagccgtgatgaatccaatcaatgaatacaaagatccagagaacattcttcaccgatcgccgcagcaagtgcagacgcttctttcctgattatcttatttcattgtgttagcaaaatatgacctccctaaaacactgaaggttattttttattctttgaatttttactctataatttgatagttacagttttctttgtatcataagattgtaagtcccgataatttttttttttttggtctcagtaacagggaagtaagtaacatgttgacctgagctagtattgctgtgtatctactctaaatgagatgatctatttttttgctagccatctctccagctctgcagttttcactgtattcaggaagcataaagtagtatgaaaggtttgaagaatttttttttacaagactagttctaaattaacagcttataaaaaatttgtctaaatttaataattagtataaggatatgacctaataaatgtctccttacctaaagattcatttgctttcttttaatatgagtaggcatacttagtagcttttctgaacctagcctatgtctctgtccccaaaatagctgcccttaaagagttgttagcagagagaaaaataacagtgaatgtgctcctggtgtatatggcagtgaatctcctttctgttctactttagcatactatatatatttgactgtgtacattcttatgcaattttaagtatacactcagcaataattagaaaaaaaggagagagaaaagtgatttaaacagggtggattccactctgtgggagccttcgatggaactcaaggtggagctcagcctttccaatgagctctaagcatgtagatagcctgagctgtgtctaagcctggtgtttaaagatgggtatttgtcatacaatatgggtcctaaatccaaccaactacacattttatctggtgttcaaaccaaagaaacaatgatctactcaaacattggagaaaaaaactgccagaggaggagttgccaattggcagtgtgtcttatctccatgttgtaactggactctgactttagaccattacctattaggaagattaaaaatgactgtatttttaaaggaataaatcccagtgtgcctgatttgacattcttgtcagcaaaaaaaaacttaatttctagtaaatctataaaaatgggtaagtccctaaattacaaatgagaaaattgaagcacaaggaaaaaaataactagtttgaaatattttgaaaagtaataacataaaactagtatttgtagaagattatgtgttgtatataacaaattagtatttatagaatatgacctatttatctgaagtttataattgtttatacctaatacagttctttttggagtaagaatgattatataatcgttatccatttgggtataaatctgtatttttagttttttccctttgattagtatgtgttacatataaagacagaaaataaagtataaatcaagagcttaaattgtatataatttatttctacagagaaagaagattgataccttgctatgagtgaattcctttgttttatagggaaaatttattgtgctttttacctggttttttcaaataaaatattaaaatatt

SEQ ID NO: 205607 - DNA, 3427 bp, Artificial Sequence
  derived and/or modified sequence
gtggtccctgcctggctgaggtggcagcagggggcgggacgcgcagcgctatggcagagggcagcggggaagtggtcgcagtgtctgcgaccggggctgccaacggcctcaacaatggggcaggcgggacctcggcgacgacctgcaacccgctgtcgcgcaagctgcataagatcctggagacgcggctggacaacgacaaggagatgttagaagctctcaaggcactttcaaccttttttgttgaaaatagtctgcggactcgaagaaatttacgtggagatattgaacgtaaaagtttagccatcaatgaagaatttgtaagcattttcaaggaagtgaaggaggaacttgaaagcataagcgaagatgttcaagcaatgagcaactgttgtcaagatatgacaagtcgcctacaggcagcaaaggaacagactcaagatttaatagtaaaaaccactaagcttcaatctgaaagccaaaaattagagataagagctcaagttgcagatgccttcttatccaagttccaactgacttctgatgaaatgagtcttctccgaggtacaagagaaggacccattactgaggattttttcaaggcactgggaagagtaaaacagattcataatgatgtcaaagttctcttgcgtacaaatcaacaaacggcaggtttagaaattatggaacagatggccttacttcaagaaacggcttatgaaagactttaccgatgggctcaaagtgaatgcagaacattgacacaagaatcatgtgacgtatctccagtattgacacaggcaatggaagccctgcaggacagacctgtcttatataaatataccttagatgaatttggaacagccagaagaagtacagttgttcgtggatttattgatgcgctcacaagagggggccccggaggtacacctagaccaattgaaatgcattctcatgaccctttgaggtatgtaggagatatgttggcttggctccatcaagctactgcttctgaaaaggaacaccttgaagctctcttaaagcatgtaactacacaaggtgttgaagaaaatattcaagaagttgttgggcatatcactgaaggtgtgtgcaggcctctaaaggttcgaattgagcaagtaatagttgctgaacctggggcagttttattatataaaatttctaatctcctcaaattttatcaccatacaatcagtggtattgttggaaatagtgcaactgcattattgactaccattgaagaaatgcatttgctaagcaaaaaaatattcttcaatagcttgagtcttcatgcaagtaaattaatggacaaggttgaactcccaccacctgatcttggaccaagttctgcactaaatcagacactcatgttgctgcgtgaagttttagcatctcacgattcttcagttgtaccattagatgctcgtcaagctgattttgtgcaggttttatcatgtgtcttggatcctctcctacagatgtgtactgtatcagccagcaatttaggcacagctgacatggccactttcatggtcaattcactatatatgatgaagacaacattagctctatttgaattcactgacagacgtctggaaatgctacagtttcagatcgaagcacatttggacacacttataaatgagcaagcctcttatgttttaactagggtaggcttgagttacatctataacactgtacagcaacataaacctgaacagggctctttagctaatatgcccaacctagattctgtgacactgaaggctgcaatggttcagtttgatcgttatctgtcagccccagacaacctattgataccacagctgaactttcttctaagtgccacagtgaaagagcagatcgtaaaacaatctacagaattagtctgcagagcctatggtgaagtgtatgcagccgtgatgaatccaatcaatgaatacaaagatccagagaacattcttcaccgatcgccgcagcaagtgcagacgcttctttcctgattatcttatttcattgtgttagcaaaatatgacctccctaaaacactgaaggttattttttattctttgaatttttactctataatttgatagttacagttttctttgtatcataagattgtaagtcccgataatttttttttttttggtctcagtaacagggaagtaagtaacatgttgacctgagctagtattgctgtgtatctactctaaatgagatgatctatttttttgctagccatctctccagctctgcagttttcactgtattcaggaagcataaagtagtatgaaaggtttgaagaatttttttttacaagactagttctaaattaacagcttataaaaaatttgtctaaatttaataattagtataaggatatgacctaataaatgtctccttacctaaagattcatttgctttcttttaatatgagtaggcatacttagtagcttttctgaacctagcctatgtctctgtccccaaaatagctgcccttaaagagttgttagcagagagaaaaataacagtgaatgtgctcctggtgtatatggcagtgaatctcctttctgttctactttagcatactatatatatttgactgtgtacattcttatgcaattttaagtatacactcagcaataattagaaaaaaaggagagagaaaagtgatttaaacagggtggattccactctgtgggagccttcgatggaactcaaggtggagctcagcctttccaatgagctctaagcatgtagatagcctgagctgtgtctaagcctggtgtttaaagatgggtatttgtcatacaatatgggtcctaaatccaaccaactacacattttatctggtgttcaaaccaaagaaacaatgatctactcaaacattggagaaaaaaactgccagaggaggagttgccaattggcagtgtgtcttatctccatgttgtaactggactctgactttagaccattacctattaggaagattaaaaatgactgtatttttaaaggaataaatcccagtgtgcctgatttgacattcttgtcagcaaaaaaaaacttaatttctagtaaatctataaaaatgggtaagtccctaaattacaaatgagaaaattgaagcacaaggaaaaaaataactagtttgaaatattttgaaaagtaataacataaaactagtatttgtagaagattatgtgttgtatataacaaattagtatttatagaatatgacctatttatctgaagtttataattgtttatacctaatacagttctttttggagtaagaatgattatataatcgttatccatttgggtataaatctgtatttttagttttttccctttgattagtatgtgttacatataaagacagaaaataaagtataaatcaaga

SEQ ID NO: 205608 - DNA, 2067 bp, Artificial Sequence
  derived and/or modified sequence
atgagaggcagattcgcccacgcccagtacagcagatgcctgagaggcccctgcctggccgaggtggccgccggcggcggcaccagaagcgccatggccgagggcagcggcgaggtggtggccgtgagcgccaccggcgccgccaacggcctgaacaacggcgccggcggcaccagcgccaccacctgcaaccccctgagcagaaagctgcacaagatcctggagaccagactggacaacgacaaggagatgctggaggccctgaaggccctgagcaccttcttcgtggagaacagcctgagaaccagaagaaacctgagaggcgacatcgagagaaagagcctggccatcaacgaggagttcgtgagcatcttcaaggaggtgaaggaggagctggagagcatcagcgaggacgtgcaggccatgagcaactgctgccaggacatgaccagcagactgcaggccgccaaggagcagacccaggacctgatcgtgaagaccaccaagctgcagagcgagagccagaagctggagatcagagcccaggtggccgacgccttcctgagcaagttccagctgaccagcgacgagatgagcctgctgagaggcaccagagagggccccatcaccgaggacttcttcaaggccctgggcagagtgaagcagatccacaacgacgtgaaggtgctgctgagaaccaaccagcagaccgccggcctggagatcatggagcagatggccctgctgcaggagaccgcctacgagagactgtacagatgggcccagagcgagtgcagaaccctgacccaggagagctgcgacgtgagccccgtgctgacccaggccatggaggccctgcaggacagacccgtgctgtacaagtacaccctggacgagttcggcaccgccagaagaagcaccgtggtgagaggcttcatcgacgccctgaccagaggcggccccggcggcacccccagacccatcgagatgcacagccacgaccccctgagatacgtgggcgacatgctggcctggctgcaccaggccaccgccagcgagaaggagcacctggaggccctgctgaagcacgtgaccacccagggcgtggaggagaacatccaggaggtggtgggccacatcaccgagggcgtgtgcagacccctgaaggtgagaatcgagcaggtgatcgtggccgagcccggcgccgtgctgctgtacaagatcagcaacctgctgaagttctaccaccacaccatcagcggcatcgtgggcaacagcgccaccgccctgctgaccaccatcgaggagatgcacctgctgagcaagaagatcttcttcaacagcctgagcctgcacgccagcaagctgatggacaaggtggagctgcccccccccgacctgggccccagcagcgccctgaaccagaccctgatgctgctgagagaggtgctggccagccacgacagcagcgtggtgcccctggacgccagacaggccgacttcgtgcaggtgctgagctgcgtgctggaccccctgctgcagatgtgcaccgtgagcgccagcaacctgggcaccgccgacatggccaccttcatggtgaacagcctgtacatgatgaagaccaccctggccctgttcgagttcaccgacagaagactggagatgctgcagttccagatcgaggcccacctggacaccctgatcaacgagcaggccagctacgtgctgaccagagtgggcctgagctacatctacaacaccgtgcagcagcacaagcccgagcagggcagcctggccaacatgcccaacctggacagcgtgaccctgaaggccgccatggtgcagttcgacagatacctgagcgcccccgacaacctgctgatcccccagctgaacttcctgctgagcgccaccgtgaaggagcagatcgtgaagcagagcaccgagctggtgtgcagagcctacggcgaggtgtacgccgccgtgatgaaccccatcaacgagtacaaggaccccgagaacatcctgcacagaagcccccagcaggtgcagaccctgctgagctag

SEQ ID NO: 205609 - DNA, 1974 bp, Artificial Sequence
  derived and/or modified sequence
atggccgagggcagcggcgaggtggtggccgtgagcgccaccggcgccgccaacggcctgaacaacggcgccggcggcaccagcgccaccacctgcaaccccctgagcagaaagctgcacaagatcctggagaccagactggacaacgacaaggagatgctggaggccctgaaggccctgagcaccttcttcgtggagaacagcctgagaaccagaagaaacctgagaggcgacatcgagagaaagagcctggccatcaacgaggagttcgtgagcatcttcaaggaggtgaaggaggagctggagagcatcagcgaggacgtgcaggccatgagcaactgctgccaggacatgaccagcagactgcaggccgccaaggagcagacccaggacctgatcgtgaagaccaccaagctgcagagcgagagccagaagctggagatcagagcccaggtggccgacgccttcctgagcaagttccagctgaccagcgacgagatgagcctgctgagaggcaccagagagggccccatcaccgaggacttcttcaaggccctgggcagagtgaagcagatccacaacgacgtgaaggtgctgctgagaaccaaccagcagaccgccggcctggagatcatggagcagatggccctgctgcaggagaccgcctacgagagactgtacagatgggcccagagcgagtgcagaaccctgacccaggagagctgcgacgtgagccccgtgctgacccaggccatggaggccctgcaggacagacccgtgctgtacaagtacaccctggacgagttcggcaccgccagaagaagcaccgtggtgagaggcttcatcgacgccctgaccagaggcggccccggcggcacccccagacccatcgagatgcacagccacgaccccctgagatacgtgggcgacatgctggcctggctgcaccaggccaccgccagcgagaaggagcacctggaggccctgctgaagcacgtgaccacccagggcgtggaggagaacatccaggaggtggtgggccacatcaccgagggcgtgtgcagacccctgaaggtgagaatcgagcaggtgatcgtggccgagcccggcgccgtgctgctgtacaagatcagcaacctgctgaagttctaccaccacaccatcagcggcatcgtgggcaacagcgccaccgccctgctgaccaccatcgaggagatgcacctgctgagcaagaagatcttcttcaacagcctgagcctgcacgccagcaagctgatggacaaggtggagctgcccccccccgacctgggccccagcagcgccctgaaccagaccctgatgctgctgagagaggtgctggccagccacgacagcagcgtggtgcccctggacgccagacaggccgacttcgtgcaggtgctgagctgcgtgctggaccccctgctgcagatgtgcaccgtgagcgccagcaacctgggcaccgccgacatggccaccttcatggtgaacagcctgtacatgatgaagaccaccctggccctgttcgagttcaccgacagaagactggagatgctgcagttccagatcgaggcccacctggacaccctgatcaacgagcaggccagctacgtgctgaccagagtgggcctgagctacatctacaacaccgtgcagcagcacaagcccgagcagggcagcctggccaacatgcccaacctggacagcgtgaccctgaaggccgccatggtgcagttcgacagatacctgagcgcccccgacaacctgctgatcccccagctgaacttcctgctgagcgccaccgtgaaggagcagatcgtgaagcagagcaccgagctggtgtgcagagcctacggcgaggtgtacgccgccgtgatgaaccccatcaacgagtacaaggaccccgagaacatcctgcacagaagcccccagcaggtgcagaccctgctgagctag

SEQ ID NO: 205610 - protein, 1215 aa, Artificial Sequence
  derived and/or modified sequence
MGAMAYPLLLCLLLAQLGLGAVGASRDPQGRPDSPRERTPKGKPHAQQPGRASASDSSAPWSRSTDGTILAQKLAEEVPMDVASYLYTGDSHQLKRANCSGRYELAGLPGKWPALASAHPSLHRALDTLTHATNFLNVMLQSNKSREQNLQDDLDWYQALVWSLLEGEPSISRAAITFSTDSLSAPAPQVFLQATREESRILLQDLSSSAPHLANATLETEWFHGLRRKWRPHLHRRGPNQGPRGLGHSWRRKDGLGGDKSHFKWSPPYLECENGSYKPGWLVTLSSAIYGLQPNLVPEFRGVMKVDINLQKVDIDQCSSDGWFSGTHKCHLNNSECMPIKGLGFVLGAYECICKAGFYHPGVLPVNNFRRRGPDQHISGSTKDVSEEAYVCLPCREGCPFCADDSPCFVQEDKYLRLAIISFQALCMLLDFVSMLVVYHFRKAKSIRASGLILLETILFGSLLLYFPVVILYFEPSTFRCILLRWARLLGFATVYGTVTLKLHRVLKVFLSRTAQRIPYMTGGRVMRMLAVILLVVFWFLIGWTSSVCQNLEKQISLIGQGKTSDHLIFNMCLIDRWDYMTAVAEFLFLLWGVYLCYAVRTVPSAFHEPRYMAVAVHNELIISAIFHTIRFVLASRLQSDWMLMLYFAHTHLTVTVTIGLLLIPKFSHSSNNPRDDIATEAYEDELDMGRSGSYLNSSINSAWSEHSLDPEDIRDELKKLYAQLEIYKRKKMITNNPHLQKKRCSKKGLGRSIMRRITEIPETVSRQCSKEDKEGADHGTAKGTALIRKNPPESSGNTGKSKEETLKNRVFSLKKSHSTYDHVRDQTEESSSLPTESQEEETTENSTLESLSGKKLTQKLKEDSEAESTESVPLVCKSASAHNLSSEKKTGHPRTSMLQKSLSVIASAKEKTLGLAGKTQTAGVEERTKSQKPLPKDKETNRNHSNSDNTETKDPAPQNSNPAEEPRKPQKSGIMKQQRVNPTTANSDLNPGTTQMKDNFDIGEVCPWEVYDLTPGPVPSESKVQKHVSIVASEMEKNPTFSLKEKSHHKPKAAEVCQQSNQKRIDKAEVCLWESQGQSILEDEKLLISKTPVLPERAKEENGGQPRAANVCAGQSEELPPKAVASKTENENLNQIGHQEKKTSSSEENVRGSYNSSNNFQQPLTSRAEVCPWEFETPAQPNAGRSVALPASSALSANKIAGPRKEEIWDSFKV

SEQ ID NO: 205611 - DNA, 3648 bp, Artificial Sequence
  derived and/or modified sequence
atgggcgccatggcctaccccctgctgctgtgcctgctgctggcccagctgggcctgggcgccgtgggcgccagcagagacccccagggcagacccgacagccccagagagagaacccccaagggcaagccccacgcccagcagcccggcagagccagcgccagcgacagcagcgccccctggagcagaagcaccgacggcaccatcctggcccagaagctggccgaggaggtgcccatggacgtggccagctacctgtacaccggcgacagccaccagctgaagagagccaactgcagcggcagatacgagctggccggcctgcccggcaagtggcccgccctggccagcgcccaccccagcctgcacagagccctggacaccctgacccacgccaccaacttcctgaacgtgatgctgcagagcaacaagagcagagagcagaacctgcaggacgacctggactggtaccaggccctggtgtggagcctgctggagggcgagcccagcatcagcagagccgccatcaccttcagcaccgacagcctgagcgcccccgccccccaggtgttcctgcaggccaccagagaggagagcagaatcctgctgcaggacctgagcagcagcgccccccacctggccaacgccaccctggagaccgagtggttccacggcctgagaagaaagtggagaccccacctgcacagaagaggccccaaccagggccccagaggcctgggccacagctggagaagaaaggacggcctgggcggcgacaagagccacttcaagtggagccccccctacctggagtgcgagaacggcagctacaagcccggctggctggtgaccctgagcagcgccatctacggcctgcagcccaacctggtgcccgagttcagaggcgtgatgaaggtggacatcaacctgcagaaggtggacatcgaccagtgcagcagcgacggctggttcagcggcacccacaagtgccacctgaacaacagcgagtgcatgcccatcaagggcctgggcttcgtgctgggcgcctacgagtgcatctgcaaggccggcttctaccaccccggcgtgctgcccgtgaacaacttcagaagaagaggccccgaccagcacatcagcggcagcaccaaggacgtgagcgaggaggcctacgtgtgcctgccctgcagagagggctgccccttctgcgccgacgacagcccctgcttcgtgcaggaggacaagtacctgagactggccatcatcagcttccaggccctgtgcatgctgctggacttcgtgagcatgctggtggtgtaccacttcagaaaggccaagagcatcagagccagcggcctgatcctgctggagaccatcctgttcggcagcctgctgctgtacttccccgtggtgatcctgtacttcgagcccagcaccttcagatgcatcctgctgagatgggccagactgctgggcttcgccaccgtgtacggcaccgtgaccctgaagctgcacagagtgctgaaggtgttcctgagcagaaccgcccagagaatcccctacatgaccggcggcagagtgatgagaatgctggccgtgatcctgctggtggtgttctggttcctgatcggctggaccagcagcgtgtgccagaacctggagaagcagatcagcctgatcggccagggcaagaccagcgaccacctgatcttcaacatgtgcctgatcgacagatgggactacatgaccgccgtggccgagttcctgttcctgctgtggggcgtgtacctgtgctacgccgtgagaaccgtgcccagcgccttccacgagcccagatacatggccgtggccgtgcacaacgagctgatcatcagcgccatcttccacaccatcagattcgtgctggccagcagactgcagagcgactggatgctgatgctgtacttcgcccacacccacctgaccgtgaccgtgaccatcggcctgctgctgatccccaagttcagccacagcagcaacaaccccagagacgacatcgccaccgaggcctacgaggacgagctggacatgggcagaagcggcagctacctgaacagcagcatcaacagcgcctggagcgagcacagcctggaccccgaggacatcagagacgagctgaagaagctgtacgcccagctggagatctacaagagaaagaagatgatcaccaacaacccccacctgcagaagaagagatgcagcaagaagggcctgggcagaagcatcatgagaagaatcaccgagatccccgagaccgtgagcagacagtgcagcaaggaggacaaggagggcgccgaccacggcaccgccaagggcaccgccctgatcagaaagaacccccccgagagcagcggcaacaccggcaagagcaaggaggagaccctgaagaacagagtgttcagcctgaagaagagccacagcacctacgaccacgtgagagaccagaccgaggagagcagcagcctgcccaccgagagccaggaggaggagaccaccgagaacagcaccctggagagcctgagcggcaagaagctgacccagaagctgaaggaggacagcgaggccgagagcaccgagagcgtgcccctggtgtgcaagagcgccagcgcccacaacctgagcagcgagaagaagaccggccaccccagaaccagcatgctgcagaagagcctgagcgtgatcgccagcgccaaggagaagaccctgggcctggccggcaagacccagaccgccggcgtggaggagagaaccaagagccagaagcccctgcccaaggacaaggagaccaacagaaaccacagcaacagcgacaacaccgagaccaaggaccccgccccccagaacagcaaccccgccgaggagcccagaaagccccagaagagcggcatcatgaagcagcagagagtgaaccccaccaccgccaacagcgacctgaaccccggcaccacccagatgaaggacaacttcgacatcggcgaggtgtgcccctgggaggtgtacgacctgacccccggccccgtgcccagcgagagcaaggtgcagaagcacgtgagcatcgtggccagcgagatggagaagaaccccaccttcagcctgaaggagaagagccaccacaagcccaaggccgccgaggtgtgccagcagagcaaccagaagagaatcgacaaggccgaggtgtgcctgtgggagagccagggccagagcatcctggaggacgagaagctgctgatcagcaagacccccgtgctgcccgagagagccaaggaggagaacggcggccagcccagagccgccaacgtgtgcgccggccagagcgaggagctgccccccaaggccgtggccagcaagaccgagaacgagaacctgaaccagatcggccaccaggagaagaagaccagcagcagcgaggagaacgtgagaggcagctacaacagcagcaacaacttccagcagcccctgaccagcagagccgaggtgtgcccctgggagttcgagacccccgcccagcccaacgccggcagaagcgtggccctgcccgccagcagcgccctgagcgccaacaagatcgccggccccagaaaggaggagatctgggacagcttcaaggtgtag

SEQ ID NO: 205612 - DNA, 6959 bp, Artificial Sequence
  derived and/or modified sequence
aatgagagcggcggtggcggcagccgggccgagagacggactcgggctgactccagccgctgggagcgcgaggccatgtaacccgctcggctccaggctgcgaggtgcgtaatccccagccggcccctcgcgcagcgggcacggccagcgctgccacaggtgacttgatttctgcgacggtagcttagccacccggggccaatctcgaaacattcttattttcaagtcctttggactgggtgccatctggagaagggggaagactcctcgaaaaagtctgactgttgagaaactgacgatccaaatttaaaaagtgattcccccccctcccgttccctcctcttctctctgggaggcagatgggagccatggcttaccccttactcctctgcctcctgcttgctcagctgggattgggagctgttggcgccagccgcgacccccaaggacggccggattcccctcgagagaggaccccgaaggggaagccgcacgcccagcagccgggtcgagcctctgcctcggactcctcggctccctggagccgctccaccgatggcaccatcttggcgcagaaactcgccgaggaggtgcccatggacgtggcctcttacctctacaccggggactcccaccagctgaagcgagccaactgctccggccgctacgagttggcgggcctgccggggaagtggccagccctggccagcgcgcacccctccttgcaccgggcgctggacacactgacacacgccaccaacttcctcaacgtgatgctgcagagcaataagtcgcgggagcagaacttgcaggacgacctggattggtaccaggcgctggtgtggagccttctggagggcgagcccagcatctcccgggcggccatcaccttcagcaccgattcgctgtccgcaccggccccacaggtcttcctccaggccacgcgcgaggagagccgcatcctgctccaagacctgtcctcctccgcaccccacctggccaacgccactctggagaccgagtggttccacggcctccggcgcaagtggaggccccacttacaccgccgcggccccaatcaggggccccggggcctgggccacagctggcggcgcaaggacgggctcggcggggacaagagccacttcaagtggtctccgccttatctggagtgcgagaacgggagttacaagcccgggtggctggttactctttcctctgccatctacgggttgcagcctaacctggtcccggaattcaggggtgtcatgaaagttgacataaatcttcagaaagtggacattgaccaatgctcaagtgatggctggttttcaggaactcataaatgccacctcaacaattcagagtgtatgccaattaaaggcctaggattcgttcttggagcctatgagtgcatttgcaaagcaggattctatcatcctggagtcttaccagtgaacaactttcggagaaggggtccggatcagcatatttcaggaagtacaaaagatgtgtcagaagaagcctatgtctgcctaccttgcagggagggctgccccttctgtgctgatgacagcccatgcttcgtccaggaagataagtatttacgacttgccatcatctccttccaagccctgtgtatgctgctcgacttcgttagcatgctggtggtctaccactttcgcaaagcaaagagcatccgggcatcgggccttatcctgttggaaacgatcctttttggatctctgctcctatactttccagttgttattttgtactttgagccaagcacatttcgctgtattctcctaagatgggctcgtcttctcggttttgctactgtttacggaactgtcactctcaaacttcacagggttttgaaggtgtttctttcacgaacggctcaacgaattccatatatgactggcggacgggtcatgaggatgctggcagtaatactcttggtagtgttttggtttctcattggctggacttcatctgtgtgccagaatttggagaaacagatttcacttattggccaggggaaaacatccgatcacctcatcttcaatatgtgcctcattgaccgctgggactacatgacagcagttgctgaatttttattcctcttgtggggtgtttatctctgctatgcagtgcggacagtcccatcggcattccatgagccccgctatatggctgttgcagttcacaatgagctcatcatctctgctatattccatacaattagatttgttcttgcctcaagacttcagtctgattggatgttgatgctgtattttgcacatactcatttgactgtgacagtcaccattgggttgcttttgattccaaagttttcacattcaagcaataacccacgagatgatattgctacagaagcatatgaggatgagctagacatgggccgatctggatcctacctgaacagcagtatcaattcagcctggagtgagcacagcttggatccagaggacattcgggacgagctgaaaaaactctatgcccaactggaaatatataaaagaaagaagatgatcacaaacaacccccacctccagaaaaagcggtgctcgaagaagggcctaggtcgttccatcatgagacgcattacggagatcccagagacagtcagccggcagtgctctaaagaggacaaggagggcgccgaccatggcacagccaaaggcactgccctcatcaggaagaaccccccagagtcttcagggaacacagggaaatccaaggaggagaccctgaaaaaccgagtcttctcactcaagaaatcccacagcacttatgaccacgtgagagaccaaacggaagagtccagtagcctacccacagaaagccaagaggaggagacaacagaaaattccacactggaatccctgtcgggtaaaaaactaacacaaaaactaaaagaagacagcgaggctgagtccacggagtcggtgccgttggtgtgcaagtcagcaagcgctcacaacctcagctcagagaagaaaactgggcacccacgaacatcgatgttacagaagtctctcagtgtcatagcaagcgccaaggagaagactcttggattagctgggaaaacccaaacagcaggtgtggaagaacgcactaaatcccagaaacctttgccaaaagataaagagacaaacagaaatcactcaaattctgataacacagagactaaagatcctgccccccaaaactcaaatcctgcggaggagccaagaaagcctcagaaatctgggattatgaaacaacaaagggtcaaccccaccactgccaattctgacctgaacccaggcaccacccagatgaaggacaactttgacattggggaggtgtgtccttgggaggtttatgacctgacccctggtcctgtgccttcagaatcaaaagttcaaaagcacgtatctattgtggcttctgaaatggagaaaaaccccactttttccttaaaggagaaatctcaccacaagcctaaggcagctgaggtttgtcagcaatccaatcagaagcgcatagataaggctgaagtatgcctttgggagagccaaggccagtccattttggaagatgagaagcttttgatttccaagactccagttctcccagagagggcaaaagaggagaacggaggtcagcctcgtgcagccaatgtgtgtgctgggcagagcgaagaactgccccccaaagctgtagcatcaaaaacagagaatgaaaatctcaaccaaataggacaccaggaaaaaaagacatcttcttctgaggagaatgtgcgtggctcctataactcaagtaataacttccagcaacctttaacatcacgagcagaggtttgtccttgggagtttgagaccccagctcaaccaaatgctggaagaagtgtagctttacctgcctcttctgctctaagtgcaaataagatagcagggcctaggaaagaagagatctgggatagttttaaagtgtagcatctccaggaagaagaggaaaaggagggaaccccggattggatatgagacagaagatataagaatcaaatattcccaaggaggatttgtcaatcaaggaaaacatgacagatggtgaggtaaagtcaaaggcatgggtagaagaggaccaggggggcaagagcaacaacgtcataatggagaagtcagactttggtcaagaaagtccttcccttggtaacactaggaaaatctttccatttcagcatgtttaaggaaaatagcccacaatgtctgccctgatcaatatgtatccatgggactttgaagatcctaagccaggtaaaccaggagacacagaagacgtaccagatttgcaaagaaagaaaaggtataagacatatataactgaaattctaagtagctgaccgagaagaacttactttacctatttaaccttgatagcactgctaacttaatgcatcccaaaaatatcttttatattaatgattgctctcattttcttataaatgtatgtttcagtatatcgttgtgtctcatattcaagcattccagattgtataatttttgcaaataactttggtattatgtgacacaacacatttatgcaatctgcagctattcaattgttattgcaccttacagaatacctgctatctatcaactttagttgattcttgaagtacagtaagctttctctggcttgggaagccataactgttactataaaaacttttagttttggctgtggtttatatattgtgactttgaatttgactctattatttcacatcatggtttgttatactgtcttaatcagggttttttatacaagttgagttacttgttttgcacttcttgttaggactcagaagctttattaatattggagatcaagtggtcctacttagtcatatgtctcaataagttaaggacaacttatccgttgtttattcaaagtcagagatagataacgccttcattccaattaattgtcccttttaactctttcagtatttcctacttagcagcatttccaaaggaagaagctaagagtgagaaaaatataccgtgcattattattactattggaaagggaagactctagggatgacataagaattatagcagtactataaacccaggaagtttgcctttcaaaaaaaaacacaggtagctcctgatagcactttcaagggattatttttttaaagagaaaaattatggtagcatcaagatcattgtatggatatatttttattatgtgtactgaaaatacagtattttaaaataccttaaagtatttattctcataaactcttattcattgcttcagctacaggtagaacttgctgggctcaaatcccaaagaggttttataaccttatttattcaaaacctataaggtggtatggaatcttcattctcccaagcactggaaaatgtctaagtcctgcaaattgccattgtgagccacttgctcgacatgtaacatgtaaggtccatttgcaaagcaaagcagcccccaaagcatattttataaagcttattgcattccacactgatctcttggcatgggaatcctaagctgccgactaagccctaccgacatgatcatgcagtgagattccaaagctcagtctcatttcatttaaagaagaatcactcagaaatagaaccgagacttccctttttctccctgtaaacacccaagtatcaactgcttatttggccaggacactcccagcacaaataactattttttatgtcacaagcagcaaggaggacatgctagggtgataaaagatggagaaacaggatcagagggtggatatagggctgttcttagagagtattttcagtggaaggtaaaaacagaattctccatattcatcatcaaatttttctcagtgatttttttattcaggagtaagcaagcacttcactgtttcacaaagctgtgcgcaaatcttcctcacccatttgctgactttatgcattactcaggttggtggggtcggtttgagaagatatagaaattctatttttgtgtctttacaccatttatttcttttatctcttccttttcaatgaaggcctatatgcttggtgacctcctttaaggaatctttgtgaactgggttggaagttcctagacccacatatttgtttcatttatgtctgaaatctgttagcacttgattcctttcttgagaattatgcagtcaagcatcagtgactttctattgcacttcaggattgatcctgctagagatgtgagttaaaaagacttgccaaattatatcttagcgacattctatagttcatagattattctccaccagcataaatcagtgagagtgcctagagtctttctgagagtttcattgccattatcaacaagagaagttgaaatttacaagtcaggaggttatttttccagattgataaccatagaaagtgaataaacacttttaaggtcgcaaacatttgctaggttgtccttctcaatgcatgtgcaggctgcatcctgtccttgtttttaagccagggtttataaataagtagatttataccaatcttaatagaattgtatattttatgcaagaattaaatgctttacaacatgaagtataactcaacccattgtaaactttggtggcaatatggatttgaaactcgacagttctcttgtatttgcttcctaggtttctgcatgcaagttatgacaggtaggactgaaaaaacactgccttttgacttctagcatttagcaaccgagagtcgtagagtcaataaagctgtaagtgtcttcacttaatctgtggttctcctaaaactattatctgaaacctacagcatcccaccatgaaatatttggtaaatttatgttgtgacgtgttgcagcatgtaaataattataacttctctgcaataaaacatatttatatg

SEQ ID NO: 205613 - DNA, 3648 bp, Artificial Sequence
  derived and/or modified sequence
atgggcgccatggcttaccctttgctgttatgcctgttattggcccagttgggcctgggcgctgtgggggcatctagggaccctcagggaagacccgattccccccgagagcgcacgcctaaaggtaagccacacgcccagcagccgggcagggctagtgctagcgattcttccgccccctggtcccggtccacggacggcacaattctggcccagaaacttgccgaagaggttcccatggacgtcgccagttatctctataccggcgactcgcaccagttaaaacgtgcgaactgctcaggccggtatgagctggccggcttacctggaaaatggccagcgttggcctccgctcatccaagcttacacagagcactcgacacgctcacgcacgcgacaaattttctaaacgtgatgttgcagtcaaacaagtctagggagcagaacctccaggacgatctggattggtatcaggctcttgtgtggtctttgttggagggtgaaccatcaatctcacgagccgccattaccttttccacggactcactgagcgctccagcgcctcaagtttttttgcaggctactcgcgaagagtcaagaattctcctgcaagatttaagttcaagcgctccgcacctggcaaatgccacactggagacagaatggtttcacgggctacggcgcaaatggagaccacatctccatcgccggggccccaaccagggccctcgcgggctcggtcactcctggcggcgaaaagacggtctgggtggggacaagagccacttcaaatggtctcccccatacctggaatgtgaaaacggttcctacaaaccaggttggctggttactttaagcagtgccatctatggacttcagcctaaccttgtccctgagttcaggggcgtcatgaaggtggacattaacctacagaaggtggacatcgatcagtgctcctctgacggctggttttccggtacacacaagtgccatctaaataatagcgaatgcatgcccatcaagggcctgggttttgtcctcggtgcctatgagtgcatttgtaaggctggtttttaccaccccggcgttctgccagtgaataactttagacgccggggccccgaccaacatatctcaggtagcaccaaagatgtcagcgaagaggcatacgtctgcctgccctgtcgggagggctgtccgttctgtgcggatgactcaccctgtttcgtccaggaagacaagtatctccgcttagctatcatcagcttccaagcgctctgcatgcttctcgatttcgtctcaatgctggtggtttaccattttagaaaggctaagagcataagagctagtggactgatcctcttggaaactattttattcggcagcctcctgctctattttcctgttgtaatattgtactttgagccttcaacctttcggtgtatcttgctgagatgggctcggctactgggctttgccactgtgtatggtactgtgaccctgaagcttcatcgagtgttgaaggtatttctgagcagaactgctcagagaattccatatatgacaggcgggcgcgtcatgcgaatgctagccgttattttgctagtagttttttggtttctgataggttggacctcctctgtgtgccagaacctggagaaacagatcagtctgatcgggcagggaaagaccagcgaccatctgatctttaatatgtgcctgattgatcgttgggattacatgactgccgtcgctgaattcctgttcctcttgtggggtgtgtacttatgctacgccgtgaggactgtgccatccgcatttcatgagcctaggtatatggctgtggctgtccacaatgagcttattatcagcgccatcttccatacaattcggttcgtgctggccagcaggctgcagagcgattggatgctcatgctctattttgctcacacccacctaaccgtgaccgttacaattggtctcctgttaatccctaagttcagccattctagcaacaaccctagagatgacatcgcgaccgaggcttacgaagacgagcttgacatgggaagatcagggtcgtacctgaactccagcataaatagcgcgtggagcgaacacagccttgacccagaagatattcgggatgagttgaagaaactttacgctcagctcgaaatctacaagcgtaagaagatgatcaccaacaatcctcacctacagaagaagagatgctccaagaaggggctcggacggtcgatcatgagaagaataaccgagatcccagaaaccgtgtccagacaatgctccaaagaggacaaggagggagcagaccatggaaccgcaaagggtacagctctcatacgaaaaaacccccccgaatcctctggcaataccggcaaaagcaaggaagagaccctgaagaacagagtttttagcctgaagaaatcacactcgacctacgaccacgtgagagaccaaacagaggagagttcctcactgcccaccgagagtcaggaagaggaaacaactgaaaattcaacactggagtccctgagcgggaaaaagcttacgcagaagctgaaggaagacagcgaagcagaaagcaccgagagcgtcccccttgtatgtaaaagtgcctcggcacacaacctctcctccgagaagaagaccggtcacccccgtacatcaatgcttcaaaagtccctgagtgtgatcgccagtgccaaggaaaaaacactgggcctggccggcaagactcaaacagccggcgtggaagagcgcaccaagtcccagaagcccttacctaaggacaaggagacgaataggaaccattcaaattccgacaacaccgaaaccaaggatcccgccccgcagaactctaatcctgctgaagagcctcgaaagcctcagaaatccggcattatgaaacagcagcgcgtgaaccccactacagcaaactcggacttgaaccccggcacgacccagatgaaagacaatttcgacatcggggaggtgtgtccttgggaagtctacgatctgacacctggacccgtgcccagcgaatccaaggtgcagaaacatgtgtcaatcgtcgccagcgaaatggagaaaaaccccaccttctctctgaaggagaagtcccaccataaacctaaggctgcggaagtttgccaacaatcaaaccagaagagaatcgataaggccgaggtctgcttgtgggaaagtcagggccaatctatactggaagatgagaaacttctgattagtaaaacgcccgtcttaccagaacgcgcgaaggaagagaatggcgggcaaccacgagccgccaatgtatgcgctggacagagcgaagagctccctccgaaggccgtggcgtcaaagacagagaacgaaaaccttaaccagatagggcaccaagaaaaaaagacctcttcttccgaggaaaacgtgcgcggttcgtacaattccagcaataatttccagcagccactgaccagccgtgcggaggtgtgcccatgggagtttgagactccagctcagccaaacgctggacggtctgtggcactgccagcatctagtgcccttagtgctaacaaaattgctggaccgcgcaaggaagaaatttgggattcgtttaaagtgtag

SEQ ID NO: 205614 - DNA, 3648 bp, Artificial Sequence
  derived and/or modified sequence
atgggcgccatggcctaccccctgctgctgtgcctgctgctggcccagctgggcctgggcgctgtgggcgccagccgggacccccagggccgcccagacagcccccgggagaggacccccaagggcaagccccacgcccagcagcccggccgggccagcgccagtgacagcagcgccccctggagccgcagcacagatggcaccatcctggcccagaagctggccgaggaggtgcccatggatgtggccagctacctgtacaccggggacagccaccagctgaagagggccaactgcagcggccgctatgagctggccggcctgcccgggaagtggccagccctggccagcgcccaccccagcctgcaccgggccctggacaccctgacccacgccaccaacttcctgaatgtgatgctgcagagcaacaagagccgggagcagaacctgcaggatgacctggactggtaccaggccctggtgtggagcctgctggagggggagcccagcatcagccgggccgccatcaccttcagcacagacagcctgagcgccccagccccccaggtgttcctgcaggccacccgggaggagagccgcatcctgctgcaggacctgagcagcagcgccccccacctggccaatgccaccctggagacagagtggttccacggcctgcggaggaagtggaggccccacctgcaccggcggggccccaaccagggcccccggggcctgggccacagctggaggaggaaggatggcctgggcggggacaagagccacttcaagtggagccccccctacctggagtgtgaaaatggcagctacaagccaggctggctggtgaccctgagcagcgccatctacggcctgcagcccaacctggtgcctgagttccggggcgtgatgaaggtggacatcaacctgcagaaggtggacatcgaccagtgcagcagtgatggctggttcagcggcacccacaagtgccacctgaacaacagcgagtgcatgcccatcaagggcctgggctttgtgctgggcgcctatgagtgcatctgcaaggccggcttctaccaccctggggtgctgcctgtgaacaacttcagaagaagaggccctgaccagcacatcagcggcagcaccaaggatgtgtctgaggaggcctacgtgtgcctgccctgccgggagggctgccccttctgtgctgatgacagcccctgctttgtgcaggaggacaagtacctgcggctggccatcatctccttccaggccctgtgcatgctgctggactttgtgtccatgctggtggtgtaccacttcaggaaggccaagagcatccgggccagcggcctcatcctgctggagaccatcctgtttggcagcctgctgctgtacttccctgtggtgatcctgtactttgagcccagcaccttccgctgcatcctgctgcgctgggcccggctgctgggctttgccaccgtgtatggcaccgtgaccctgaagctgcaccgggtgctgaaggtgttcctgagcaggacagcccagaggatcccctacatgactggaggccgggtgatgaggatgctggccgtcatcctgctggtggtgttctggttcctgattggctggaccagctctgtgtgccagaacctggagaagcagatcagcctgattggccagggcaagaccagtgaccacctgatcttcaacatgtgcctgattgaccgctgggactacatgacagctgtggccgagttcctgttcctgctgtggggcgtgtacctgtgctatgctgtgaggacagtgcccagcgccttccacgagccccgctacatggctgtggccgtgcacaatgaactcatcatcagcgccatcttccacaccatccgctttgtgctggccagccggctgcagagcgactggatgctgatgctgtactttgcccacacccacctgactgtgacagtgaccatcggcctgctgctgatccccaagttcagccacagcagcaacaaccccagagatgacatcgccacagaggcctatgaagatgagctggacatgggccgcagcggcagctacctgaacagcagcatcaacagcgcctggagcgagcacagcctggaccctgaggacatcagagatgagctgaagaagctgtatgcccagctggagatctacaagaggaagaagatgatcaccaacaacccccacctgcagaagaagcgctgcagcaagaagggcctgggccgcagcatcatgaggcgcatcacagagatccctgagaccgtgtcccggcagtgcagcaaggaggacaaggagggcgctgaccatggaacagccaagggcacagccctgatcaggaagaaccccccagagagcagcggcaacacaggcaagagcaaggaggagaccctgaagaacagagtcttcagcctgaagaagagccacagcacctatgaccacgtgcgggaccagacagaggagagcagcagcctgcccacagagagccaggaggaggagaccacagagaacagcaccctggagagcctgagcggcaagaagctgacccagaagctgaaggaggacagcgaggccgagagcacagagagcgtgcccctggtgtgcaagagcgccagcgcccacaacctgagcagcgagaagaagacaggccaccccaggacctccatgctgcagaagagcctgagcgtcatcgccagcgccaaggagaagaccctgggcctggccggcaagacccagacagctggggtggaggagaggaccaagagccagaagcccctgcccaaggacaaggagaccaacagaaaccacagcaacagcgacaacacagagaccaaggaccctgccccccagaacagcaacccagctgaggagcccaggaagccccagaagagcggcatcatgaagcagcagagggtgaaccccaccacagccaacagcgacctgaaccctggcaccacccagatgaaggacaactttgatattggagaggtgtgcccctgggaggtgtatgacctgaccccaggccctgtgcccagcgagagcaaggtgcagaagcacgtgtccatcgtggccagcgagatggagaagaaccccaccttcagcctgaaggagaagagccaccacaagcccaaggctgctgaggtgtgccagcagagcaaccagaagagaattgacaaggccgaggtgtgcctgtgggagagccagggccagagcatcctggaggatgagaagctgctgatcagcaagacccctgtgctgcctgagcgggccaaggaggagaatggaggccagcccagggctgccaacgtgtgtgccggccagagcgaggagctgccccccaaggctgtggccagcaagacagaaaatgaaaacctgaaccagatcggccaccaggagaagaagaccagcagcagtgaagaaaatgtgcggggcagctacaacagcagcaacaacttccagcagcccctgaccagcagagctgaggtgtgcccctgggagtttgagaccccagcccagcccaatgccggccgctctgtggccctgcctgccagcagcgccctgagcgccaacaagattgctggccccaggaaggaggagatctgggacagcttcaaggtgtag

SEQ ID NO: 205615 - DNA, 3648 bp, Artificial Sequence
  derived and/or modified sequence
atgggcgccatggcctaccccctgctgctgtgcctgctgctggcccagcttggcctgggagcagtcggagcctcaagagatccccaaggccgcccggatagtcctcgagaacggacaccaaaaggaaagccccatgcacagcagcctggaagagcaagtgcctctgactcctctgctccttggtccaggtccactgatggaacaatcctggctcaaaaacttgcggaagaagtgccgatggacgttgcctcctatctgtacactggagactcacaccagctgaaacgcgcgaactgttccggccgctacgagttggccgggctccccggaaagtggcctgcactggcttctgcccacccgtccctgcacagagctttggacaccctgacccacgctaccaatttcctgaatgtcatgctccagtccaataaatcccgggagcagaatctacaggatgatttggattggtatcaggccctcgtctggagtctgttggagggagaaccaagcatttctagagcagctattacgtttagcaccgactcactgtcggctcctgcccctcaggtctttctccaagccacacgcgaggaatcacggattctcctccaagacctgagctctagtgctccacacctagccaatgcgacacttgagacagagtggtttcatggtctgaggcggaaatggaggccacatttgcatcgcaggggccctaatcagggacctagaggacttggccattcttggagaaggaaggatggccttggaggcgataaatctcacttcaagtggagccctccttatttagagtgcgagaacggatcttacaagcctggctggttggtaaccctatccagcgcaatctatggcctgcaacccaacctggtccccgagttccgaggtgttatgaaagttgacattaatcttcaaaaggtggatatcgatcaatgctctagtgacggttggttctcgggcactcataagtgccacctcaacaacagcgagtgcatgcctattaaggggctcggatttgtgctaggggcatacgagtgcatctgcaaggctggattttatcatccaggggttttgcctgtgaacaacttcaggaggagaggccccgatcaacatatatccgggtcaactaaagatgtgagtgaagaggcatacgtctgcttaccctgtagagagggctgcccattctgcgccgacgattcaccttgcttcgtacaggaggacaagtacctgcgactggccatcatttctttccaagccctgtgcatgctgctggattttgtgagcatgttagtagtgtaccacttcagaaaagcgaagtctatcagagccagtggactcattctgctggagactattctgtttgggagtctcctgctctactttccggtcgtgattttgtactttgaaccgtccactttccgctgcatcttactacggtgggcgagacttcttggatttgctacagtgtatggcacagtgacgctgaaactacaccgcgttctcaaagttttcctgtctcgtactgctcagcgcattccttatatgacgggaggacgcgtcatgcggatgctcgccgttatcttgctagtggtgttctggtttctcatagggtggaccagctcagtctgccagaatctggagaagcaaatcagcttgatcggacaaggcaagacctcggaccacctgattttcaatatgtgccttatcgacaggtgggattacatgacagccgttgctgaattcctattcctgttgtggggcgtctacctgtgctatgcagtgcggaccgtgccaagcgcatttcacgaacctagatacatggctgttgcagtgcataacgagctgatcatcagcgccattttccacaccattcgttttgttctggcctccagactgcagagcgattggatgctaatgctatacttcgcccacacacacctcactgtgacagtcacgatcggactgttgctcatccccaagttttcccactcatcaaataatccaagggatgatatcgcaactgaggcctatgaggacgagcttgatatgggccgcagtgggtcatacctgaactccagtatcaatagtgcctggagcgaacactccttggacccagaagatatcagggacgagcttaagaaactgtacgctcagctggagatctacaagcggaaaaaaatgattaccaacaatccacacctacaaaagaaaagatgcagcaaaaagggattagggaggagcatcatgaggaggatcaccgagatacccgaaacagtcagtcggcagtgttccaaggaagataaagaaggagccgaccacgggaccgctaaaggcacagccctaattcgcaaaaacccaccggaatcctccggtaacactgggaagagcaaggaagaaaccttaaagaatagggtgttctctttgaaaaagtcacacagcacatatgaccatgtcagagaccagactgaagagtcatcctcccttcctacagagagccaagaagaggaaacgacggagaattccactctggagtccctgagcggaaaaaagttgactcagaaacttaaggaggattctgaggcagaatcaacggaatcagtgccattggtctgtaagagcgcaagcgcacataacttgagtagtgaaaagaaaacaggtcacccccggacgtctatgcttcaaaaatccctgagtgtgattgctagcgctaaggagaaaaccttaggtctggctggtaaaacccagaccgctggggtcgaggagcggactaagagtcagaaacctctgccaaaggacaaggaaaccaatagaaatcactcgaactccgacaacacggagacgaaagaccccgctccccaaaatagcaatccagccgaggagcccagaaaacctcagaaaagcggtatcatgaaacaacagcgggtgaatcccactaccgcgaatagtgatctgaaccccggcaccacacagatgaaagataatttcgacattggcgaagtatgcccatgggaggtgtatgatctcaccccaggcccagtaccttccgagagcaaggtccagaaacacgtgagcattgtggcatctgagatggagaagaatccaaccttttctctcaaagaaaaatctcatcacaagcccaaggctgccgaggtgtgccagcagagcaatcagaaacgaattgacaaagcagaggtgtgcctgtgggagtcacagggacagagtattctcgaagatgaaaagctgctcatttcaaagacccctgtactacccgagcgagcaaaggaggaaaatggtggccagccaagagcggcaaatgtttgcgccggacagtctgaagaactaccacccaaggcagtggcctctaaaacagagaacgaaaacttgaaccaaatcggacaccaagagaaaaagacaagcagttccgaggagaacgtgaggggaagctataatagcagcaataattttcaacagccgctgaccagtagggccgaggtctgcccatgggagttcgagacccctgcccaacccaacgcaggtcggagcgtcgccctgcccgcctcctccgctctgagcgctaataaaattgcagggcccaggaaggaagaaatctgggattcttttaaggtgtag

SEQ ID NO: 205616 - DNA, 3648 bp, Artificial Sequence
  derived and/or modified sequence
atgggggctatggcatatcctcttctcctctgtctccttctggcacagctgggactcggcgcagtgggggcttcccgggatccccaggggcgtccggactcccccagagaacggacacctaagggcaaaccccatgctcagcagcccggtcgcgctagtgcctccgatagctccgccccttggtcccgcagtacagacgggactattctcgcccagaagcttgccgaagaggtccccatggacgttgctagctacctctacaccggagacagtcaccaactcaaaagggccaactgttcaggccgatacgagctcgccggtctccctggcaaatggccagccttagcctccgcgcaccccagcctccaccgcgcactcgacaccctgactcacgcgactaattttctcaatgttatgctgcaaagcaacaagagtagagagcagaacctgcaggatgaccttgactggtaccaagccctcgtgtggagtctgctggagggagagcctagcatcagtagagcagccatcacattctccacggactcgctaagcgcaccagctcctcaggtgtttttacaagcaacacgggaggaatctcggatcctgcttcaggatttgagcagttccgcgccacatctggccaatgctacgttggaaaccgagtggtttcatgggcttaggcgcaaatggcgccctcatctccaccggagaggccctaatcagggcccaagaggtctgggacattcctggcgtcggaaggacggacttggcggagacaaaagccattttaaatggagccctccatatctggagtgtgaaaatggcagctacaagcctgggtggctggtgactttaagctccgctatttatggcttgcagcccaacctcgtgcccgaattcagaggtgtgatgaaggtggacataaatctccaaaaggttgatattgatcaatgttcctcagacggctggttttctggtactcataaatgtcacctcaacaattctgagtgtatgcccatcaaggggctggggtttgtgctgggcgcttatgagtgcatttgtaaggccggattttatcatccaggagtgcttccggtgaacaatttcagaagacgaggtcccgaccagcacatctcgggttcaacaaaggacgtctctgaagaggcctatgtgtgtctgccttgcagggaggggtgccccttctgtgctgatgattccccctgttttgtgcaagaggacaagtatctgagactcgcaataatttcatttcaggccctgtgcatgctcctagatttcgtgagcatgctcgtggtctatcactttcgaaaggctaagtcaattcgagcatctgggctaatcttgctggagacaatcctgtttggcagcctgttgctgtactttccggtggtgatactttactttgaaccctccactttccgctgtatcctgcttagatgggcgagactgcttggattcgcaactgtttacggaactgtaaccctaaaactccatcgggtcctcaaagtctttctgtcacggacagcacaacgaattccttacatgactgggggtcgggttatgcgaatgttggccgttatcctgttggtggtgttctggttccttatcgggtggacatctagcgtatgccagaacctcgagaagcagatttcgttaataggtcagggaaaaacctctgaccatctcatcttcaacatgtgcctcatcgaccggtgggactatatgaccgcggttgccgagtttctttttctgctgtggggagtgtatctgtgttacgcagtgcgaacagtaccgagcgcctttcacgagccgcgatacatggccgtggctgtccataacgaattaattattagcgccatcttccatacaattcgtttcgtgctggcctcaaggctccaatcagactggatgctcatgttatattttgctcatacacatctgaccgtgacggtgacaattggactgttactgattcccaagttcagccacagcagcaataatccacgggacgacattgcaacggaggcctacgaagacgagcttgacatgggtcgttcaggttcatatcttaacagctcaatcaactctgcatggtcggaacactccttagaccccgaggatatcagggacgaactgaaaaagctgtacgcccagctcgagatttataaacgaaagaagatgattactaacaaccctcatctgcagaagaaacgatgtagcaagaagggcctgggaagatcaataatgaggcggatcaccgagatcccagagacagtgtcacgtcaatgttctaaggaagacaaggagggagctgaccatgggaccgctaagggaacggcgctgataaggaagaatcctccagagagcagcggaaacaccggaaagtccaaagaggagacacttaagaatcgggtgttcagtctgaaaaagtcccactcaacgtatgatcacgtgcgggatcagaccgaagaatcaagctccctccctaccgagagccaagaggaggaaacaacagaaaattccactctcgaatcattaagcgggaaaaaactgactcagaagctgaaagaagactctgaggccgagtcaacggagtccgtcccactcgtgtgtaaaagcgccagcgcacataacctctcctctgagaagaaaactggccacccacggacgtcaatgctacaaaagagtttgtctgttatcgcatctgctaaagagaaaacacttggactggccggaaagactcagaccgccggagtggaggaacggactaaatcccagaagccattaccaaaggataaggagactaatagaaaccattcaaactccgataacactgagaccaaggaccctgcccctcaaaattccaatcctgctgaagagcccaggaagccccagaagagcggaatcatgaagcagcagagggtcaaccctactaccgccaatagcgatttgaatccgggtaccacacagatgaaagacaacttcgacatcggcgaggtgtgcccttgggaagtctacgatctgacgccgggaccggtgcctagtgagagcaaggtgcagaaacacgtgagcatcgtggcctctgagatggagaaaaatcctaccttcagtttgaaagaaaagtctcaccacaaaccaaaggctgcagaggtgtgccagcagagcaaccagaagcggatcgacaaggctgaggtgtgtttatgggaatcccagggccaatccatcttggaagatgaaaaactgctcatctccaagacacccgttctgcctgagcgcgcaaaagaggaaaatggcggacagcccagggctgctaacgtgtgcgctggacagtctgaggagctacctcccaaagccgtcgcaagcaagacagaaaatgagaatctgaaccagatcggtcatcaggagaagaaaacaagttcttccgaggagaacgtgcggggatcatacaactcctcaaataactttcagcagccgctgaccagtcgcgcagaagtatgcccttgggagttcgaaacacctgctcagcccaacgccggtcgttccgtggcattacccgcttcctccgcgctgtccgccaacaagatagctggtccacgcaaagaggagatttgggactcttttaaggtgtag

SEQ ID NO: 205617 - protein, 1444 aa, Artificial Sequence
  derived and/or modified sequence
MKNKGAKQKLKRKGAASAFGCDLTEYLESSGQDVPYVLKSCAEFIETHGIVDGIYRLSGVTSNIQRLRQEFGSDQCPDLTREVYLQDIHCVGSLCKLYFRELPNPLLTYELYEKFTEAVSHCPEEGQLARIQNVIQELPPSHYRTLEYLIRHLAHIASFSSKTNMHARNLALVWAPNLLRSKEIEATGCNGDAAFLAVRVQQVVIEFILNHVDQIFNNGAPGSLENDENRPIMKSLTLPALSLPMKLVSLEEAQARSLATNHPARKERRENSLPEIVPPMGTLFHTVLELPDNKRKLSSKSKKWKSIFNLGRSGSDSKSKLSRNGSVFVRGQRLSVEKATIRPAKSMDSLCSVPVEGKETKGNFNRTVTTGGFFIPATKMHSTGTGSSCDLTKQEGEWGQEGMPPGAEGGFDVSSDRSHLQGAQARPPPEQLKVFRPVEDPESEQTAPKMLGMFYTSNDSPSKSVFTSSLFQMEPSPRNQRKALNISEPFAVSVPLRVSAVISTNSTPCRTPPKELQSLSSLEEFSFHGSESGGWPEEEKPLGAETSAASVPKKAGLEDAKAVPEAPGTVECSKGLSQEPGAHLEEKKTPESSLSSQHLNELEKRPNPEKVVEEGREAGEMESSTLQESPRARAEAVLLHEMDEDDLANALIWPEIQQELKIIESEEELSSLPPPALKTSPIQPILESSLGPFIPSEPPGSLPCGSFPAPVSTPLEVWTRDPANQSTQGASTAASREKPEPEQGLHPDLASLAPLEIVPFEKASPQATVEVGGPGNLSPPLPPAPPPPTPLEESTPVLLSKGGPEREDSSRKLRTDLYIDQLKSQDSPEISSLCQGEEATPRHSDKQNSKNAASEGKGCGFPSPTREVEIVSQEEEDVTHSVQEPSDCDEDDTVTDIAQHGLEMVEPWEEPQWVTSPLHSPTLKDAHKAQVQGLQGHQLEKRLSHRPSLRQSHSLDSKPTVKSQWTLEVPSSSSCANLETERNSDPLQPQAPRREITGWDEKALRSFREFSGLKGAEAPPNQKGPSGVQPNPAETSPISLAEGKELGTHLGHSSPQIRQGGVPGPESSKESSPSVQDSTSPGEHPAKLQLKSTECGPPKGKNRPSSLNLDPAIPIADLFWFENVASFSSPGMQVSEPGDPKVTWMTSSYCKADPWRVYSQDPQDLDIVAHALTGRRNSAPVSVSAVRTSFMVKMCQARAVPVIPPKIQYTQIPQPLPSQSSGENGVQPLERSQEGPSSTSGTTQKPAKDDSPSSLESSKEEKPKQDPGAIKSSPVDATAPCMCEGPTLSPEPGSSNLLSTQDAVVQCRKRMSETEPSGDNLLSSKLERPSGGSKPFHRSRPGRPQSLILFSPPFPIMDHLPPSSTVTDSKVLLSPIRSPTQTVSPGLLCGELAENTWVTPEGVTLRNKMTIPKNGQRLETSTSCFYQPQRRSVILDGRSGRQIE

SEQ ID NO: 205618 - protein, 1099 aa, Artificial Sequence
  derived and/or modified sequence
MKNKGAKQKLKRKGAASAFGCDLTEYLESSGQDVPYVLKSCAEFIETHGIVDGIYRLSGVTSNIQRLRQEFGSDQCPDLTREVYLQDIHCVGSLCKLYFRELPNPLLTYELYEKFTEAVSHCPEEGQLARIQNVIQELPPSHYRTLEYLIRHLAHIASFSSKTNMHARNLALVWAPNLLRSKEIEATGCNGDAAFLAVRVQQVVIEFILNHVDQIFNNGAPGSLENDENRPIMKSLTLPALSLPMKLVSLEEAQARSLATNHPARKERRENSLPEIVPPMGTLFHTVLELPDNKRKLSSKSKKWKSIFNLGRSGSDSKSKLSRNGSVFVRGQRLSVEKATIRPAKSMDSLCSVPVEGKETKGNFNRTVTTGGFFIPATKMHSTGTGSSCDLTKQEGEWGQEGMPPGAEGGFDVSSDRSHLQGAQARPPPEQLKVFRPVEDPESEQTAPKMLGMFYTSNDSPSKSVFTSSLFQMEPSPRNQRKALNISEPFAVSVPLRVSAVISTNSTPCRTPPKELQSLSSLEEFSFHGSESGGWPEEEKPLGAETSAASVPKKAGLEDAKAVPEAPGTVECSKGLSQEPGAHLEEKKTPESSLSSQHLNELEKRPNPEKVVEEGREAGEMESSTLQESPRARAEAVLLHEMDEDDLANALIWPEIQQELKIIESEEELSSLPPPALKTSPIQPILESSLGPFIPSEPPGSLPCGSFPAPVSTPLEVWTRDPANQSTQGASTAASREKPEPEQGLHPDLASLAPLEIVPFEKASPQATVEVGGPGNLSPPLPPAPPPPTPLEESTPVLLSKGGPEREDSSRKLRTDLYIDQLKSQDSPEISSLCQGEEATPRHSDKQNSKNAASEGKGCGFPSPTREVEIVSQEEEDVTHSVQEPSDCDEDDTVTDIAQHGLEMVEPWEEPQWVTSPLHSPTLKDAHKAQVQGLQGHQLEKRLSHRPSLRQSHSLDSKPTVKSQWTLEVPSSSSCANLETERNSDPLQPQAPRREITGWDEKALRSFREFSGLKGAEAPPNQKGPSGVQPNPAQPVGPLRNLPKMILPPPWKAQRKKNQSKIPEPLSPHQWMPLHPACARDLPFLQNQARLTCSPPRMQ

SEQ ID NO: 205619 - DNA, 4335 bp, Artificial Sequence
  derived and/or modified sequence
atgaagaataagggggctaagcagaagctgaagagaaagggggcagcttccgcgttcggctgcgatctgaccgagtacttagaaagttcaggtcaggacgttccctatgtcttaaagagctgcgcagagtttattgagacacatggaattgtggacggaatctaccggctgagtggagtgaccagtaatatccaaagacttaggcaggaattcggaagtgaccagtgccccgatctgaccagagaggtatacttacaggacattcactgcgtgggctccctgtgcaagctctatttccgcgaactgcccaaccctctgctgacgtacgaactctacgagaagttcacggaagctgtctctcactgccctgaggagggacagttggcgcgcatacagaatgtgattcaggagttaccacctagtcattaccggacgcttgaatacctgatcaggcaccttgcacatattgcaagtttttcaagcaaaacaaatatgcacgccaggaatttagcactcgtctgggcccccaatctacttaggtctaaagagatagaggctaccgggtgcaatggagatgcagcctttcttgccgttagagtccagcaggtggtaatcgaatttatccttaatcacgtggaccaaatttttaacaatggcgctccggggagtctggagaatgacgaaaataggccaattatgaaatcccttacactgcccgccctgtccttgcccatgaaattagtctctctggaagaagcccaggcccggtccctggccaccaatcatcctgcacgcaaggagaggagagagaactcactgccagaaatcgtcccccctatgggcacgctcttccacaccgtgctcgagctgcccgacaataagagaaagctgagctcgaaaagcaagaagtggaaaagcattttcaatttaggccgctccggaagcgatagcaaatccaaactgagccggaacggctccgtgttcgtgaggggtcagcgcctgagcgtggaaaaagcgacaatacgccctgcaaaatccatggatagtctctgctctgttcccgtggagggcaaggagactaaagggaatttcaatcgtaccgtgaccacaggggggtttttcattccagcgaccaaaatgcactccactgggaccggcagctcttgtgatctgactaaacaggagggtgaatgggggcaggagggcatgccacccggagccgagggaggctttgacgtgtcctccgaccgatcccacctgcagggtgctcaggcgcggccccctcctgagcagctcaaagtattccgacccgttgaggatccagaatccgagcagactgccccaaaaatgttgggaatgttttacacctctaatgatagcccatctaaaagtgtcttcacgagcagcctctttcaaatggaacccagtcctcggaaccagcggaaggcacttaacatatcagaaccttttgctgtgtcggtgcccttgcgggtcagcgcggttatctctacgaacagtacaccttgcagaactcctcccaaagaactgcagtcactgagctccctggaggagtttagctttcacggatcagaatctggcggctggcctgaggaggaaaagccactgggcgccgagacgagcgcagcctccgtgcccaagaaagccgggctggaggatgccaaggcagtgcccgaagctccaggcacggtggagtgcagtaaggggctctcccaggagcctggagcgcatcttgaagagaaaaagacccccgaaagtagtttaagctcgcagcacctgaatgagctggaaaaaagacctaaccccgagaaagtggtggaggaaggcagagaagccggagagatggaaagttccactctccaggagtcccctagagcgcgcgccgaagctgtgctgttgcacgaaatggacgaggacgatctggccaatgctctgatttggccggagatccaacaggagctaaagattattgaatctgaagaagagctcagttcacttccaccgcccgccctgaagacatcccccatccagccaatccttgagtccagtctgggcccatttattcctagcgagccccctggcagcctgccatgcgggtcattccctgccccagtgagtacccccctcgaggtgtggacacgggatcctgccaatcaatccactcagggagcatcaactgccgcctctcgcgagaaacccgaacccgagcagggccttcacccagacctggctagtttggcccctctagaaatcgtgccattcgaaaaggcaagtccccaggccacagtggaggtagggggtcctggtaacttatcaccacctctcccccccgccccaccacctcctaccccacttgaagaatccacccctgtgctgctgagtaaaggaggaccagaaagggaagactcgagccgcaagcttagaaccgacctttacatcgaccaactcaagtcccaggattctccagagatttcctccttgtgtcagggcgaagaagcaaccccgcgacacagtgacaaacaaaacagcaagaatgccgcttccgaggggaagggatgtggtttcccttccccgacccgcgaggtggaaatcgtgtcccaagaggaggaagatgtgacgcattccgtacaggagccatcagactgcgatgaggatgacacagtgacggatatcgcccaacatggactggaaatggtggagccctgggaggaaccacaatgggtaacgagccctctgcacagtcccacattgaaagacgcccataaagcccaggttcagggactccaagggcaccaactagagaaacggctgagccaccggcctagcctccgccagtctcattccctggacagcaagcctacagttaaatcccaatggaccctcgaagtgccttcatctagcagttgcgctaacctcgaaaccgaaagaaattccgaccccctgcaacctcaagcaccaagacgggaaatcactgggtgggacgaaaaagctctgaggagttttagagaattcagtgggctgaagggggccgaggcgccaccaaaccagaaaggacctagtggagtccagcctaatccagcagagaccagccccatctccttagccgaggggaaggagctcgggacgcatctcggccacagttctccgcagatcaggcaagggggagtcccagggcccgagagcagtaaggagtccagcccctcagtccaggattccaccagtccgggggagcacccagccaagctgcaattaaaaagtaccgaatgtggaccccctaaagggaagaaccggccctcttctctcaatctggaccctgctattccaatcgcagacttattttggtttgaaaatgtagcctctttcagcagtcccggcatgcaggtgtcagagccaggtgacccaaaagtgacctggatgacctccagctattgtaaggcagacccgtggagggtctatagccaggacccacaggatcttgatatcgtggcgcacgccctgacgggaagaaggaactcggcaccagtgtcagtttccgcagtgagaacgagtttcatggtgaagatgtgccaggcccgcgcagtaccagtcattcccccgaaaattcagtatacccagatcccccagccactgccttctcagagctccggagagaacggcgtgcagcctttggaacgttctcaggaaggtccaagctctacatccggcacgactcagaagcccgccaaagatgattccccgtcatctctcgagagctccaaggaagaaaaacccaaacaggacccaggcgccatcaaatccagcccagtagacgctaccgccccctgcatgtgtgaggggccgaccctctccccggagcctggttcttctaacctgctgagcacccaagacgctgtggtccagtgtcgcaagaggatgtccgagacagagcctagcggagacaatctcttgagctcaaagctggaacgcccatccggaggaagtaagccgttccataggagccgccccggacgacctcagtcactgatcctcttttcacccccatttcctataatggaccatcttccacccagcagcacggtgacagattctaaagtgctgctcagcccaatcagatctccgacacagaccgtgtcccctggtctgttgtgcggcgagctcgctgagaatacttgggtaactccagaaggcgtcaccctgcgtaataaaatgacaattcctaaaaatggccagagactggagacatcaaccagttgtttctaccagcctcagcggcggtcagtgatcctcgatgggcgctccggtaggcaaatcgaatag

SEQ ID NO: 205620 - DNA, 3300 bp, Artificial Sequence
  derived and/or modified sequence
atgaaaaacaaaggagccaaacagaaacttaaacgaaagggggcagcctcggcctttggctgtgatctgaccgagtatcttgaaagttccgggcaggatgtcccctacgttctcaagtcctgtgccgagtttatcgaaacgcacggcattgtcgatggaatttaccgcttgtccggagtcacgagtaacatacagaggctacgacaggagttcggatcggatcagtgcccagatttgacaagggaggtgtacctacaggacattcactgcgtaggcagcctgtgtaagctatacttcagggagctgccaaacccgctcctcacttacgaactgtacgagaagttcaccgaggccgtctcacactgcccagaagagggtcagctggcacggatacaaaatgtgattcaggagttgcctccctcacactaccgaaccctagagtatctaatacgacacttggcacacattgcaagctttagctcgaaaacaaatatgcatgctaggaacctggccctggtgtgggccccaaaccttttaagaagcaaagaaattgaagccacaggatgtaatggcgatgccgcatttctcgccgtgagggtccaacaagtggttattgaattcatcttgaatcacgtggatcagattttcaacaacggtgcccccggctcattagagaatgatgaaaatcgtcctatcatgaaatccctcacactcccggctttatctctgcctatgaagctggttagcctggaggaggcccaggctagaagtctggctaccaaccaccctgccaggaaggaaagacgagaaaactccctgccagaaattgtgccgcccatgggcactttgttccataccgtcctggaactccctgataataaaagaaaactctcatcgaagtcaaaaaagtggaagtcaatttttaatctaggtcgttcaggcagcgatagcaagtcgaagctaagcaggaatgggagtgtattcgtcagggggcagagactgagcgttgagaaagctacaatccggcccgccaagtcgatggactctctctgctctgtgcccgtcgaggggaaggaaacgaaggggaattttaacaggaccgtgaccacagggggtttctttatccctgcaacaaaaatgcattccaccggaaccgggagctcatgcgacctgacgaaacaagagggcgaatggggccaggaaggaatgccgcccggcgctgagggaggattcgatgtgagctcagacaggtcccacttgcagggcgcccaagcccgccccccgccggagcagcttaaggtgtttagacccgtagaagatccagagagtgaacagacggcacccaagatgctgggcatgttttatacttctaatgactccccatcaaaatccgtctttacttcctcactctttcaaatggagcctagtcctaggaaccagcgaaaagcgttgaacattagtgagccatttgctgtgtcagtgccgctgcgggtttcagcagtgatatccactaactccactccgtgccgtacaccccccaaggaattgcaatctctctcctccttagaggaatttagtttccacggaagtgaaagcggcgggtggccggaggaagagaagccactgggggctgagaccagtgccgccagcgttccaaaaaaggccggcctggaggacgcaaaagctgtgcccgaggctccagggaccgtcgaatgctctaaggggctttctcaagagccgggtgcccacctggaagagaaaaagacccctgagtcatcactcagctcacagcaccttaacgagttagaaaaacgccctaatccagaaaaagtggtcgaggaaggaagagaggcaggggaaatggagagtagcacactccaggagagccccagggcaagggccgaggctgtgctgcttcatgaaatggatgaagacgacctggccaacgccctgatctggcctgagattcagcaggaactaaagatcatagagtctgaagaggagctctctagtctaccaccacctgctctgaagacctcacccatccagccaatactggagagcagtcttggcccattcattccatctgagccacccggttccctgccttgcgggtcttttcctgccccggtatcaacgcccctggaggtttggacgagagacccggcgaatcagagcacccagggcgcgagcacagcagccagtagggagaaacccgaaccagagcaggggctccaccccgacttagcctctttggctccgctggagattgtgccattcgagaaggcctcccctcaggccaccgttgaggtcggtggtcctgggaacctctcgcccccgctccccccagctccaccacctcctacccccctggaggagagtacccccgtactgctgagtaagggcggccccgagcgggaagatagtagccggaagctgcgcaccgacctctatattgatcagcttaaaagccaggactccccggaaatttcttctctctgtcagggggaagaagctactcccaggcattccgataaacagaattctaagaatgccgctagcgaggggaagggctgcggattcccgagccctacgcgggaggtcgaaattgtgtcccaagaagaagaagatgtgacacattccgtccaggaacctagcgactgcgatgaagatgacacagttaccgacatcgcacaacatggacttgaaatggtcgagccctgggaagagccccaatgggtcaccagtccactgcacagccctaccctaaaggatgctcataaagcccaggtgcaggggttgcagggacatcagcttgagaaaagactttctcacaggcccagtctgaggcagagtcacagccttgattcaaagccgacagttaagtcccagtggacgttggaggtccccagcagttcctcctgcgccaacttggagacagaacggaacagtgaccctctgcagccccaagctccgagaagagagattactggatgggatgaaaaagcattgagaagtttcagggagttttccgggctcaagggggcagaggcccccccaaaccagaagggacctagcggggtccagcctaatcccgctcagcccgtaggcccattacgaaatctgcccaagatgatcctccccccgccatggaaggcccagagaaaaaaaaaccagtccaagattcctgagcctttgtcaccacaccagtggatgccgctccaccccgcttgtgctagagatctgccgttcttacagaatcaggcaaggctgacatgctcccccccccggatgcagtag

SEQ ID NO: 205621 - DNA, 4335 bp, Artificial Sequence
  derived and/or modified sequence
atgaagaacaagggggccaagcagaagctgaagaggaaaggagctgccagcgccttcggctgtgacctgacagagtacctggagagcagcggccaggatgtgccctacgtgctgaagagctgtgccgagttcatcgagacccacggcatcgtggatggcatctaccgcctgagcggcgtgaccagcaacatccagaggctgcggcaggagtttggaagtgaccagtgcccagacctgacccgggaggtgtacctgcaggacatccactgtgtgggcagcctgtgcaagctgtacttccgggagctgcccaaccccctgctgacctatgagctgtatgagaagttcacagaggccgtgagccactgcccagaggagggccagctggcccgcatccagaatgtcatccaggagctgccccccagccactaccgcaccctggagtacctgatccgccacctggcccacatcgccagcttcagcagcaagaccaacatgcacgccaggaacctggccctggtgtgggcccccaacctgctgcggagcaaggagattgaggccaccggctgcaatggagatgctgccttcctggccgtgcgggtgcagcaggtggtgattgagttcatcctgaaccacgtggaccagatcttcaacaacggggcccctggcagcctggagaatgatgagaaccggcccatcatgaagagcctgaccctgcctgccctgagcctgcccatgaagctggtgtccctggaggaggcccaggcccggagcctggccaccaaccacccagccaggaaggagcggcgggagaacagcctgcctgagatcgtgccccccatgggcaccctcttccacacagtgctggagctgcctgacaacaagaggaagctgagcagcaagagcaagaagtggaagagcatcttcaacctgggccgcagcggcagtgacagcaagagcaagctgagcagaaatggatctgtgtttgtgcggggccagaggctgtctgtggagaaggccaccatccggcctgccaagtccatggacagcctgtgcagcgtgcctgtggagggcaaggagaccaagggcaacttcaacagaacagtgaccaccggcggcttcttcatcccagccaccaagatgcacagcactggaacaggcagcagctgtgacctgaccaagcaggagggggagtggggccaggagggcatgcctcctggagctgagggcggctttgatgtgtccagtgacaggagccacctgcagggcgcccaggcccggcccccacctgagcagctgaaggtgttccggcctgtggaggaccctgagagcgagcagacagcccccaagatgctgggcatgttctacaccagcaatgacagccccagcaagagcgtcttcaccagcagcctcttccagatggagcccagccccaggaaccagaggaaggccctgaacatcagcgagccctttgctgtgtctgtgcccctgcgggtgtctgctgtgatcagcaccaacagcaccccctgcaggaccccacccaaggagctgcagagcctgagcagcctggaggagttctccttccacggcagcgagagcggcggctggccagaggaggagaagcccctgggcgctgagaccagcgctgcctctgtgcccaagaaggccggcctggaggatgccaaggctgtgcctgaggcccctggcaccgtggagtgcagcaagggcctgagccaggagcccggggcccacctggaggagaagaagaccccagagagcagcctgagcagccagcacctgaatgagctggagaagaggcccaaccctgagaaggtggtggaggagggccgggaggccggggagatggagagcagcaccctgcaggagagcccccgggcccgggcagaggccgtgctgctgcacgagatggatgaagatgacctggccaatgccctgatctggccagagatccagcaggagctgaagatcattgaaagtgaggaggagctgagcagcctgcccccaccagccctgaagaccagccccatccagcccatcctggagagcagcctgggccccttcatccccagcgagcccccaggcagcctgccctgtggcagcttccctgcccctgtgtccacccccctggaggtgtggacccgggaccctgccaaccagagcacccagggcgccagcacagctgccagccgggagaagccagagcctgagcagggcctgcacccagacctggccagcctggcccccctggagatcgtgccctttgagaaggccagcccccaggccaccgtggaggtgggcggccctggcaacctgagcccccccctgcccccagcccctcctccacccacccccctggaggagagcacccctgtgctgctgagcaaaggaggccctgagcgggaggacagcagcaggaagctgaggacagacctgtacatcgaccagctgaagagccaggacagccctgagatcagcagcctgtgccagggcgaggaggccacccccaggcacagcgacaagcagaacagcaagaatgctgccagcgagggcaagggctgcggcttccccagccccacccgggaggtggagatcgtgtcccaggaggaggaggatgtgacccacagcgtgcaggagcccagcgactgtgatgaagatgacacagtgacagacatcgcccagcacggcctggagatggtggagccctgggaggagccccagtgggtgaccagccccctgcacagccccaccctgaaggatgcccacaaggcccaggtgcagggcctgcagggccaccagctggagaagaggctgagccaccggcccagcctgcggcagagccacagcctggacagcaagcccaccgtgaagagccagtggaccctggaggtgcccagcagcagcagctgtgccaacctggagacagagaggaacagcgaccccctgcagccccaggccccccggcgggagatcaccggctgggatgagaaggccctgcggagcttccgggagttcagcggcctgaagggagctgaggccccacccaaccagaagggccccagcggcgtgcagcccaacccagctgagaccagccccatcagcctggccgagggcaaggagctgggcacccacctgggccacagcagcccccagatccggcagggcggcgtgcccggccctgagagcagcaaggagagcagccccagcgtgcaggacagcaccagccctggagagcacccagccaagctgcagctgaagagcacagaatgtggcccccccaagggcaagaaccggcccagcagcctgaacctggaccctgccatccccatcgctgacctcttctggtttgaaaatgtggccagcttcagcagccctggcatgcaggtgtctgagcccggggaccccaaggtgacctggatgaccagcagctactgcaaggctgacccctggagggtgtacagccaggacccccaggacctggacatcgtggcccacgccctgactggaagaagaaacagcgcccctgtgtctgtgtctgctgtgaggaccagcttcatggtgaagatgtgccaggcccgggctgtgcctgtgatcccccccaagatccagtacacccagatcccccagcccctgcccagccagagcagtggagaaaatggagtgcagcccctggagaggagccaggagggccccagcagcaccagcggcaccacccagaagccagccaaggatgacagccccagcagcctggagagcagcaaggaggagaagcccaagcaggaccccggggccatcaagagcagccctgtggatgccacagccccctgcatgtgtgagggccccaccctgagccctgagcccggcagcagcaacctgctgagcacccaggatgctgtggtgcagtgcaggaagaggatgtctgaaacagagcccagcggggacaacctgctgagcagcaagctggagcggcccagcggcggcagcaagcccttccacaggagcaggcctggccggccccagagcctcatcctcttcagcccccccttccccatcatggaccacctgccccccagcagcacagtgacagacagcaaggtgctgctgagccccatccgcagccccacccagacagtgtccccaggcctgctgtgtggggagctggccgagaacacctgggtgaccccagagggcgtgaccctgaggaacaagatgaccatccccaagaatggccagaggctggagaccagcaccagctgcttctaccagccccagaggaggagcgtcatcctggatggccgcagcggccggcagattgaatag

SEQ ID NO: 205622 - DNA, 3300 bp, Artificial Sequence
  derived and/or modified sequence
atgaagaacaagggggccaagcagaagctgaagaggaaaggagctgccagcgccttcggctgtgacctgacagagtacctggagagcagcggccaggatgtgccctacgtgctgaagagctgtgccgagttcatcgagacccacggcatcgtggatggcatctaccgcctgagcggcgtgaccagcaacatccagaggctgcggcaggagtttggaagtgaccagtgcccagacctgacccgggaggtgtacctgcaggacatccactgtgtgggcagcctgtgcaagctgtacttccgggagctgcccaaccccctgctgacctatgagctgtatgagaagttcacagaggccgtgagccactgcccagaggagggccagctggcccgcatccagaatgtcatccaggagctgccccccagccactaccgcaccctggagtacctgatccgccacctggcccacatcgccagcttcagcagcaagaccaacatgcacgccaggaacctggccctggtgtgggcccccaacctgctgcggagcaaggagattgaggccaccggctgcaatggagatgctgccttcctggccgtgcgggtgcagcaggtggtgattgagttcatcctgaaccacgtggaccagatcttcaacaacggggcccctggcagcctggagaatgatgagaaccggcccatcatgaagagcctgaccctgcctgccctgagcctgcccatgaagctggtgtccctggaggaggcccaggcccggagcctggccaccaaccacccagccaggaaggagcggcgggagaacagcctgcctgagatcgtgccccccatgggcaccctcttccacacagtgctggagctgcctgacaacaagaggaagctgagcagcaagagcaagaagtggaagagcatcttcaacctgggccgcagcggcagtgacagcaagagcaagctgagcagaaatggatctgtgtttgtgcggggccagaggctgtctgtggagaaggccaccatccggcctgccaagtccatggacagcctgtgcagcgtgcctgtggagggcaaggagaccaagggcaacttcaacagaacagtgaccaccggcggcttcttcatcccagccaccaagatgcacagcactggaacaggcagcagctgtgacctgaccaagcaggagggggagtggggccaggagggcatgcctcctggagctgagggcggctttgatgtgtccagtgacaggagccacctgcagggcgcccaggcccggcccccacctgagcagctgaaggtgttccggcctgtggaggaccctgagagcgagcagacagcccccaagatgctgggcatgttctacaccagcaatgacagccccagcaagagcgtcttcaccagcagcctcttccagatggagcccagccccaggaaccagaggaaggccctgaacatcagcgagccctttgctgtgtctgtgcccctgcgggtgtctgctgtgatcagcaccaacagcaccccctgcaggaccccacccaaggagctgcagagcctgagcagcctggaggagttctccttccacggcagcgagagcggcggctggccagaggaggagaagcccctgggcgctgagaccagcgctgcctctgtgcccaagaaggccggcctggaggatgccaaggctgtgcctgaggcccctggcaccgtggagtgcagcaagggcctgagccaggagcccggggcccacctggaggagaagaagaccccagagagcagcctgagcagccagcacctgaatgagctggagaagaggcccaaccctgagaaggtggtggaggagggccgggaggccggggagatggagagcagcaccctgcaggagagcccccgggcccgggcagaggccgtgctgctgcacgagatggatgaagatgacctggccaatgccctgatctggccagagatccagcaggagctgaagatcattgaaagtgaggaggagctgagcagcctgcccccaccagccctgaagaccagccccatccagcccatcctggagagcagcctgggccccttcatccccagcgagcccccaggcagcctgccctgtggcagcttccctgcccctgtgtccacccccctggaggtgtggacccgggaccctgccaaccagagcacccagggcgccagcacagctgccagccgggagaagccagagcctgagcagggcctgcacccagacctggccagcctggcccccctggagatcgtgccctttgagaaggccagcccccaggccaccgtggaggtgggcggccctggcaacctgagcccccccctgcccccagcccctcctccacccacccccctggaggagagcacccctgtgctgctgagcaaaggaggccctgagcgggaggacagcagcaggaagctgaggacagacctgtacatcgaccagctgaagagccaggacagccctgagatcagcagcctgtgccagggcgaggaggccacccccaggcacagcgacaagcagaacagcaagaatgctgccagcgagggcaagggctgcggcttccccagccccacccgggaggtggagatcgtgtcccaggaggaggaggatgtgacccacagcgtgcaggagcccagcgactgtgatgaagatgacacagtgacagacatcgcccagcacggcctggagatggtggagccctgggaggagccccagtgggtgaccagccccctgcacagccccaccctgaaggatgcccacaaggcccaggtgcagggcctgcagggccaccagctggagaagaggctgagccaccggcccagcctgcggcagagccacagcctggacagcaagcccaccgtgaagagccagtggaccctggaggtgcccagcagcagcagctgtgccaacctggagacagagaggaacagcgaccccctgcagccccaggccccccggcgggagatcaccggctgggatgagaaggccctgcggagcttccgggagttcagcggcctgaagggagctgaggccccacccaaccagaagggccccagcggcgtgcagcccaacccagcccagcctgtgggccccctgaggaacctgcccaagatgatcctgcccccaccctggaaggcccagaggaagaagaaccagagcaagatccctgagcccctgagcccccaccagtggatgcccctgcacccagcctgtgcccgggacctgcccttcctgcagaaccaggcccggctgacctgcagcccccccaggatgcagtag

SEQ ID NO: 205623 - DNA, 4335 bp, Artificial Sequence
  derived and/or modified sequence
atgaagaacaagggcgccaagcagaagctgaagcggaagggcgccgcctccgcttttgggtgtgatctcaccgagtacctggagtcatcgggtcaggacgtgccatacgtgctgaagagctgcgctgaattcattgagactcacggcatcgtcgatggcatctaccgcctgtcaggagttacatccaacatccaaagacttcgacaggagtttggctcagaccaatgtcctgatctgacccgagaggtctacctgcaggatatccattgcgtcgggagcctctgtaagctgtattttagggagctccccaaccccttactaacttacgaactgtatgaaaaattcactgaggccgtgtctcactgccccgaagaagggcaactggccaggatacagaacgttatccaggagctccctccttcccactatcggaccctggaatatctgatccggcacctggctcacatcgcatcttttagcagtaaaacaaacatgcatgctcgcaacttggccctggtttgggcgccaaatcttcttcgctctaaagagatcgaggccacaggatgcaacggagacgctgccttccttgccgttcgagtgcagcaagtagtgattgagttcatcttgaatcacgttgatcagattttcaataacggagccccaggcagccttgagaacgatgagaaccggccaataatgaagtctctgacgttacccgccctgtccctgccgatgaagttagttagccttgaagaggcccaggcaagatcacttgccactaaccatccagcgaggaaggagcgcagggagaacagcctgccagaaattgtgcctcccatgggcactctctttcatactgtgctggaactgcctgacaataagcggaaactgagtagcaagtctaagaaatggaaaagcatatttaacctgggcaggtctggatcagactcgaaaagcaagctctcacggaatggcagcgtgtttgttaggggccaacgattgtcagtcgaaaaggctacaattcggcctgccaaaagtatggattcactatgcagcgtccccgtagagggaaaagagaccaaaggtaattttaatagaaccgtaaccactggcggattctttataccagccactaagatgcacagcactggcactgggtcctcctgcgacctaactaaacaggaaggggaatggggacaggagggcatgccccccggagccgagggagggttcgacgtctccagcgatcgttcacacttgcagggtgcacaggctagacccccaccagagcagctgaaggtatttcgtccagtggaagaccctgagtcggagcaaaccgctcccaaaatgctgggcatgttctatactagcaacgatagccctagcaaatctgtgttcaccagctcgctgttccagatggagcccagtccacggaaccagagaaaggcccttaacatctctgaacccttcgccgtaagtgtgccactgcgagtcagcgctgtgatttccactaactcgactccttgccgaacgcctccgaaggaactgcagagtctgagtagtctcgaggaattctcttttcatggaagtgaatccggcggatggcccgaagaggagaagcctttaggcgccgaaacttcagctgccagcgtgccgaaaaaagcggggctggaagatgccaaagcagtgcctgaagcccctgggaccgtcgagtgtagtaaagggttaagtcaggagcccggcgctcaccttgaggagaaaaagacaccagagagcagtctgtcttcccagcacttaaatgagctggagaagagaccaaatcctgagaaagtggtagaggaaggcagggaagccggcgaaatggagagtagcactcttcaagagtcccctcgagctcgggccgaggctgtactacttcatgagatggacgaagacgatctggccaacgccctcatctggcctgaaatccaacaggaactgaagattatagaatcagaagaggagttgtcttctttgccaccacccgcattaaagacatctccgatacagcccattctcgaaagctcactcgggccctttatcccctcagaacccccaggcagtctgccttgcggaagctttccggcgccggtgtctacgcctttggaggtgtggacccgagatcctgccaatcaaagtacccagggagccagcacagccgcctccagggagaagcccgagcccgagcaggggttgcaccctgatctggctagcttggcccccctggagatcgtgccatttgagaaagcctctccacaagccacagtggaggttggcggcccaggtaacctgagccctccattgccccctgcccccccaccaccaacacctttggaagagtctacgcccgttctgctctcaaaggggggtccggaaagggaagacagtagccgcaagctaaggactgatttgtacattgatcagctgaagtctcaagattctccagagatctcctctctgtgccaaggagaggaggctactccacgtcactcagacaagcagaacagtaagaatgccgctagcgaaggtaagggatgtggtttcccctcaccaactagagaagtggagatcgtttctcaggaggaagaggacgtgacccactccgtgcaggaaccaagtgactgcgacgaagatgacaccgtcactgacattgcccagcacggactcgagatggtcgagccttgggaggaacctcagtgggttaccagtccgttgcattctcccactttgaaagatgcccataaggcccaggtgcagggactccagggccaccagttggagaagagactgtcccatcggccatcattgaggcagtcgcattccctggattccaagcctactgtgaagtcacagtggactcttgaggtgccgagcagttctagttgcgccaacttagaaaccgaaagaaattccgatccccttcagccccaagcccccaggcgcgagattacaggatgggacgaaaaggcactcagaagctttcgtgagttttcaggtctgaagggcgcagaggctccacccaatcagaaggggccctccggcgtccagcctaacccggccgaaactagccccatttcacttgctgaggggaaggaattgggtacccacttaggccacagcagccctcagatcaggcagggaggagttccagggcctgagtcctcaaaggaatcttcccctagcgttcaggactcaacgtctcctggtgagcaccctgccaagcttcagctgaaatccaccgagtgtggcccgcctaaaggcaaaaaccggccctctagcctgaatttggatcctgctatacctatcgcagacttgttctggtttgaaaatgtggctagctttagcagcccaggaatgcaggtgtccgaaccaggcgatcccaaagtgacctggatgacaagcagttactgcaaggccgatccgtggagggtgtattcgcaagaccctcaggaccttgatatcgtcgcacatgccctcacgggcagaaggaattcggcacccgtgtcagtttctgccgtgcgcacgtcctttatggttaagatgtgccaagcccgtgctgtccccgtgataccacctaagatccagtatacacagatcccacaaccattacccagccagtcttctggggagaatggtgtgcaacccctcgagcgctcccaggagggaccatcctccactagcggtactacccagaagcccgccaaggatgactcgcccagctcactagaatcttctaaagaggagaagccaaagcaagatcctggcgctatcaagagcagcccggttgatgccaccgctccatgtatgtgcgaggggcctactctttctcctgaaccaggctctagcaacctgcttagcactcaggatgctgtggtgcagtgtcgtaagaggatgtcagaaactgagccgagcggagataatctcctgtcctccaagcttgaaagacccagcggcggaagcaaaccttttcatcgtagccgcccaggtcggccgcagtcactgatcttgttttccccgccatttcctattatggaccacttacccccttctagcacagtgactgatagtaaggtgttgctctcacctataagatcacctactcaaactgtaagtcccgggctcttgtgcggcgaactagccgagaacacctgggtgacccccgagggagtcactttaagaaataaaatgacgatcccaaagaatggacagaggctggaaaccagcacatcgtgcttttaccagccccagcggcggtcagtaatattggacggaaggtccggcaggcagatcgagtag

SEQ ID NO: 205624 - DNA, 3300 bp, Artificial Sequence
  derived and/or modified sequence
atgaagaacaagggcgccaagcagaagctgaagcggaagggcgccgcatcagcattcggctgtgatctcacagaatatcttgaaagctcgggtcaggatgttccctatgtattaaaatcgtgcgcggagtttatagagacacatggcatcgtggacggcatctaccgattaagcggagtgacgtccaatatccaaaggttgcgacaagagtttggcagtgaccagtgcccagaccttacgagagaagtatatttacaggacatccattgcgtgggtagtctgtgtaaactgtacttcagggagctacctaacccgctgcttacgtacgaactttatgagaagtttaccgaggccgtctcccattgtccggaggaaggtcagctggcccgtattcagaatgtgattcaagagctgccaccatctcactacaggactttagagtacctgattcgccaccttgcccacatcgcatcattctcatcaaaaactaatatgcacgcacggaatctagctcttgtgtgggccccaaatctactgcgctctaaagaaatagaggccactgggtgcaacggcgacgcggcgttcctggcagtgcgagtccagcaggtggtcatcgagttcattctgaaccatgtagatcaaattttcaataacggtgcaccagggtccctcgagaatgacgagaaccggccaattatgaagtcacttaccctccctgctctaagcctgcccatgaagctggtcagcctagaggaggcccaagctaggagccttgctaccaatcatcctgccagaaaagaacggcgagaaaactccttacctgagatagtgccaccgatgggcactctcttccataccgtcctcgagctacccgataacaaacggaagctaagttcaaagtcaaagaagtggaagagcatcttcaatcttggccggtctggcagtgactccaagtctaagctctcaagaaacggcagcgttttcgtgaggggccaacgcctgtcagtcgaaaaggctaccatacgcccagccaagtcaatggatagcctctgtagcgtgccagtggaggggaaggagactaaggggaatttcaatcgcacagtcactacgggtggattctttatcccagcaaccaagatgcactccacaggcactggcagttcttgcgatctcaccaaacaggagggcgagtggggccaggagggaatgccgcccggtgcagaaggtggtttcgacgttagctctgaccgctcacacttgcagggcgctcaggctaggccaccaccagaacaacttaaggtattccgaccggtagaggatcccgagtcagaacaaacagcacccaagatgctgggcatgttttacacttccaatgatagccctagcaaatcagttttcaccagttccctgtttcagatggagccgagcccacgcaatcagcgcaaggcactgaatatcagtgagccttttgctgtatcagttccactgcgcgtgtcagcggtgatctccaccaattctacaccctgtagaactcctccaaaagagttgcaatctctcagttccctcgaagaattttccttccacgggagtgagagcggagggtggcccgaggaagaaaagcccctcggagctgagacaagcgccgctagcgtgccaaagaaggctggccttgaggatgccaaagccgttcccgaggcgcctggtaccgtcgagtgctcaaaagggctttcacaagagccaggagcgcatctagaagagaagaagactcctgagtcgtccttgagcagccagcaccttaatgagcttgaaaagcgacccaatcctgaaaaggtggtggaagaggggcgtgaagccggagaaatggagtcatccaccctgcaggaaagtccgcgcgccagagcggaggccgtgcttttacatgagatggatgaggatgatctggcaaacgccctgatttggccggagatacagcaagagttaaaaattatagagagtgaggaagagctctctagcctccctcccccagcgctgaagaccagccccattcagcccattctggagtcaagtctcggacccttcattccctccgaacccccggggagcctgccctgtgggtcctttcctgctcccgtgagcaccccactggaggtttggactagggatcctgccaaccagagcacccagggcgcaagtactgcggcatcacgtgagaaacccgagcccgagcaaggactccatccagacctggccagcctagccccgttagagattgttcctttcgagaaagcctcacctcaggctaccgttgaagtgggaggtccgggtaacctctcaccccctttaccacctgcccctcccccaccaacacccttggaggaatctaccccagttctgctcagcaagggaggacccgagcgtgaagatagtagccggaagctgcgcaccgatctatatatcgaccagctgaaaagccaggacagccccgaaatcagctccctttgccagggtgaggaagctacccctaggcatagcgacaagcaaaattccaagaacgccgctagcgaaggaaaaggatgtggattccccagtcccacgcgagaggttgaaattgtttcacaggaggaggaagatgtgacacacagcgtgcaggagcctagtgactgtgatgaagacgatactgtgacagatatcgctcaacacggtctagagatggtggagccatgggaagaacctcagtgggtgacatccccacttcatagtcctacactcaaagatgcccacaaggcacaagtgcaaggactacaagggcaccaacttgagaagcgcttatcccacagaccctcgctacgccagtcccactctctagacagtaaacctacagtgaaatcccagtggacattggaagtcccttcctcttcctcttgtgctaacttggaaaccgagcgaaactcagaccccttgcagccccaggctccaagacgggagatcaccgggtgggatgaaaaagccctgcgtagcttccgtgagttcagcggcctgaagggcgctgaagctcctcccaatcaaaagggccctagcggggtccagcccaaccccgcacagcccgtcggccctttaaggaatctgccaaagatgattcttcctccaccctggaaggctcagagaaaaaaaaaccaatccaaaattccagagcccctgtctcctcaccagtggatgcccctgcacccggcttgtgctagggacctgccgttcctgcagaatcaagcacggctgacgtgtagtcccccccgcatgcagtag

SEQ ID NO: 205625 - DNA, 4335 bp, Artificial Sequence
  derived and/or modified sequence
atgaagaataaaggggcaaagcagaagcttaagcgtaaaggcgcagcttctgcgtttggctgcgacctgacagagtacctggagagctctggacaagacgtcccgtatgtgttgaagagttgcgcagagttcatcgagacacatggaattgtggacggcatctatcggctgagcggggtaaccagtaacatccagaggctgagacaggaattcggcagtgaccagtgtcccgacctgactagggaagtttatcttcaagacattcactgtgtgggctcattgtgtaaattatattttcgggagctgcccaatccgctgcttacttacgagctctacgagaagttcactgaggctgtgtcccactgtcccgaggagggacagctagccaggattcagaatgtcattcaggagctgccaccttcccattatagaacactggagtacctaatcagacacctggctcacatcgcctccttttcctcaaaaaccaacatgcatgctcggaacctagctcttgtgtgggcccctaaccttttaaggtcaaaagagatcgaagctactggctgtaacggcgacgcagcttttcttgcagtacgagtacagcaagtagtgattgaattcattctgaatcatgtcgatcaaatcttcaacaatggagctcccggatccctcgaaaacgatgagaacagaccaatcatgaaatccttgacactcccagcgctgtccctgccaatgaagctcgtctcactggaggaggcccaggctcgcagtctagcgactaatcatcctgcccgtaaagagcgcagggaaaactcccttcccgagattgtgcctccaatggggacacttttccacacagtacttgaactacccgacaataaaaggaagttgagctctaagtctaaaaagtggaagtcgattttcaatttggggaggtccggaagcgacagcaaaagcaaattatcaagaaacggcagtgtgttcgtgagaggccaacgattaagtgtagagaaggctacaatccgcccagctaagtcgatggattccctatgttcggttccagtggagggcaaagagacaaaaggtaacttcaacagaaccgtgactacgggcggattcttcattcctgcgaccaagatgcacagtactggcactggatcatcatgcgatctcacgaaacaagagggcgagtgggggcaggagggcatgccaccaggcgctgaggggggatttgacgtctcaagtgaccggtcacacctgcaaggagctcaggcccgaccgccaccagagcagcttaaggtgttcagacctgtagaggaccccgaatctgagcagaccgctcccaagatgttggggatgttctacacgagcaatgactctccatcaaagtccgtctttacttcatcactcttccaaatggaaccttccccaagaaaccagcgtaaggccctgaatatttccgaaccattcgctgtttcggtgccattgagggtgtccgctgtgattagtactaatagtaccccatgtcggacccccccaaaagagttacagtctcttagctcacttgaggaattctcattccacggatctgagtcaggtggctggccggaagaggagaagcctttgggtgcagagacaagcgcagctagcgtaccaaagaaggctggtctggaggacgccaaagctgtccccgaggctcccggaaccgtggaatgttccaagggattgtcacaggagccgggagctcacctagaggagaagaagacgcccgaatcttctctttcttcccagcacttgaacgagttagagaaacgcccaaatccagaaaaggtggttgaagaaggtcgggaggctggtgagatggagtcatctacgttgcaggaatctccacgggctagggctgaggccgtgctgctgcacgagatggatgaagacgacctggctaatgcactgatctggcccgaaatccagcaggagttgaaaatcatagagtcagaggaggaactctcgagtcttccacctcctgcgctaaagacctcccctatccagccaatcctggagtccagtctggggccttttattccaagtgagccacccggttctctgccttgcgggagcttccccgctccggtatcgactcctctagaggtctggacccgggacccagctaaccagtcaacccagggggctagcacagctgcatccagagaaaagcccgagccagaacagggtctccatcctgaccttgcttctctggccccattagagatcgttccctttgagaaagccagtcctcaagcaaccgtcgaagtgggaggacctggaaacttgagccctcctctgccgcctgctcccccaccgcctacacctctggaagaaagcacccccgtacttctatcaaaaggaggacccgaaagggaggattcatctcgcaaactgcgcacggatctgtatatcgaccagctcaagagtcaggacagccccgaaatttctagcctgtgccagggggaagaggcaacaccgaggcactccgacaaacaaaattcaaagaacgcggcttccgaaggaaaaggatgtggtttcccttctcccacgcgcgaggtggagatcgttagccaggaagaggaggacgtaacgcattcggtgcaagagccatcagactgcgatgaagacgacacagtgactgacatcgcccagcacggcctcgaaatggttgaaccttgggaggagccacaatgggttacttccccgctgcactccccgacactgaaagacgcgcacaaggcccaagttcaaggtctacagggacaccaactggagaaaagactctcccatcgcccaagcctccgacaaagccattccctggattctaaacctactgtgaagtcccagtggactcttgaggtgccttcatcctcctcttgtgccaacctggaaactgagcggaacagcgatccattacagcctcaggcccctcgcagggaaataactggctgggatgagaaggctttgcggtccttccgggagttctcagggctaaaaggtgctgaagctccacccaatcagaaagggccttccggagtgcagccaaatcctgctgaaactagtccgatttcgctggccgagggcaaggaactcggcacccatctgggccattcaagtccgcaaatccgccagggtggagtccccggacccgagagttctaaagaaagctctccatccgtgcaggatagtacatccccgggagagcatcccgcaaagcttcagctgaagagtactgagtgcggacctccgaaggggaagaatagacctagctctctgaatctggaccctgctatccccatcgcagaccttttctggtttgaaaacgtggcatccttttcctccccgggaatgcaggtgtccgaacctggagatccaaaggtgacttggatgacgtccagctattgtaaagcagacccgtggagggtgtacagccaggaccctcaggacctggatatcgttgcacacgccctgaccggtagaaggaatagcgcacctgtgagtgtgagcgccgtccgcacctccttcatggtgaaaatgtgtcaggcccgtgcggtgccagttatccctcccaaaatccagtacacccagatcccccagcccctgccatctcaatcctctggagagaacggggtgcagcctcttgaaaggtctcaggaagggccttcctctacaagcgggaccacccagaaaccagctaaagacgactccccttcctctctggagtcaagcaaggaggagaaaccaaagcaagacccaggagctataaaatcatcccccgtcgacgccacagcgccttgtatgtgtgaaggtcctacactgtcaccagagcctgggtcaagcaacctgctgagcacgcaggatgcagtggtgcaatgtcgtaaacggatgagtgaaaccgagccatccggcgacaatctgttgtcctctaaactagaaagacccagtgggggatctaaaccattccacagatctagacccggtcggccacagtccttgatcctgttctcccccccatttcccatcatggatcatttaccaccaagctccacagttactgattccaaggttttactatcccctatccgcagccctacccagaccgtgagcccgggtctcctgtgtggcgagctggccgagaatacatgggtcacacccgagggagttacgttacggaataagatgaccattccaaaaaacggacaacgtttggaaacctcaacgagctgcttctatcagccgcagcggcgtagtgtcattctcgatggcagatccggcagacagatcgagtag

SEQ ID NO: 205626 - DNA, 3300 bp, Artificial Sequence
  derived and/or modified sequence
atgaaaaataaaggggcaaagcagaagctgaaacgcaagggcgcagcaagtgcttttggctgtgatctgaccgaatacctggaaagcagtggtcaagatgtgccttatgtcctcaagagctgtgctgaatttatcgaaacccacggcatcgtggatggaatataccgtctgagcggcgttacgtccaatattcagaggctgcgacaggaattcggatcagatcaatgtccagacctcacacgcgaggtttacctgcaggatatccactgcgtcggctcactctgtaagctctactttcgagagttgcccaatcccctgttaacgtatgaactgtacgaaaagttcacggaagccgtctctcattgcccagaagagggccagctcgcgaggattcagaacgtcatccaggagttacctcccagccattaccggacgcttgaatatctcatcagacatcttgcccacatcgcaagcttctccagcaagaccaacatgcacgcacgtaatctggcccttgtgtgggcccctaaccttttgagatctaaagagattgaggctaccggctgcaatggtgacgctgctttcctcgcagtacgggttcagcaggttgtcatagagtttattctgaaccacgtggatcagatattcaataacggagctcccggtagcctcgaaaacgatgagaaccggccaatcatgaaatctctcacgctaccagcattgagcctccccatgaaactggtgtctctggaggaagcgcaagcacgttccctggctacaaatcatcccgctcgcaaggaaaggcgtgagaactctctgcccgaaattgtaccccctatgggaacactcttccacactgtcttggagctcccagataataagagaaagttatctagtaaaagcaaaaagtggaagtccatcttcaacctcggaagaagtggctctgattccaaaagtaaactgagccgaaatgggtctgtctttgttcgtggccagaggctcagtgttgagaaggccacgatccgtcctgccaaaagcatggactctctgtgctctgttccggtggaaggcaaggagacgaagggtaactttaacagaaccgtgacaaccggcggttttttcatccctgccactaagatgcacagtacaggcaccggaagtagctgtgatctgaccaaacaggaaggcgagtggggccaggaaggaatgcctcccggtgccgagggagggttcgacgtcagcagtgataggtcccacttgcagggcgctcaagcaagaccacccccagagcagcttaaggtgtttcggccagtggaggacccggaaagtgaacagacggccccaaagatgctagggatgttttatacctccaatgatagcccttcaaagagcgtctttacgtcatctcttttccagatggaaccatctcctagaaaccagaggaaggcattgaacatctctgagccctttgccgtgtcagtgcctctgagggtcagtgcggttatcagcacaaattctacgccctgtagaactccgcctaaggagcttcagtctcttagctccctggaagagttctcgttccatggatcagagtcaggaggatggccagaggaagagaagcctctgggggctgagacgagtgctgcaagtgtgccaaagaaggcgggactggaagacgcaaaagcagtgccagaggctccaggaactgtggaatgcagtaaggggttaagccaagaacctggggctcacctcgaagaaaaaaagacaccagagtcttccctgtcttcccagcacctgaatgagctggagaagcggcctaaccctgagaaagttgttgaagagggtagagaggcaggggagatggaatcttcgacattgcaggagagtcccagggctcgcgcagaagcagtcttgctgcatgaaatggatgaggacgatcttgctaatgcactgatttggcccgaaatacagcaggagctgaagataatcgaaagcgaggaggaactcagttctctgccaccaccagcactcaagacatctccaatccaacctatcctggagagcagccttgggccatttattccaagcgagcctccgggttctctaccctgcggatcttttcctgccccagtgtcaacaccactggaggtgtggacccgcgacccagcaaatcaatccactcagggagcttccacagcagcaagccgggagaagccagaacctgagcaggggctgcaccccgatctggcatccctcgccccattggagattgtgccattcgagaaggcctccccacaggcgacagtcgaggtgggtggtcccggtaatctctccccccctcttcctccagctccgccacctccaacccctctggaggagagcacccctgttctgctttcaaagggcggacccgagagagaagactccagtagaaaattgcgaacggacctgtatatagaccagctgaagtctcaggattcacccgaaatttcatcattgtgccagggtgaggaggctaccccgcgacatagtgataagcaaaactctaagaacgcagcctcagagggcaaagggtgcggctttcccagtccgacgcgcgaagtggaaatcgtcagccaggaggaggaagacgttactcactccgtccaggaaccctcggattgcgacgaggacgatactgtgacagatatcgctcagcacggactcgagatggtggaaccttgggaagagccacagtgggtgacgagccccctccattccccgaccctgaaggatgcccacaaggcccaggtgcagggcctccaagggcatcaactggagaagcgcctctctcatagaccttcccttcggcagagccactctctggatagcaagcccaccgtgaaatcgcagtggacactggaggtgcccagcagctcctcatgtgcgaatctcgagactgaaagaaacagcgacccactgcagccccaggctccaagaagagagatcaccggctgggacgaaaaggctttgcgctcattcagagaattttccgggctaaagggtgccgaggcccctcctaatcagaaaggacctagcggagtgcagccgaatcctgctcagcccgtggggccactgaggaaccttccgaagatgattctcccacccccttggaaagcccagaggaagaaaaaccaatctaaaattcctgaaccacttagtcctcatcagtggatgcctctgcaccccgcttgtgcacgagatctgccttttctgcaaaaccaggccaggttaacatgcagtcccccacgtatgcaatag

SEQ ID NO: 205627 - DNA, 9317 bp, Artificial Sequence
  derived and/or modified sequence
ggaaaaaaaggaaggcgtgagggcgggcagcagcgacaggatgcttgtttttcgctctaccaaagtcgtctgaaggcgagacagcgggcccagggcgcaggacccaccgcagccccctgggcagtctcctcgccccgcgtccgcgtcgtctccggggcacttagtaaggggtggggagagcttgccctccctcttaagctgaggagaaacacccgaagacaccgcaggagcctgtgaaagtccctaggactccaagtgaggaagtgacactcccaggcgagccggcccgcggctgccagtctgcacggcctcggcacggcggccccggagcggcgcggggtggatctcaggctctgccggcccgcggcccgcggggtccatgcgcagggcccccagcccaagttcttccatcttccgatgcggccccccagagccgcggggcagccggtgatctagcccgggagcccatcttacagcggtgccaagcagaggggcggcagagacggaggggcagcctctttgggactaactcatgaagaacaagggtgctaagcagaagctgaaacgaaagggagccgccagcgcgtttggctgtgacctgacggagtatctggaaagctcgggacaggatgttccatacgttttgaagagctgtgcagaatttatagagactcacggcatcgtggatggaatctatcggctttcaggagtcacctcaaacatacaacggctaaggcaagagtttggctcagatcaatgtccagatctgacaagggaagtgtacctccaggacatccactgtgtgggctcgctttgcaagctctactttagggagctgcccaaccccctcctgacttatgagctctatgagaaattcacggaggcagtgtcgcattgccctgaagaaggccaactggcccgaatccaaaatgttatccaggagcttcctccatcccactataggaccttggaatacctgattcgacacctggcccatatcgcctccttcagcagcaagaccaacatgcacgcccggaacctggccctggtgtgggcgccaaacctcctcaggtctaaagaaattgaagccactggttgcaatggagatgcagccttccttgcagtccgggtccagcaggtggtgattgagttcatattgaatcatgtagatcaaatctttaacaacggtgcacctgggtctctggagaatgatgaaaaccggcccatcatgaagagcctgaccttgccagccctctccctgcccatgaagctggtgagccttgaggaagctcaagcccgcagcctggccactaaccatcctgctcgcaaggaaaggagggagaacagcctgcctgagattgtccctcccatgggcaccctcttccacactgtccttgagttaccagacaacaagcgaaagctctccagtaaatcaaagaagtggaaatcaatatttaacctgggacgttctggatcagactccaaatcaaaactgagtagaaatgggagtgtatttgtgagaggacagaggctctcggtggaaaaggctactatccgaccagctaaaagcatggactcactatgttcagtgcctgtagaaggaaaagaaaccaagggaaatttcaatcgaacagttaccaccggtggatttttcattccagcaacaaagatgcactccaccggcaccggcagctcatgtgacctcaccaagcaggagggcgaatggggccaggaggggatgcctcccggggctgagggtggctttgatgtgagcagtgatcgcagccatctccagggcgctcaggcccggcccccaccggaacagctgaaggttttccggcctgttgaggatccggagagcgagcaaacagccccaaagatgttgggtatgttctacacttcgaacgacagccctagcaaatccgtcttcaccagcagcctcttccagatggagccctcgccgcgtaaccagcgcaaggcgctgaacatctccgagccctttgcggtatctgtgccgctccgcgtgtccgcagtcatcagcaccaacagcacgccgtgcagaacacccccgaaggagctgcagtctctttccagcctggaagagttttcttttcatggatcagagagcggaggctggccagaagaagagaaaccgctgggagctgagacttctgcagcttctgtacctaagaaggcaggtcttgaggatgccaaggcagtacctgaagcaccggggacagtggaatgcagcaaaggcctgtcccaggagccaggcgcccacctggaggagaagaaaaccccagaaagctccttgagctctcaacatttaaatgaattagagaagaggccaaatccggagaaggtggtggaggagggacgagaggctggtgagatggagtccagcaccctgcaggagagccccagggccagagccgaagctgtgcttctccatgagatggatgaagatgatctggccaatgccctgatctggcctgagattcaacaggagctgaaaatcattgaatctgaggaggagctctcatcgttgccacctcctgctctgaagaccagcccaattcagcctattctcgagtcgagtctggggccctttattccctcagagcctcctgggagcttgccttgtggctccttccctgctccagtctccacccctctggaggtgtggactagggatccagccaatcagagcacacagggggcttccacagcagccagcagagagaagccggaacctgagcagggcctgcacccagacctcgccagcctggctcctctggaaatagttccttttgagaaggcatctccacaagcaacagtggaagtaggaggcccaggcaatctgtctcctccactcccacctgctcctccccctccaactcctctggaggagtcaactccagtcctgctttcaaagggcggcccggaaagagaagactcatccaggaaattgaggacagatctctacatagaccagctgaagtcccaagacagccctgagatctctagcctctgtcagggagaggaggcaaccccaagacacagtgacaagcaaaattcaaagaatgctgcttctgaggggaaaggctgtggttttccaagcccaaccagggaggttgagatcgtctcacaagaagaggaggatgtaacccattcagtacaggagccttcagactgtgacgaagatgacactgtgacagacattgcccagcatggcctggagatggtggagccctgggaggaaccccagtgggtgacgagtccccttcactctcccaccctgaaagacgcgcacaaggcccaggtacagggccttcagggtcaccagttggagaagaggctttcccacaggcccagccttcgccagagccattctctagatagcaaacccacggttaaaagccagtggactctcgaggttccctcctccagcagctgtgctaatcttgaaacagagaggaattctgaccctcttcagccccaggcacccaggagagagattactggatgggatgagaaagccctgaggtccttcagagagttctctggcctgaaaggggcagaggctcctcccaaccagaagggaccaagtggtgtgcaacccaacccagcagaaaccagccccatcagcctagcagagggaaaggagctagggacacacctggggcacagcagtccacagattaggcaaggtggtgttcctgggccagagagcagcaaggagagttcacccagcgtgcaggacagcacttcgcctggagagcaccccgcaaagttacagctaaagagcacagagtgtgggcccccaaaagggaaaaacaggccttcttccctcaacttggaccctgccattcccattgctgacctcttctggtttgagaatgtggcctcatttagttcacctggaatgcaggtctctgagccaggagacccaaaggtcacatggatgacctcatcttactgtaaagcagacccctggagggtttactcccaggacccccaggacctggacattgttgctcatgcactgacaggccgccgtaactcagctcctgtgagtgtgtcagctgtgagaacctccttcatggtcaaaatgtgccaggccagggcggtcccagtcatccctcccaagattcagtacacccagatcccacagcccctgccctctcagagctcaggggagaatggggttcagcctctggagaggagccaggagggacccagctcaaccagtgggaccactcagaaacctgccaaagatgattctccctcctccctggaaagctcaaaggaagaaaaaccaaagcaagatcccggagccattaagtcctcaccagtggatgccactgcaccctgcatgtgcgagggacctaccctttctccagaaccaggctcgtctaacctgctctccacccaggatgcagtagtgcaatgcagaaagcgcatgtcagagacagagccatctggggacaaccttctttcttcaaaactagagcgaccatctgggggttctaagcctttccacaggtcaaggccaggaagacctcagagcctaatcttattcagtcctcctttccccattatggaccacctgcccccttcatccacagtgacagattccaaggtcctgctgtcccctatcagaagtcccacccagacagtttcccctggccttctttgtggagagttggcagaaaacacatgggtcacaccagaaggggttacacttaggaataaaatgaccatccctaagaatggccagagactagagacctcaaccagctgtttttaccagcctcagcggagatcagtaattctggatggaagaagtgggaggcaaatagaatgatttcggttcacctgctggtgtctgaaaaaaaccgtgattcatctggaagttattacagggccagcttgccatattccaggcacacgttatcaagtttgggcctattgtggcctctgacttctctttcttcagccttttgaccacttattaattagtccatttgctagaagagtggtcaagggaaaaacgagagatgaaatttagttaagtctatgtgagcaagtgagagaaggttaggtaaggggagaggatggaatgcttgcctccaatgaactttggagcttgtatgtgagtcagattgctcccctattgctattatctattactcttgagagctggctgtcctttgaaagaaagaagtaatgttctttgaaagaaagaaaaatctcttgctgtgtcaaacctcaaaatgttgctattggggttagaaggcctcctctttatgctttttaatgctctttcaaacgtgttcttttagaccagttttctaataagctttgtaaaatgtactatccaaattagaagcggatttggaaatgcaaactaacgtgcacttagatatccaagtgggtgagcttagccactcttacccatgctctttccctggaatccctggagacctgtccaagatgatttccatataccagcatagaaaatcagaatcaagagcaaactctgagactggcacaatccaagaagatttcctggctctggcttttagtaatttgggactccaactgccactgtactggactgtaatttataaatccagtagctacgcagggtggaggctgggctgaggattaccataatgaaatgtactaaatcttcatttaggtatgcaattgtgaagtgaaggcatctgctttctttacagtatcagagtccaagaacaggatgtcaccatagataaaagcctcatacaaaggcagaactacactccaaatttaatgtgtttaaattggtggggcaccagcagaaaatattctagctcagctttactcttcttccacactaggctgggcccagcaatacaggagaggatgaagggaggagctccaggaggcgagggaagagccctagcagggcggccatcacaaccactcactgagagttgcccttcttaaaaatgtattttattttagccagtgggtcccttcctttctcctttcctctctactgctcaagaacagatttgaggccaggtgcggtgcctcacatctgtaatcccaacactttgggaggctgagatgggtggattgcttgagcccaggagttcaagaccagcctgggcaacacagcgagaccccatctcttaaaaaataacagacttgaggaacccctctcccttccataattcccctcatccaccgcccactccaggcactcactcaaacttgctcttcaactctgtatacaagcagaagcaataaaccaatctgattttcttttcaattatttataactttcaatggttctttcctttccagctggcgagagaaaggagaactaatatacctgctggcagatttttggtgctgcccaaaaaaggacttcacagggcatctcttctcaggttcaagcctggctgaattctgcccagaagctcagtcattgcagaaatttctctaagggctgatagtacctctgggtaggcgtcacaaccaaggctggttctgggcttagtgggggctgagatgaagttacctcctccaatgagaaattgggagctgatgccctgcaacagatatatattcctctctctctctgtctctctatctctctcctccctctccctccctccctccccgccaataagccttacaaacagttttgaaatcttgttctgtaccttttaagccagtgtctgtggcgagggtgactggcaagtcagctgatgagttctgccttctgagagcactgagtgagcaaggcctttcatcagtgttttggccttctcattgggtgaggaagacattgaaccaacagccaacgagatatgaacctgtaagaaaaaagtcctagaatatagtatttttccccaggccagcaaagtgaagaaatacagtggtgacagatgagaaaggccatgttcaagagatctgaaaagtacattcctgccttatcagaaaatgtgtcagacaggttttatgtcagcctcagtgctcctgcggtgtcgacgctctgataaggaccatgttccagttagaatgcgagggagggaaagagctgcactttgcttcaccatcagaactctgagccaaataatgaatatgtaaactattttatgattattttaaatgtttgtttggtaacatttataagatctatttttatttggggatagactgagaagccaccatttacatattaacaagtgacttcagttctaagggttgagatgcctgtgtggatttataaaatggttgcaagatcttttagactctgacatttatagcatcaccttcaggaacacagttctggggatgtcatcatgagacacactgacagctgtggagatagtccctactctcagctttccttgctagtcaagtccaaaaggccttagaagctgactcaccttctcagccagagtcctgctgctcaagtgtggacctccactttgactctcacccagcctgccagccatcacaaaggctttcataaacttcctgtggtctgggctagcctggcactgatgaaattccattctaaagaaagaaaactcatattcctcccccccacaaattgttcccccaaatgctctgggattacctatttcaccactcatttgagtctccgaaaaatgaactccctgagaatggctggatgggaatcagatagtctgcttccattcaggagagggacagaacaggagctgctgtgtttaggaggatttacctggtgccctagaaagggctatgcaatcaaattctcaagggctccttcaaatcagctatcagtcctcaaaatgggggttgctgatgttaaatgatggatttgcagtgaaacgcatgcatgtactgacgttttctttcagcattagtggttgcttaagaaaatagtaacctatattttctgctacacttggaatatgaagaaatctgaacaagaaccccattaagacacctaacctaatctaaaccctaaaattcaaaatattgtccaagtcaaaagtctagactctgaggacattaaaaatgtaaatatcatcatccttagcaaatatttattgggagcttagtaatagtgcactgggtaccttagcactcccaaatcattcaagagtctagtgaaaaagggggagggatggcagcaaataaaacacccccataaacaaccaggagcaaggttgagaaccattaagttgccaaacaaaagcagaaggggaaaaagtgtggcaacaagcatcttttaataggatagttgacggtattcaagtgacctactgactccaaataatcaaattgaacacaattgcaaatccaatagaacatcccagtgagacactcgggtatttgagaactttgcttgatttagaaaactggaaagtggcaactaggctagaatagtggcaactaggttcggaggtttcgtgtggtcataattggtttggtgaagtgtgagatctctgcaaatgagccaggtaagatcagtattccatagtgcttgaaaaggggattttagagacttctgtcatcacaaagcagattaactcctagttaatgatgaagcagtaggcccaagataaactgttcaattcaagataaattgttcttgtcagtgtttggcatatgataatcacatttggctaaaattggatgggacagtcatttgtctacacaggccttccattcctgcatgaagagatactggggagcatacaattattttgtccagtattagagtgggagaagttctcagtaagtccagtcccaccaggatttatttgggccacattctaccacggccagtccaatctgatgaccacatgaattggggttaagtgttgctaagactatgattttagacatgtctggcaggaaggtcagctcaaaatgtggcatgacaaagaatatgtgctctactaccaaaacctttcctagcaaaacaaggccagaagagggagcaagcatctttccaagcatggagaggagggggcaatggtggaagggtgattgcctgaaatcagtgccagtacagatagcataaaattgggggccaccacagattggctggctactgtgtagatcatttagtaatcttgaggtacattaataatgcagagattacttttctgtgagggtaagggggacgtagctaaatataagaagcttacaaggtccatagccatgtattttactggataaatcacaatgctttgcaataacttaatgtcatagtactttctggcttataattctgcaaagtaaagcactttttcaaagga

SEQ ID NO: 205628 - DNA, 3716 bp, Artificial Sequence
  derived and/or modified sequence
tcttccatcttccgatgcggccccccagagccgcggggcagccggtgatctagcccgggagcccatcttacagcggtgccaagcagaggggcggcagagacggaggggcagcctctttgggactaactcatgaagaacaagggtgctaagcagaagctgaaacgaaagggagccgccagcgcgtttggctgtgacctgacggagtatctggaaagctcgggacaggatgttccatacgttttgaagagctgtgcagaatttatagagactcacggcatcgtggatggaatctatcggctttcaggagtcacctcaaacatacaacggctaaggcaagagtttggctcagatcaatgtccagatctgacaagggaagtgtacctccaggacatccactgtgtgggctcgctttgcaagctctactttagggagctgcccaaccccctcctgacttatgagctctatgagaaattcacggaggcagtgtcgcattgccctgaagaaggccaactggcccgaatccaaaatgttatccaggagcttcctccatcccactataggaccttggaatacctgattcgacacctggcccatatcgcctccttcagcagcaagaccaacatgcacgcccggaacctggccctggtgtgggcgccaaacctcctcaggtctaaagaaattgaagccactggttgcaatggagatgcagccttccttgcagtccgggtccagcaggtggtgattgagttcatattgaatcatgtagatcaaatctttaacaacggtgcacctgggtctctggagaatgatgaaaaccggcccatcatgaagagcctgaccttgccagccctctccctgcccatgaagctggtgagccttgaggaagctcaagcccgcagcctggccactaaccatcctgctcgcaaggaaaggagggagaacagcctgcctgagattgtccctcccatgggcaccctcttccacactgtccttgagttaccagacaacaagcgaaagctctccagtaaatcaaagaagtggaaatcaatatttaacctgggacgttctggatcagactccaaatcaaaactgagtagaaatgggagtgtatttgtgagaggacagaggctctcggtggaaaaggctactatccgaccagctaaaagcatggactcactatgttcagtgcctgtagaaggaaaagaaaccaagggaaatttcaatcgaacagttaccaccggtggatttttcattccagcaacaaagatgcactccaccggcaccggcagctcatgtgacctcaccaagcaggagggcgaatggggccaggaggggatgcctcccggggctgagggtggctttgatgtgagcagtgatcgcagccatctccagggcgctcaggcccggcccccaccggaacagctgaaggttttccggcctgttgaggatccggagagcgagcaaacagccccaaagatgttgggtatgttctacacttcgaacgacagccctagcaaatccgtcttcaccagcagcctcttccagatggagccctcgccgcgtaaccagcgcaaggcgctgaacatctccgagccctttgcggtatctgtgccgctccgcgtgtccgcagtcatcagcaccaacagcacgccgtgcagaacacccccgaaggagctgcagtctctttccagcctggaagagttttcttttcatggatcagagagcggaggctggccagaagaagagaaaccgctgggagctgagacttctgcagcttctgtacctaagaaggcaggtcttgaggatgccaaggcagtacctgaagcaccggggacagtggaatgcagcaaaggcctgtcccaggagccaggcgcccacctggaggagaagaaaaccccagaaagctccttgagctctcaacatttaaatgaattagagaagaggccaaatccggagaaggtggtggaggagggacgagaggctggtgagatggagtccagcaccctgcaggagagccccagggccagagccgaagctgtgcttctccatgagatggatgaagatgatctggccaatgccctgatctggcctgagattcaacaggagctgaaaatcattgaatctgaggaggagctctcatcgttgccacctcctgctctgaagaccagcccaattcagcctattctcgagtcgagtctggggccctttattccctcagagcctcctgggagcttgccttgtggctccttccctgctccagtctccacccctctggaggtgtggactagggatccagccaatcagagcacacagggggcttccacagcagccagcagagagaagccggaacctgagcagggcctgcacccagacctcgccagcctggctcctctggaaatagttccttttgagaaggcatctccacaagcaacagtggaagtaggaggcccaggcaatctgtctcctccactcccacctgctcctccccctccaactcctctggaggagtcaactccagtcctgctttcaaagggcggcccggaaagagaagactcatccaggaaattgaggacagatctctacatagaccagctgaagtcccaagacagccctgagatctctagcctctgtcagggagaggaggcaaccccaagacacagtgacaagcaaaattcaaagaatgctgcttctgaggggaaaggctgtggttttccaagcccaaccagggaggttgagatcgtctcacaagaagaggaggatgtaacccattcagtacaggagccttcagactgtgacgaagatgacactgtgacagacattgcccagcatggcctggagatggtggagccctgggaggaaccccagtgggtgacgagtccccttcactctcccaccctgaaagacgcgcacaaggcccaggtacagggccttcagggtcaccagttggagaagaggctttcccacaggcccagccttcgccagagccattctctagatagcaaacccacggttaaaagccagtggactctcgaggttccctcctccagcagctgtgctaatcttgaaacagagaggaattctgaccctcttcagccccaggcacccaggagagagattactggatgggatgagaaagccctgaggtccttcagagagttctctggcctgaaaggggcagaggctcctcccaaccagaagggaccaagtggtgtgcaacccaacccagctcaaccagtgggaccactcagaaacctgccaaagatgattctccctcctccctggaaagctcaaaggaagaaaaaccaaagcaagatcccggagccattaagtcctcaccagtggatgccactgcaccctgcatgtgcgagggacctaccctttctccagaaccaggctcgtctaacctgctctccacccaggatgcagtagtgcaatgcagaaagcgcatgtcagagacagagccatctggggacaaccttctttcttcaaaactagagcgaccatctgggggttctaagcctttccacaggtcaaggccaggaagacctcagagcctaatcttattcagtcctcctttccccattatggaccacctgcccccttcatccacagtgacagattccaaggtcctgctgtcccctatcagaagtcccacccagacagtttcccctggccttctttgtggagagttggcagaaaacacatgggtcacacca

SEQ ID NO: 205629 - DNA, 4335 bp, Artificial Sequence
  derived and/or modified sequence
atgaagaacaagggcgccaagcagaagctgaagagaaagggcgccgccagcgccttcggctgcgacctgaccgagtacctggagagcagcggccaggacgtgccctacgtgctgaagagctgcgccgagttcatcgagacccacggcatcgtggacggcatctacagactgagcggcgtgaccagcaacatccagagactgagacaggagttcggcagcgaccagtgccccgacctgaccagagaggtgtacctgcaggacatccactgcgtgggcagcctgtgcaagctgtacttcagagagctgcccaaccccctgctgacctacgagctgtacgagaagttcaccgaggccgtgagccactgccccgaggagggccagctggccagaatccagaacgtgatccaggagctgccccccagccactacagaaccctggagtacctgatcagacacctggcccacatcgccagcttcagcagcaagaccaacatgcacgccagaaacctggccctggtgtgggcccccaacctgctgagaagcaaggagatcgaggccaccggctgcaacggcgacgccgccttcctggccgtgagagtgcagcaggtggtgatcgagttcatcctgaaccacgtggaccagatcttcaacaacggcgcccccggcagcctggagaacgacgagaacagacccatcatgaagagcctgaccctgcccgccctgagcctgcccatgaagctggtgagcctggaggaggcccaggccagaagcctggccaccaaccaccccgccagaaaggagagaagagagaacagcctgcccgagatcgtgccccccatgggcaccctgttccacaccgtgctggagctgcccgacaacaagagaaagctgagcagcaagagcaagaagtggaagagcatcttcaacctgggcagaagcggcagcgacagcaagagcaagctgagcagaaacggcagcgtgttcgtgagaggccagagactgagcgtggagaaggccaccatcagacccgccaagagcatggacagcctgtgcagcgtgcccgtggagggcaaggagaccaagggcaacttcaacagaaccgtgaccaccggcggcttcttcatccccgccaccaagatgcacagcaccggcaccggcagcagctgcgacctgaccaagcaggagggcgagtggggccaggagggcatgccccccggcgccgagggcggcttcgacgtgagcagcgacagaagccacctgcagggcgcccaggccagacccccccccgagcagctgaaggtgttcagacccgtggaggaccccgagagcgagcagaccgcccccaagatgctgggcatgttctacaccagcaacgacagccccagcaagagcgtgttcaccagcagcctgttccagatggagcccagccccagaaaccagagaaaggccctgaacatcagcgagcccttcgccgtgagcgtgcccctgagagtgagcgccgtgatcagcaccaacagcaccccctgcagaaccccccccaaggagctgcagagcctgagcagcctggaggagttcagcttccacggcagcgagagcggcggctggcccgaggaggagaagcccctgggcgccgagaccagcgccgccagcgtgcccaagaaggccggcctggaggacgccaaggccgtgcccgaggcccccggcaccgtggagtgcagcaagggcctgagccaggagcccggcgcccacctggaggagaagaagacccccgagagcagcctgagcagccagcacctgaacgagctggagaagagacccaaccccgagaaggtggtggaggagggcagagaggccggcgagatggagagcagcaccctgcaggagagccccagagccagagccgaggccgtgctgctgcacgagatggacgaggacgacctggccaacgccctgatctggcccgagatccagcaggagctgaagatcatcgagagcgaggaggagctgagcagcctgcccccccccgccctgaagaccagccccatccagcccatcctggagagcagcctgggccccttcatccccagcgagccccccggcagcctgccctgcggcagcttccccgcccccgtgagcacccccctggaggtgtggaccagagaccccgccaaccagagcacccagggcgccagcaccgccgccagcagagagaagcccgagcccgagcagggcctgcaccccgacctggccagcctggcccccctggagatcgtgcccttcgagaaggccagcccccaggccaccgtggaggtgggcggccccggcaacctgagcccccccctgccccccgccccccccccccccacccccctggaggagagcacccccgtgctgctgagcaagggcggccccgagagagaggacagcagcagaaagctgagaaccgacctgtacatcgaccagctgaagagccaggacagccccgagatcagcagcctgtgccagggcgaggaggccacccccagacacagcgacaagcagaacagcaagaacgccgccagcgagggcaagggctgcggcttccccagccccaccagagaggtggagatcgtgagccaggaggaggaggacgtgacccacagcgtgcaggagcccagcgactgcgacgaggacgacaccgtgaccgacatcgcccagcacggcctggagatggtggagccctgggaggagccccagtgggtgaccagccccctgcacagccccaccctgaaggacgcccacaaggcccaggtgcagggcctgcagggccaccagctggagaagagactgagccacagacccagcctgagacagagccacagcctggacagcaagcccaccgtgaagagccagtggaccctggaggtgcccagcagcagcagctgcgccaacctggagaccgagagaaacagcgaccccctgcagccccaggcccccagaagagagatcaccggctgggacgagaaggccctgagaagcttcagagagttcagcggcctgaagggcgccgaggccccccccaaccagaagggccccagcggcgtgcagcccaaccccgccgagaccagccccatcagcctggccgagggcaaggagctgggcacccacctgggccacagcagcccccagatcagacagggcggcgtgcccggccccgagagcagcaaggagagcagccccagcgtgcaggacagcaccagccccggcgagcaccccgccaagctgcagctgaagagcaccgagtgcggcccccccaagggcaagaacagacccagcagcctgaacctggaccccgccatccccatcgccgacctgttctggttcgagaacgtggccagcttcagcagccccggcatgcaggtgagcgagcccggcgaccccaaggtgacctggatgaccagcagctactgcaaggccgacccctggagagtgtacagccaggacccccaggacctggacatcgtggcccacgccctgaccggcagaagaaacagcgcccccgtgagcgtgagcgccgtgagaaccagcttcatggtgaagatgtgccaggccagagccgtgcccgtgatcccccccaagatccagtacacccagatcccccagcccctgcccagccagagcagcggcgagaacggcgtgcagcccctggagagaagccaggagggccccagcagcaccagcggcaccacccagaagcccgccaaggacgacagccccagcagcctggagagcagcaaggaggagaagcccaagcaggaccccggcgccatcaagagcagccccgtggacgccaccgccccctgcatgtgcgagggccccaccctgagccccgagcccggcagcagcaacctgctgagcacccaggacgccgtggtgcagtgcagaaagagaatgagcgagaccgagcccagcggcgacaacctgctgagcagcaagctggagagacccagcggcggcagcaagcccttccacagaagcagacccggcagaccccagagcctgatcctgttcagcccccccttccccatcatggaccacctgccccccagcagcaccgtgaccgacagcaaggtgctgctgagccccatcagaagccccacccagaccgtgagccccggcctgctgtgcggcgagctggccgagaacacctgggtgacccccgagggcgtgaccctgagaaacaagatgaccatccccaagaacggccagagactggagaccagcaccagctgcttctaccagccccagagaagaagcgtgatcctggacggcagaagcggcagacagatcgagtag

SEQ ID NO: 205630 - DNA, 3300 bp, Artificial Sequence
  derived and/or modified sequence
atgaagaacaagggcgccaagcagaagctgaagagaaagggcgccgccagcgccttcggctgcgacctgaccgagtacctggagagcagcggccaggacgtgccctacgtgctgaagagctgcgccgagttcatcgagacccacggcatcgtggacggcatctacagactgagcggcgtgaccagcaacatccagagactgagacaggagttcggcagcgaccagtgccccgacctgaccagagaggtgtacctgcaggacatccactgcgtgggcagcctgtgcaagctgtacttcagagagctgcccaaccccctgctgacctacgagctgtacgagaagttcaccgaggccgtgagccactgccccgaggagggccagctggccagaatccagaacgtgatccaggagctgccccccagccactacagaaccctggagtacctgatcagacacctggcccacatcgccagcttcagcagcaagaccaacatgcacgccagaaacctggccctggtgtgggcccccaacctgctgagaagcaaggagatcgaggccaccggctgcaacggcgacgccgccttcctggccgtgagagtgcagcaggtggtgatcgagttcatcctgaaccacgtggaccagatcttcaacaacggcgcccccggcagcctggagaacgacgagaacagacccatcatgaagagcctgaccctgcccgccctgagcctgcccatgaagctggtgagcctggaggaggcccaggccagaagcctggccaccaaccaccccgccagaaaggagagaagagagaacagcctgcccgagatcgtgccccccatgggcaccctgttccacaccgtgctggagctgcccgacaacaagagaaagctgagcagcaagagcaagaagtggaagagcatcttcaacctgggcagaagcggcagcgacagcaagagcaagctgagcagaaacggcagcgtgttcgtgagaggccagagactgagcgtggagaaggccaccatcagacccgccaagagcatggacagcctgtgcagcgtgcccgtggagggcaaggagaccaagggcaacttcaacagaaccgtgaccaccggcggcttcttcatccccgccaccaagatgcacagcaccggcaccggcagcagctgcgacctgaccaagcaggagggcgagtggggccaggagggcatgccccccggcgccgagggcggcttcgacgtgagcagcgacagaagccacctgcagggcgcccaggccagacccccccccgagcagctgaaggtgttcagacccgtggaggaccccgagagcgagcagaccgcccccaagatgctgggcatgttctacaccagcaacgacagccccagcaagagcgtgttcaccagcagcctgttccagatggagcccagccccagaaaccagagaaaggccctgaacatcagcgagcccttcgccgtgagcgtgcccctgagagtgagcgccgtgatcagcaccaacagcaccccctgcagaaccccccccaaggagctgcagagcctgagcagcctggaggagttcagcttccacggcagcgagagcggcggctggcccgaggaggagaagcccctgggcgccgagaccagcgccgccagcgtgcccaagaaggccggcctggaggacgccaaggccgtgcccgaggcccccggcaccgtggagtgcagcaagggcctgagccaggagcccggcgcccacctggaggagaagaagacccccgagagcagcctgagcagccagcacctgaacgagctggagaagagacccaaccccgagaaggtggtggaggagggcagagaggccggcgagatggagagcagcaccctgcaggagagccccagagccagagccgaggccgtgctgctgcacgagatggacgaggacgacctggccaacgccctgatctggcccgagatccagcaggagctgaagatcatcgagagcgaggaggagctgagcagcctgcccccccccgccctgaagaccagccccatccagcccatcctggagagcagcctgggccccttcatccccagcgagccccccggcagcctgccctgcggcagcttccccgcccccgtgagcacccccctggaggtgtggaccagagaccccgccaaccagagcacccagggcgccagcaccgccgccagcagagagaagcccgagcccgagcagggcctgcaccccgacctggccagcctggcccccctggagatcgtgcccttcgagaaggccagcccccaggccaccgtggaggtgggcggccccggcaacctgagcccccccctgccccccgccccccccccccccacccccctggaggagagcacccccgtgctgctgagcaagggcggccccgagagagaggacagcagcagaaagctgagaaccgacctgtacatcgaccagctgaagagccaggacagccccgagatcagcagcctgtgccagggcgaggaggccacccccagacacagcgacaagcagaacagcaagaacgccgccagcgagggcaagggctgcggcttccccagccccaccagagaggtggagatcgtgagccaggaggaggaggacgtgacccacagcgtgcaggagcccagcgactgcgacgaggacgacaccgtgaccgacatcgcccagcacggcctggagatggtggagccctgggaggagccccagtgggtgaccagccccctgcacagccccaccctgaaggacgcccacaaggcccaggtgcagggcctgcagggccaccagctggagaagagactgagccacagacccagcctgagacagagccacagcctggacagcaagcccaccgtgaagagccagtggaccctggaggtgcccagcagcagcagctgcgccaacctggagaccgagagaaacagcgaccccctgcagccccaggcccccagaagagagatcaccggctgggacgagaaggccctgagaagcttcagagagttcagcggcctgaagggcgccgaggccccccccaaccagaagggccccagcggcgtgcagcccaaccccgcccagcccgtgggccccctgagaaacctgcccaagatgatcctgccccccccctggaaggcccagagaaagaagaaccagagcaagatccccgagcccctgagcccccaccagtggatgcccctgcaccccgcctgcgccagagacctgcccttcctgcagaaccaggccagactgacctgcagcccccccagaatgcagtag

SEQ ID NO: 205631 - protein, 453 aa, Artificial Sequence
  derived and/or modified sequence
MGSVLGLCSMASWIPCLCGSAPCLLCRCCPSGNNSTVTRLIYALFLLVGVCVACVMLIPGMEEQLNKIPGFCENEKGVVPCNILVGYKAVYRLCFGLAMFYLLLSLLMIKVKSSSDPRAAVHNGFWFFKFAAAIAIIIGAFFIPEGTFTTVWFYVGMAGAFCFILIQLVLLIDFAHSWNESWVEKMEEGNSRCWYAALLSATALNYLLSLVAIVLFFVYYTHPASCSENKAFISVNMLLCVGASVMSILPKIQESQPRSGLLQSSVITVYTMYLTWSAMTNEPETNCNPSLLSIIGYNTTSTVPKEGQSVQWWHAQGIIGLILFLLCVFYSSIRTSNNSQVNKLTLTSDESTLIEDGGARSDGSLEDGDDVHRAVDNERDGVTYSYSFFHFMLFLASLYIMMTLTNWYRYEPSREMKSQWTAVWVKISSSWIGIVLYVWTLVAPLVLTNRDFD

SEQ ID NO: 205632 - DNA, 1362 bp, Artificial Sequence
  derived and/or modified sequence
atgggcagcgtgctgggcctgtgcagcatggccagctggatcccctgcctgtgcggcagcgccccctgcctgctgtgcagatgctgccccagcggcaacaacagcaccgtgaccagactgatctacgccctgttcctgctggtgggcgtgtgcgtggcctgcgtgatgctgatccccggcatggaggagcagctgaacaagatccccggcttctgcgagaacgagaagggcgtggtgccctgcaacatcctggtgggctacaaggccgtgtacagactgtgcttcggcctggccatgttctacctgctgctgagcctgctgatgatcaaggtgaagagcagcagcgaccccagagccgccgtgcacaacggcttctggttcttcaagttcgccgccgccatcgccatcatcatcggcgccttcttcatccccgagggcaccttcaccaccgtgtggttctacgtgggcatggccggcgccttctgcttcatcctgatccagctggtgctgctgatcgacttcgcccacagctggaacgagagctgggtggagaagatggaggagggcaacagcagatgctggtacgccgccctgctgagcgccaccgccctgaactacctgctgagcctggtggccatcgtgctgttcttcgtgtactacacccaccccgccagctgcagcgagaacaaggccttcatcagcgtgaacatgctgctgtgcgtgggcgccagcgtgatgagcatcctgcccaagatccaggagagccagcccagaagcggcctgctgcagagcagcgtgatcaccgtgtacaccatgtacctgacctggagcgccatgaccaacgagcccgagaccaactgcaaccccagcctgctgagcatcatcggctacaacaccaccagcaccgtgcccaaggagggccagagcgtgcagtggtggcacgcccagggcatcatcggcctgatcctgttcctgctgtgcgtgttctacagcagcatcagaaccagcaacaacagccaggtgaacaagctgaccctgaccagcgacgagagcaccctgatcgaggacggcggcgccagaagcgacggcagcctggaggacggcgacgacgtgcacagagccgtggacaacgagagagacggcgtgacctacagctacagcttcttccacttcatgctgttcctggccagcctgtacatcatgatgaccctgaccaactggtacagatacgagcccagcagagagatgaagagccagtggaccgccgtgtgggtgaagatcagcagcagctggatcggcatcgtgctgtacgtgtggaccctggtggcccccctggtgctgaccaacagagacttcgactag

SEQ ID NO: 205633 - DNA, 1362 bp, Artificial Sequence
  derived and/or modified sequence
atgggttccgtcctcgggctgtgctctatggcctcctggattccatgcctctgcggctccgctccgtgcttactgtgcagatgctgcccgagtggaaacaattcaaccgttacacggcttatttacgctttgtttctgcttgtgggggtgtgtgtggcctgtgtcatgctcatccccgggatggaggagcaacttaataagatccccggcttttgcgagaacgagaagggtgtggttccttgtaatatcctggtgggatataaggctgtgtacagactgtgctttggcctcgcaatgttctatctgctgctgtcgctgctgatgattaaggttaaaagctcgtcagatcccagggccgccgttcacaacggcttttggttcttcaagtttgctgccgctatcgccatcataatcggagcctttttcatcccagagggtacattcaccacggtgtggttttacgtgggaatggcaggggctttttgttttattctaatccagctggtcttgttgatcgactttgcccatagctggaacgagtcctgggttgagaaaatggaagaaggtaacagcaggtgctggtatgcggcccttttgtctgctactgccctgaattacctgcttagcctggtggctatagtgttatttttcgtctattacactcatccagcatcctgctccgagaacaaggcgttcatttcggtgaatatgctgctttgcgtaggtgcatcggttatgagtatcctgcctaagattcaggagagccagccgcggagtggattgctgcagagttccgtgataacagtgtacactatgtatctgacatggagcgcaatgacaaatgaacccgaaacaaattgcaatccttccttgctgtccataataggttacaacacgaccagcacagtgccaaaggagggacagagtgtccaatggtggcacgcccagggcataatagggctgatcctattcctgctctgcgtgttttatagttctattcgcacaagtaataactcccaggtgaacaaactgaccctcacctcagatgagtccacactaatcgaagacgggggcgcacggtccgacggctctctcgaagatggggacgacgttcatagagccgtcgataatgagcgtgacggcgtgacttacagctattccttctttcactttatgttgttcctcgctagcttgtatattatgatgaccctcaccaattggtacagatatgaaccatctagggagatgaagagccagtggaccgctgtgtgggtgaagatcagcagctcttggattggcatcgtcctttacgtgtggacactggttgctcctttagtgctcaccaatcgcgattttgattag

SEQ ID NO: 205634 - DNA, 1362 bp, Artificial Sequence
  derived and/or modified sequence
atgggatcagtgttgggtctgtgctctatggcaagttggataccctgcctctgtgggtctgcaccatgtttgctctgtcgctgttgtccaagtggaaataacagtactgtcacacggctaatctacgctttgttcctcttagtgggtgtgtgcgtggcgtgcgtgatgctcatcccaggcatggaagagcagctgaataagattcccggattctgcgagaatgaaaagggagtcgtgccttgtaacattctcgtgggctataaggcagtgtatagactatgtttcggcttggccatgttttatctgctcctctcactgctcatgatcaaagtaaaaagcagctctgatcctcgcgccgccgtccataatggattttggtttttcaaattcgcagccgcaatcgctatcattattggcgccttcttcatacctgaggggactttcactactgtttggttctatgtggggatggctggagcgttctgttttatcttgatccaacttgtgttgctgatagatttcgctcattcttggaatgagagctgggtcgaaaaaatggaggaaggtaactcaaggtgttggtatgcggcgctcctctccgctactgccctaaactacctgctgtcattggtggctatcgttctgttttttgtctactatacacaccccgcttcctgttccgagaataaagctttcatttcggtcaatatgctcttgtgtgttggtgcaagcgtaatgagtatacttccaaaaatccaggaatctcaaccgcgctccgggctcctccagtcgagcgttattacggtgtatacgatgtatttgacttggtccgctatgacaaatgaaccggaaactaactgtaacccttccctgttgtccattatcggctacaatactacaagcacagtccccaaggagggtcagtctgtacagtggtggcatgctcaggggattattggcctgatcctgtttctgctatgcgtgttctacagcagcatccgcacttctaataattctcaggtgaataaattaacccttactagcgacgagtctaccctgattgaggatgggggtgcacggtctgacgggagtcttgaagatggggacgatgtgcaccgagcagtggataatgagagagatggtgtgacctacagttactccttctttcacttcatgctgttcctggcctcgttgtatataatgatgaccctcaccaattggtacaggtacgagccttcgcgcgaaatgaagtcccaatggaccgccgtatgggtgaaaatatcctcatcctggataggtattgttctttacgtttggactctggtggccccactggttctgacaaatagggactttgattag

SEQ ID NO: 205635 - DNA, 1362 bp, Artificial Sequence
  derived and/or modified sequence
atgggctctgtgctgggcctgtgcagcatggcctcctggatcccctgcctgtgtggcagcgccccctgcctgctgtgccgctgctgccccagcggcaacaacagcacagtgaccaggctcatctatgccctcttcctgctggtgggcgtgtgtgtggcctgtgtgatgctgatccctggcatggaggagcagctgaacaagatccctggcttctgtgaaaatgagaagggcgtggtgccctgcaacatcctggtgggctacaaggctgtgtaccgcctgtgcttcggcctggccatgttctacctgctgctgagcctgctgatgatcaaggtgaagagcagcagtgaccccagggctgctgtgcacaacggcttctggttcttcaagtttgctgctgccatcgccatcatcatcggggccttcttcatccctgagggcaccttcaccaccgtgtggttctacgtgggcatggccggggccttctgcttcatcctgatccagctggtgctgctgattgactttgcccacagctggaatgaatcctgggtggagaagatggaggagggcaacagccgctgctggtacgccgccctgctgagcgccacagccctgaactacctgctgagcctggtggccatcgtgctcttctttgtgtactacacccacccagccagctgcagcgagaacaaggccttcatctctgtgaacatgctgctgtgtgtgggcgcctctgtgatgagcatcctgcccaagatccaggagagccagcccaggagcggcctgctgcagagcagcgtcatcaccgtgtacaccatgtacctgacctggagcgccatgaccaatgaacctgagaccaactgcaaccccagcctgctgagcatcatcggctacaacaccaccagcacagtgcccaaggagggccagagcgtgcagtggtggcacgcccagggcatcatcggcctcatcctcttcctgctgtgtgtgttctacagcagcatccgcaccagcaacaacagccaggtgaacaagctgaccctgaccagtgatgagagcaccctgattgaagatggaggagcccggagtgatggcagcctggaggatggagatgatgtgcacagagctgtggacaatgaaagagatggagtgacctacagctacagcttcttccacttcatgctgttcctggccagcctgtacatcatgatgaccctgaccaactggtaccgctatgagcccagccgggagatgaagagccagtggacagctgtgtgggtgaagatcagcagctcctggattggcatcgtgctgtatgtgtggaccctggtggcccccctggtgctgaccaacagagactttgattag

SEQ ID NO: 205636 - DNA, 1362 bp, Artificial Sequence
  derived and/or modified sequence
atgggcagcgtgctgggcctgtgcagcatggccagctggatcccctgtctgtgtggcagcgccccctgtctcctgtgtcgctgttgtcccagcgggaacaactccaccgttacaaggctgatatacgccttattcctgttagtcggggtctgcgtcgcctgtgtaatgctgatacctggtatggaggagcaactcaacaagataccaggattctgcgagaatgaaaaaggggtggtgccctgcaacattctggtgggttataaggccgtctacaggctgtgctttgggttggccatgttttacctcctgctaagtttacttatgatcaaagttaagtccagtagcgacccaagggccgccgttcacaacggtttctggttcttcaagtttgcagccgccatcgccatcatcattggagcattcttcattccagaaggaacattcaccacggtctggttctatgttggcatggccggcgcattttgcttcatcctcatacaacttgtcttgctgattgattttgcacactcctggaatgaatcttgggtggaaaagatggaggagggtaatagtagatgctggtacgccgccctcctgagcgctacagctttgaattatctcctctccctggtcgcaatcgttttattctttgtgtactatacacacccagcttcctgttctgagaataaagccttcattagcgtgaacatgctgctgtgcgtgggtgcgagtgtaatgtccatcctgcccaagatccaggagtcacagccccgaagtggtcttttgcagtcttcggttattacagtctacactatgtacttgacttggtccgctatgactaacgaaccggagaccaactgcaacccgagtctcctgagcatcattggatacaacacaacctcaaccgtgccaaaggaaggtcagtccgtgcagtggtggcatgcacaggggattataggcctcatattgttcctcctgtgcgtcttctactcaagtatcagaacttccaataactcacaagtcaacaaactgaccctgacaagtgacgaaagtacactcatagaggacgggggcgctcgctctgatggttccctcgaagatggcgacgacgtgcatagagctgtcgacaacgagcgggatggcgtcacctactcctactccttttttcacttcatgctgttcctggcctctctgtatattatgatgacccttaccaattggtaccgatacgagccttctcgcgagatgaagagccagtggaccgccgtgtgggtgaagattagctcttcctggatcggcattgtactatacgtatggactttggtagctcccctcgtgctgaccaaccgagatttcgactag

SEQ ID NO: 205637 - DNA, 1362 bp, Artificial Sequence
  derived and/or modified sequence
atgggcagcgtgctgggcctgtgcagcatggccagctggatcccctgtctgtgcggatctgctccatgtctactgtgccggtgttgcccctctggaaataacagtacagtgacacgcctcatttacgccctgtttctgctggtgggtgtgtgcgttgcttgcgtgatgcttatacccgggatggaggaacagcttaataagattcctgggttttgcgagaacgagaagggtgtggtgccatgcaacatcctggtggggtacaaagccgtctaccgcctgtgctttgggttggctatgttttacctcctgttatccttgctcatgatcaaagtgaaaagcagctccgatccccgagctgccgtgcacaatgggttctggttctttaagtttgctgccgctatagcaattatcatcggagccttcttcattccagaaggcaccttcacgactgtgtggttctatgtagggatggcgggtgcgttctgcttcatcttgatacaattggtactgctcattgattttgcacacagttggaatgaatcatgggtcgagaagatggaggaaggcaatagcaggtgttggtacgcggcacttctgtctgctacagctctgaattatctgttgtcacttgttgccatagtcctgtttttcgtgtactacacacaccccgcatcctgctccgaaaacaaagctttcatttctgtgaatatgctgctctgcgttggagcatctgtgatgtccatcttgccgaaaatccaggaaagccagccacggtctgggctgctgcagtcctctgtaattactgtttacacaatgtatcttacatggtccgctatgaccaacgagcctgagacaaattgcaatccgtcactcctgagcataataggctataacactacctcgacagtgcctaaagaggggcagtccgtgcagtggtggcatgcccagggcattattggactgatcttatttctgctctgtgtcttttatagcagcattagaacctccaataatagccaggtgaataagctgacactgacaagtgacgaaagcacactgatcgaggatggcggagccagatccgatggttccttggaggatggcgacgatgtccacagagcggtagataatgagcgggatggcgtcacgtattcctactctttttttcactttatgctctttttggcttctttgtacataatgatgactcttacgaattggtataggtatgaaccatcaagagagatgaagtcacaatggaccgcggtttgggtgaaaataagttcaagctggatcggcatcgtgctgtacgtctggaccctcgtcgcccctctcgtcttaacaaaccgggattttgattag

SEQ ID NO: 205638 - DNA, 1362 bp, Artificial Sequence
  derived and/or modified sequence
atgggctccgtcctcgggctgtgtagcatggcctcctggatcccatgtctgtgcgggtccgcgccatgcctactgtgccggtgttgcccttccggaaacaattccactgtcacccggctgatctacgcgctgttcctgctggttggagtttgtgtggcttgcgttatgctcatcccgggtatggaggaacagctaaataagattcctggcttttgcgaaaatgagaaaggcgtcgtcccctgtaacatcctcgtaggttataaggctgtatataggttgtgttttggactcgccatgttttatttgctgttgtctttactaatgatcaaggtgaaatcctccagcgaccctcgagcagcagtacacaacggattctggttctttaagtttgcggctgctatcgctattatcatcggtgctttctttatccctgaaggcaccttcactaccgtttggttttatgtagggatggccggagccttttgtttcatcctcattcagctggtactgctgatcgattttgcacactcgtggaacgaatcctgggtggaaaaaatggaagaaggtaacagcaggtgttggtatgcagccctgctctcagcaacagcccttaattaccttttatcactggttgcaatcgtattgttcttcgtttattacacacacccagcatcatgctcagaaaataaggctttcatctctgttaacatgctcctttgtgtgggcgcaagcgtcatgtcaattctccctaaaatccaggaaagccagccaagaagtggactgcttcagtcatccgtgatcaccgtttatacgatgtatctcacgtggtcagctatgaccaacgaacccgagactaactgtaaccctagcttgttaagcatcatcggctacaatacaactagcacagtcccaaaagaggggcagtccgtgcagtggtggcacgctcaggggatcattgggttaattctgtttctcctgtgcgtgttttactcttcaattagaacttctaataactcacaagtcaataagttgactttaacctccgacgagtcaactctgatcgaggatggtggagcaagatcggatggtagtctcgaggacggggatgacgtgcaccgtgcagttgacaacgaacgcgatggcgtgacatacagttactccttctttcattttatgctctttctggctagcttatatataatgatgaccctgactaattggtacagatacgagccttcacgcgagatgaagtctcagtggacggctgtatgggtcaaaatcagctcttcttggatcggaatcgtgctgtatgtgtggacgctcgtggctccccttgtgttgacgaacagagacttcgactag

SEQ ID NO: 205639 - DNA, 1362 bp, Artificial Sequence
  derived and/or modified sequence
atgggcagcgtgctcggcctgtgctccatggcctcctggattccatgtctctgcggcagcgctccctgccttctttgccgctgctgccccagcggcaataactcgaccgtcacgaggttaatttatgccttgtttctgctggtcggcgtttgtgttgcctgcgtgatgcttatccctggcatggaggagcagcttaacaaaattccagggttttgtgaaaatgaaaagggcgtggtgccatgtaatattctggtaggctataaagccgtgtataggttgtgcttcggtttggccatgttctatctgctgctgagcttgttgatgattaaagtcaagtctagttccgacccccgagccgcagtgcataacgggttttggtttttcaaattcgctgcagccattgctattataatcggagccttctttatccccgaaggtacattcaccactgtctggttttacgtgggaatggcaggcgctttctgtttcatcctcatacaattggtgcttctcatagattttgcacactcttggaacgagagttgggtggagaaaatggaggaaggaaattctcgctgttggtatgctgcgttgctctcagcaacagctctcaactacctactgtcactggtggccatagtcctgttttttgtatactacacacatccagcaagctgtagtgagaataaggctttcatcagcgtcaacatgctgttatgcgtgggcgcatccgttatgtcaatcctcccaaaaattcaggaatcgcaacctcgcagtggcctgttgcagagctccgtgataactgtgtacacaatgtatctgacctggtccgcaatgaccaatgaaccagagacgaactgtaacccaagcctactgtccatcatcggttacaatactacgtcaaccgtccctaaagagggacagagtgtgcagtggtggcacgctcagggcatcatcggactgattctattccttctgtgtgttttttactccagcattcgaacctcaaataattcgcaggttaacaagttgactctgacttccgatgaaagcaccttaatcgaggacgggggagccagatccgacggctcacttgaagatggagatgatgtccatagggccgtggacaacgaaagagatggcgttacgtacagctattccttctttcactttatgctgtttctggccagcctatatatcatgatgactcttaccaactggtaccgttacgagccaagtcgcgaaatgaaaagccagtggaccgccgtgtgggtaaaaatctcatcctcctggattggtattgtcctgtatgtctggacacttgtcgctccacttgttctgactaaccgggattttgactag

SEQ ID NO: 205640 - DNA, 3128 bp, Artificial Sequence
  derived and/or modified sequence
aatctcggaaaggcgagaaagaagctgtctccatcttgtctgtatccgctgctcttgtgacgttgtggagatggggagcgtcctggggctgtgctccatggcgagctggataccatgtttgtgtggaagtgccccgtgtttgctatgccgatgctgtcctagtggaaacaactccactgtaactagattgatctatgcacttttcttgcttgttggagtatgtgtagcttgtgtaatgttgataccaggaatggaagaacaactgaataagattcctggattttgtgagaatgagaaaggtgttgtcccttgtaacattttggttggctataaagctgtatatcgtttgtgctttggtttggctatgttctatcttcttctctctttactaatgatcaaagtgaagagtagcagtgatcctagagctgcagtgcacaatggattttggttctttaaatttgctgcagcaattgcaattattattggggcattcttcattccagaaggaacttttacaactgtgtggttttatgtaggcatggcaggtgccttttgtttcatcctcatacaactagtcttacttattgattttgcacattcatggaatgaatcgtgggttgaaaaaatggaagaagggaactcgagatgttggtatgcagccttgttatcagctacagctctgaattatctgctgtctttagttgctatcgtcctgttctttgtctactacactcatccagccagttgttcagaaaacaaggcgttcatcagtgtcaacatgctcctctgcgttggtgcttctgtaatgtctatactgccaaaaatccaagaatcacaaccaagatctggtttgttacagtcttcagtaattacagtctacacaatgtatttgacatggtcagctatgaccaatgaaccagaaacaaattgcaacccaagtctactaagcataattggctacaatacaacaagcactgtcccaaaggaagggcagtcagtccagtggtggcatgctcaaggaattataggactaattctctttttgttgtgtgtattttattccagcatccgtacttcaaacaatagtcaggttaataaactgactctaacaagtgatgaatctacattaatagaagatggtggagctagaagtgatggatcactggaggatggggacgatgttcaccgagctgtagataatgaaagggatggtgtcacttacagttattccttctttcacttcatgcttttcctggcttcactttatatcatgatgacccttaccaactggtacaggtatgaaccctctcgtgagatgaaaagtcagtggacagctgtctgggtgaaaatctcttccagttggattggcatcgtgctgtatgtttggacactcgtggcaccacttgttcttacaaatcgtgattttgactgagtgagacttctagcatgaaagtcccactttgattattgcttatttgaaaacagtattcccaacttttgtaaagttgtgtatgtttttgcttcccatgtaacttctccagtgttctggcatgaattagattttactgcttgtcattttgttattttcttaccaagtgcattgatatgtgaagtagaatgaattgcagaggaaagttttatgaatatggtgatgagttagtaaaagtggccattattgggcttattctctgctctatagttgtgaaatgaagagtaaaaacaaatttgtttgactattttaaaattatattagaccttaagctgttttagcaagcattaaagcaaatgtatggctgccttttgaaatatttgatgtgttgcctggcaggatactgcaaagaacatggtttattttaaaatttataaacaagtcacttaaatgccagttgtctgaaaaatcttataaggttttacccttgatacggaatttacacaggtagggagtgtttagtggacaatagtgtaggttatggatggaggtgtcggtactaaattgaataacgagtaaataatcttacttgggtagagatggcctttgccaacaaagtgaactgttttggttgttttaaactcatgaagtatgggttcagtggaaatgtttggaactctgaaggatttagacaaggttttgaaaaggataatcatgggttagaaggaagtgtttgaaagtcactttgaaagttagttttgggccagcacggtagctcacccttgtaatcccagcactttgggaggctgaggtgggtagattacttgagcccaggaattcaagaccagcctgggcaacatggtgaaaccctgtttctataaaaaataatctgggctttgtagcatatgcctgtggtcccagctactgaggaggctgaggtgggaggattgcttgagcccaggaggcagaggttgcagtgagccaaggtcacgtcactgcactctagcctgggcaacagagtaagacaaaaaaatatatatatattgaaaatcaaaggaggcaaaattttgacagggaaggaagtaactgcaaaacactaggctttagtaggtacttatataaaatctagtccagttctctcatttaaaaaaatgaagacactgaaatacagacttaaatagctcagatagctaattaggaaatttcaagttggccaataatagcattctctctgacatttaaaaataatttctattcaaaatacatgcataattgattttacacctcattactggtggataatttatgtgatgtggattgctggtgtccagcatgacccataaacaggtcagaagaatgatggaatgttttagaataaactcctgcttatagtatactacacagttcaaaagatgtttaaaatgcttttgtatttactgccatgtaattgaaatatatagattattgtaacctttcaacctgaaaatcaagcagtatgagagtttagttatttgtatgtgtcactagtgtctaatgaagcttttaaaatctacaatttcttctttaaaaatatttattaatgtgaatggaatataacaattcagcttaattccccaaccttattctgtgtgtagacattgtattccacaattttgaatggctgtgttttacctctaaataaatgaattcagagaaagtg

SEQ ID NO: 205641 - DNA, 3382 bp, Artificial Sequence
  derived and/or modified sequence
tcaattgtatcaacttgtttaattcagttatgggaatgtttattatgcaccaggcattctattagctgctaggcacataaacatgacaaaacgtgatcactaccaaaaagatgttaccttccataggaagtatgtatgtccaagttctcaaatctcaaaatcaaattaatttcagagtgtgtcatctttaaacgaaagaaaaaccatttttaagattcctctcctttagcactgagccttgtggagccttgaccttgtgagacctcggaaaggcgagaaagaagctgtctccatcttgtctgtatccgctgctcttgtgacgttgtggagatggggagcgtcctggggctgtgctccatggcgagctggataccatgtttgtgtggaagtgccccgtgtttgctatgccgatgctgtcctagtggaaacaactccactgtaactagattgatctatgcacttttcttgcttgttggagtatgtgtagcttgtgtaatgttgataccaggaatggaagaacaactgaataagattcctggattttgtgagaatgagaaaggtgttgtcccttgtaacattttggttggctataaagctgtatatcgtttgtgctttggtttggctatgttctatcttcttctctctttactaatgatcaaagtgaagagtagcagtgatcctagagctgcagtgcacaatggattttggttctttaaatttgctgcagcaattgcaattattattggggcattcttcattccagaaggaacttttacaactgtgtggttttatgtaggcatggcaggtgccttttgtttcatcctcatacaactagtcttacttattgattttgcacattcatggaatgaatcgtgggttgaaaaaatggaagaagggaactcgagatgttggtatgcagccttgttatcagctacagctctgaattatctgctgtctttagttgctatcgtcctgttctttgtctactacactcatccagccagttgttcagaaaacaaggcgttcatcagtgtcaacatgctcctctgcgttggtgcttctgtaatgtctatactgccaaaaatccaagaatcacaaccaagatctggtttgttacagtcttcagtaattacagtctacacaatgtatttgacatggtcagctatgaccaatgaaccagaaacaaattgcaacccaagtctactaagcataattggctacaatacaacaagcactgtcccaaaggaagggcagtcagtccagtggtggcatgctcaaggaattataggactaattctctttttgttgtgtgtattttattccagcatccgtacttcaaacaatagtcaggttaataaactgactctaacaagtgatgaatctacattaatagaagatggtggagctagaagtgatggatcactggaggatggggacgatgttcaccgagctgtagataatgaaagggatggtgtcacttacagttattccttctttcacttcatgcttttcctggcttcactttatatcatgatgacccttaccaactggtacaggtatgaaccctctcgtgagatgaaaagtcagtggacagctgtctgggtgaaaatctcttccagttggattggcatcgtgctgtatgtttggacactcgtggcaccacttgttcttacaaatcgtgattttgactgagtgagacttctagcatgaaagtcccactttgattattgcttatttgaaaacagtattcccaacttttgtaaagttgtgtatgtttttgcttcccatgtaacttctccagtgttctggcatgaattagattttactgcttgtcattttgttattttcttaccaagtgcattgatatgtgaagtagaatgaattgcagaggaaagttttatgaatatggtgatgagttagtaaaagtggccattattgggcttattctctgctctatagttgtgaaatgaagagtaaaaacaaatttgtttgactattttaaaattatattagaccttaagctgttttagcaagcattaaagcaaatgtatggctgccttttgaaatatttgatgtgttgcctggcaggatactgcaaagaacatggtttattttaaaatttataaacaagtcacttaaatgccagttgtctgaaaaatcttataaggttttacccttgatacggaatttacacaggtagggagtgtttagtggacaatagtgtaggttatggatggaggtgtcggtactaaattgaataacgagtaaataatcttacttgggtagagatggcctttgccaacaaagtgaactgttttggttgttttaaactcatgaagtatgggttcagtggaaatgtttggaactctgaaggatttagacaaggttttgaaaaggataatcatgggttagaaggaagtgtttgaaagtcactttgaaagttagttttgggccagcacggtagctcacccttgtaatcccagcactttgggaggctgaggtgggtagattacttgagcccaggaattcaagaccagcctgggcaacatggtgaaaccctgtttctataaaaaataatctgggctttgtagcatatgcctgtggtcccagctactgaggaggctgaggtgggaggattgcttgagcccaggaggcagaggttgcagtgagccaaggtcacgtcactgcactctagcctgggcaacagagtaagacaaaaaaatatatatatattgaaaatcaaaggaggcaaaattttgacagggaaggaagtaactgcaaaacactaggctttagtaggtacttatataaaatctagtccagttctctcatttaaaaaaatgaagacactgaaatacagacttaaatagctcagatagctaattaggaaatttcaagttggccaataatagcattctctctgacatttaaaaataatttctattcaaaatacatgcataattgattttacacctcattactggtggataatttatgtgatgtggattgctggtgtccagcatgacccataaacaggtcagaagaatgatggaatgttttagaataaactcctgcttatagtatactacacagttcaaaagatgtttaaaatgcttttgtatttactgccatgtaattgaaatatatagattattgtaacctttcaacctgaaaatcaagcagtatgagagtttagttatttgtatgtgtcactagtgtctaatgaagcttttaaaatctacaatttcttctttaaaaatatttattaatgtgaatggaatataacaattcagcttaattccccaaccttattctgtgtgtagacattgtattccacaattttgaatggctgtgttttacctctaaataaatgaattcagag

SEQ ID NO: 205642 - protein, 4700 aa, Artificial Sequence
  derived and/or modified sequence
MANVQVAVRVRPLSKRETKEGGRIIVEVDGKVAKIRNLKVDNRPDGFGDSREKVMAFGFDYCYWSVNPEDPQYASQDVVFQDLGMEVLSGVAKGYNICLFAYGQTGSGKTYTMLGTPASVGLTPRICEGLFVREKDCASLPSSCRIKVSFLEIYNERVRDLLKQSGQKKSYTLRVREHPEMGPYVQGLSQHVVTNYKQVIQLLEEGIANRITAATHVHEASSRSHAIFTIHYTQAILENNLPSEMASKINLVDLAGSERADPSYCKDRIAEGANINKSLVTLGIVISTLAQNSQVFSSCQSLNSSVSNGGDSGILSSPSGTSSGGAPSRRQSYIPYRDSVLTWLLKDSLGGNSKTIMVATVSPAHTSYSETMSTLRYASSAKNIINKPRVNEDANLKLIRELREEIERLKALLLSFELRNFSSLSDENLKELVLQNELKIDQLTKDWTQKWNDWQALMEHYSVDINRRRAGVVIDSSLPHLMALEDDVLSTGVVLYHLKEGTTKIGRIDSDQEQDIVLQGQWIERDHCTITSACGVVVLRPARGARCTVNGREVTASCRLTQGAVITLGKAQKFRFNHPAEAAVLRQRRQVGEAAAGRGSLEWLDLDGDLAASRLGLSPLLWKERRALEEQCDEDHQTPRDGETSHRAQIQQQQSYVEDLRHQILAEEIRAAKELEFDQAWISQQIKENQQCLLREETWLASLQQQQQEDQVAEKELEASVALDAWLQTDPEIQPSPFVQSQKRVVHLQLLRRHTLRAAERNVRRKKVSFQLERIIKKQRLLEAQKRLEKLTTLCWLQDDSTQEPPYQVLSPDATVPRPPCRSKLTSCSSLSPQRLCSKHMPQLHSIFLSWDPSTTLPPRPDPTHQTSEKTSSEEHLPQAASYPARTGCLRKNGLHSSGHGQPCTARAALARKGASAPDACLTMSPNSVGIQEMEMGVKQPHQMVSQGLASLRKSANKLKPRHEPKIFTSTTQTRGAKGLADPSHTQAGWRKEGNLGTHKAAKGASCNSLYPHGPRQTAGHGKAVKTFWTEYKPPSPSRASKRHQRVLATRVRNITKKSSHLPLGSPLKRQQNTRDPDTMVPLTDFSPVMDHSREKDNDLSDTDSNYSLDSLSCVYAKALIEPLKPEERKWDFPEPENSESDDSQLSEDSLAEKRYQSPKNRLGGNRPTNNRGQPRTRTRASVRGFTAASDSDLLAQTHRSFSLDSLIDAEEELGEDQQEEPFPGSADEIPTETFWHLEDSSLPVMDQEAICRLGPINYRTAARLDAVLPMSSSFYLDPQFQPHCELQPHCELQPHCELQPHCEQAESQVEPSYSEQADSLQGMQLSRESPLMSMDSWFSCDSKINPSSPPGIVGSLCPSPDMQEFHSCKGERPGYWPNTEELKPSDAETVLPYSSKLHQGSTELLCSARDEHTASAADTSRLSLWGIQRLIQPGADGTFQGRCIPDMTQQGSSEASHNSSVSNVLAASATTLTHVGSTHERDWSALQQKYLLELSCPVLEAIGAPKPAYPYLEEDSGSLAQASSKGGDTLLPVGPRVSSNLNLNNFPVHLSRIRRLRAEKEQDSLNAKLEGVSDFFSTSEKEASYDETYSADLESLSASRSTNAQVFATENAIPDSMTEACEVKQNNLEECLQSCRKPGLMTSSDEDFFQKNACHSNVTTATKADHWSQGWAPLRKNSAVQPGQLSPDSHYPLEEEKTDCQESSKEAVRRHINVSFALPSGPELYLHSAPWNPLSSSLQPPLLETFYVTKSRDALTETALEIPACREVRVPSPPPREAWGFGHNHQALQGAYLKNNLPVLLQNQNSKIASSQQVTAEIPVDLNTREVIRESGKCPGNITEESHDSVYSSVTQNRHFLPSTSTKVCEFENQVVILNKKHSFPALEGGEVTAQSCCGASSDSTESGKSLLFRESEAREEEELDQNTVLRQTINVSLEKDMPGESAVSLKSRSVDRRVSSPVMVAQGGGPTPKWEGKNETGLLEKGLRPKDSSEEFKLPGTKPAYERFQLVACPQERNPSECKSQEMLNPNREPSGKKQNKRVNNTDEMARLIRSVMQLENGILEIESKQNKQVHASHTPGTDKELVFQDQKEQEKTDHAFRPDSSGNPLPSKDQPSSPRQTDDTVFRDSEAGAMEVNSIGNHPQVQKITPNPFRSREGVRESEPVREHTHPAGSDRPARDICDSLGKHTTCREFTNTSLHPQRMKALARALPLQPRLERSSKNNGQFVKASASLKGQPWGLGSLEELETVKGFQESQVAEHVSSSNQEEPKAQGKVEEMPMQRGGSLQEENKVTQKFPSLSQLCRDTFFRQETVSPLLSRTEFCTAPLHQDLSNTLPLNSPRWPRRCLHVPVALGISSLDCVLDLTMLKIHNSPLVTGVEHQDQSTETRSHSPEGNVRGRSSEAHTAWCGSVRSMAMGSHSQSGVPESIPLGTEDRISASTSPQDHGKDLRITLLGFSTSEDFASEAEVAVQKEIRVSSLNKVSSQPEKRVSFSLEEDSDQASKPRQKAEKETEDVGLTSGVSLAPVSLPRVPSPEPRLLEPSDHASMCLAILEEIRQAKAQRKQLHDFVARGTVLSYCETLLEPECSSRVAGRPQCKQIDQSSSDQTRNEGEAPGFHVASLSAEAGQIDLLPDERKVQATSLSADSFESLPNTETDREPWDPVQAFSHAAPAQDRKRRTGELRQFAGASEPFICHSSSSEIIEKKKDATRTPSSADPLAPDSPRSSAPVEEVRRVVSKKVVAALPSQAPYDDPRVTLHELSQSVPQETAEGIPPGSQDSSPEHQEPRTLDTTYGEVSDNLLVTAQGEKTAHFESQSVTCDVQNSTSASGPKQDHVQCPEASTGFEEGRASPKQDTILPGALTRVALEAPTQQCVQCKESVGSGLTEVCRAGSKHSRPIPLPDQRPSANPGGIGEEAPCRHPREALDGPVFSRNPEGSRTLSPSRGKESRTLPCRQPCSSQPVATHAYSSHSSTLLCFRDGDLGKEPFKAAPHTIHPPCVVPSRAYEMDETGEISRGPDVHLTHGLEPKDVNREFRLTESSTCEPSTVAAVLSRAQGCRSPSAPDVRTGSFSHSATDGSVGLIGVPEKKVAEKQASTELEAASFPAGMYSEPLRQFRDSSVGDQNAQVCQTNPEPPATTQGPHTLDLSEGSAESKLVVEPQHECLENTTRCFLEKPQFSTELRDHNRLDSQAKFVARLKHTCSPQEDSPWQEEEQHRDQASGGGEGFAQGVNPLPDEDGLDGCQILDAGREEVAVAKPPVSKILSQGFKDPATVSLRQNETPQPAAQRSGHLYTGREQPAPNHRGSLPVTTIFSGPKHSRSSPTPQFSVVGSSRSLQELNLSVEPPSPTDEDTQGPNRLWNPHLRGYSSGKSVARTSLQAEDSNQKASSRLDDGTTDHRHLKPATPPYPMPSTLSHMPTPDFTTSWMSGTLEQAQQGKREKLGVQVRPENWCSQMDKGMLHFGSSDISPYALPWRPEEPARISWKQYMSGSAVDVSCSQKPQGLTLSNVARCSSMDNGLEDQNSPFHSHLSTYANICDLSTTHSSTENAQGSNEAWEVFRGSSSIALGDPHIPTSPEGVAPTSGHDRRPQFRGPSGEADCLRSKPPLAKGSAAGPVDEIMLLYPSEAGCPVGQTRTNTFEQGTQTLGSRRHWSSTDISFAQPEASAVSAFDLASWTSMHNLSLHLSQLLHSTSELLGSLSQPDVARREQNTKRDIPDKAPQALMMDGSTQTTVDEGSQTDLTLPTLCLQTSEAEPQGANVILEGLGSDTSTVSQEEGDVPGVPQKREAEETAQKMAQLLYLQEESTPYKPQSPSIPSSHLRFQKAPVGQHLPSVSPSVSDAFLPPSSQPEESYCLVVSSPSPSSPHSPGLFPSTSEYPGDSRVQKKLGPTSALFVDRASSPILTLSASTQEPGLSPGSLTLSAPSTHPVEGHQKLDSSPDPVDAPRTPMDNYSQTTDELGGSQRGRSSLQRSNGRSFLELHSPHSPQQSPKLQFSFLGQHPQQLQPRTTIGVQSRLLPPPLRHRSQRLGNSFVPEKVASPEHCPLSGREPSQWQSRTENGGESSASPGEPQRTLDRPSSWGGLQHLSPCPVSELTDTAGLRGSALGLPQACQPEELLCFSCQMCMAPEHQHHSLRDLPVHNKFSNWCGVQKGSPGGLDMTEEELGASGDLSSEKQEQSPPQPPNDHSQDSEWSKREQIPLQVGAQNLSLSVELTEAKLHHGFGEADALLQVLQSGTGEALAADEPVTSTWKELYARQKKAIETLRRERAERLGNFCRTRSLSPQKQLSLLPNKDLFIWDLDLPSRRREYLQQLRKDVVETTRSPESVSRSAHTPSDIELMLQDYQQAHEEAKVEIARARDQLRERTEQEKLRIHQKIISQLLKEEDKLHTLANSSSLCTSSNGSLSSGMTSGYNSSPALSGQLQFPENMGHTNLPDSRDVWIGDERGGHSAVRKNSAYSHRASLGSCCCSPSSLSSLGTCFSSSYQDLAKHVVDTSMADVMAACSDNLHNLFSCQATAGWNYQGEEQAVQLYYKVFSPTRHGFLGAGVVSQPLSRVWAAVSDPTVWPLYYKPIQTARLHQRVTNSISLVYLVCNTTLCALKQPRDFCCVCVEAKEGHLSVMAAQSVYDTSMPRPSRKMVRGEILPSAWILQPITVEGKEVTRVIYLAQVELGAPGFPPQLLSSFIKRQPLVIARLASFLGR

SEQ ID NO: 205643 - DNA, 14103 bp, Artificial Sequence
  derived and/or modified sequence
atggccaacgtgcaggtggccgtgagagtgagacccctgagcaagagagagaccaaggagggcggcagaatcatcgtggaggtggacggcaaggtggccaagatcagaaacctgaaggtggacaacagacccgacggcttcggcgacagcagagagaaggtgatggccttcggcttcgactactgctactggagcgtgaaccccgaggacccccagtacgccagccaggacgtggtgttccaggacctgggcatggaggtgctgagcggcgtggccaagggctacaacatctgcctgttcgcctacggccagaccggcagcggcaagacctacaccatgctgggcacccccgccagcgtgggcctgacccccagaatctgcgagggcctgttcgtgagagagaaggactgcgccagcctgcccagcagctgcagaatcaaggtgagcttcctggagatctacaacgagagagtgagagacctgctgaagcagagcggccagaagaagagctacaccctgagagtgagagagcaccccgagatgggcccctacgtgcagggcctgagccagcacgtggtgaccaactacaagcaggtgatccagctgctggaggagggcatcgccaacagaatcaccgccgccacccacgtgcacgaggccagcagcagaagccacgccatcttcaccatccactacacccaggccatcctggagaacaacctgcccagcgagatggccagcaagatcaacctggtggacctggccggcagcgagagagccgaccccagctactgcaaggacagaatcgccgagggcgccaacatcaacaagagcctggtgaccctgggcatcgtgatcagcaccctggcccagaacagccaggtgttcagcagctgccagagcctgaacagcagcgtgagcaacggcggcgacagcggcatcctgagcagccccagcggcaccagcagcggcggcgcccccagcagaagacagagctacatcccctacagagacagcgtgctgacctggctgctgaaggacagcctgggcggcaacagcaagaccatcatggtggccaccgtgagccccgcccacaccagctacagcgagaccatgagcaccctgagatacgccagcagcgccaagaacatcatcaacaagcccagagtgaacgaggacgccaacctgaagctgatcagagagctgagagaggagatcgagagactgaaggccctgctgctgagcttcgagctgagaaacttcagcagcctgagcgacgagaacctgaaggagctggtgctgcagaacgagctgaagatcgaccagctgaccaaggactggacccagaagtggaacgactggcaggccctgatggagcactacagcgtggacatcaacagaagaagagccggcgtggtgatcgacagcagcctgccccacctgatggccctggaggacgacgtgctgagcaccggcgtggtgctgtaccacctgaaggagggcaccaccaagatcggcagaatcgacagcgaccaggagcaggacatcgtgctgcagggccagtggatcgagagagaccactgcaccatcaccagcgcctgcggcgtggtggtgctgagacccgccagaggcgccagatgcaccgtgaacggcagagaggtgaccgccagctgcagactgacccagggcgccgtgatcaccctgggcaaggcccagaagttcagattcaaccaccccgccgaggccgccgtgctgagacagagaagacaggtgggcgaggccgccgccggcagaggcagcctggagtggctggacctggacggcgacctggccgccagcagactgggcctgagccccctgctgtggaaggagagaagagccctggaggagcagtgcgacgaggaccaccagacccccagagacggcgagaccagccacagagcccagatccagcagcagcagagctacgtggaggacctgagacaccagatcctggccgaggagatcagagccgccaaggagctggagttcgaccaggcctggatcagccagcagatcaaggagaaccagcagtgcctgctgagagaggagacctggctggccagcctgcagcagcagcagcaggaggaccaggtggccgagaaggagctggaggccagcgtggccctggacgcctggctgcagaccgaccccgagatccagcccagccccttcgtgcagagccagaagagagtggtgcacctgcagctgctgagaagacacaccctgagagccgccgagagaaacgtgagaagaaagaaggtgagcttccagctggagagaatcatcaagaagcagagactgctggaggcccagaagagactggagaagctgaccaccctgtgctggctgcaggacgacagcacccaggagcccccctaccaggtgctgagccccgacgccaccgtgcccagacccccctgcagaagcaagctgaccagctgcagcagcctgagcccccagagactgtgcagcaagcacatgccccagctgcacagcatcttcctgagctgggaccccagcaccaccctgccccccagacccgaccccacccaccagaccagcgagaagaccagcagcgaggagcacctgccccaggccgccagctaccccgccagaaccggctgcctgagaaagaacggcctgcacagcagcggccacggccagccctgcaccgccagagccgccctggccagaaagggcgccagcgcccccgacgcctgcctgaccatgagccccaacagcgtgggcatccaggagatggagatgggcgtgaagcagccccaccagatggtgagccagggcctggccagcctgagaaagagcgccaacaagctgaagcccagacacgagcccaagatcttcaccagcaccacccagaccagaggcgccaagggcctggccgaccccagccacacccaggccggctggagaaaggagggcaacctgggcacccacaaggccgccaagggcgccagctgcaacagcctgtacccccacggccccagacagaccgccggccacggcaaggccgtgaagaccttctggaccgagtacaagccccccagccccagcagagccagcaagagacaccagagagtgctggccaccagagtgagaaacatcaccaagaagagcagccacctgcccctgggcagccccctgaagagacagcagaacaccagagaccccgacaccatggtgcccctgaccgacttcagccccgtgatggaccacagcagagagaaggacaacgacctgagcgacaccgacagcaactacagcctggacagcctgagctgcgtgtacgccaaggccctgatcgagcccctgaagcccgaggagagaaagtgggacttccccgagcccgagaacagcgagagcgacgacagccagctgagcgaggacagcctggccgagaagagataccagagccccaagaacagactgggcggcaacagacccaccaacaacagaggccagcccagaaccagaaccagagccagcgtgagaggcttcaccgccgccagcgacagcgacctgctggcccagacccacagaagcttcagcctggacagcctgatcgacgccgaggaggagctgggcgaggaccagcaggaggagcccttccccggcagcgccgacgagatccccaccgagaccttctggcacctggaggacagcagcctgcccgtgatggaccaggaggccatctgcagactgggccccatcaactacagaaccgccgccagactggacgccgtgctgcccatgagcagcagcttctacctggacccccagttccagccccactgcgagctgcagccccactgcgagctgcagccccactgcgagctgcagccccactgcgagcaggccgagagccaggtggagcccagctacagcgagcaggccgacagcctgcagggcatgcagctgagcagagagagccccctgatgagcatggacagctggttcagctgcgacagcaagatcaaccccagcagcccccccggcatcgtgggcagcctgtgccccagccccgacatgcaggagttccacagctgcaagggcgagagacccggctactggcccaacaccgaggagctgaagcccagcgacgccgagaccgtgctgccctacagcagcaagctgcaccagggcagcaccgagctgctgtgcagcgccagagacgagcacaccgccagcgccgccgacaccagcagactgagcctgtggggcatccagagactgatccagcccggcgccgacggcaccttccagggcagatgcatccccgacatgacccagcagggcagcagcgaggccagccacaacagcagcgtgagcaacgtgctggccgccagcgccaccaccctgacccacgtgggcagcacccacgagagagactggagcgccctgcagcagaagtacctgctggagctgagctgccccgtgctggaggccatcggcgcccccaagcccgcctacccctacctggaggaggacagcggcagcctggcccaggccagcagcaagggcggcgacaccctgctgcccgtgggccccagagtgagcagcaacctgaacctgaacaacttccccgtgcacctgagcagaatcagaagactgagagccgagaaggagcaggacagcctgaacgccaagctggagggcgtgagcgacttcttcagcaccagcgagaaggaggccagctacgacgagacctacagcgccgacctggagagcctgagcgccagcagaagcaccaacgcccaggtgttcgccaccgagaacgccatccccgacagcatgaccgaggcctgcgaggtgaagcagaacaacctggaggagtgcctgcagagctgcagaaagcccggcctgatgaccagcagcgacgaggacttcttccagaagaacgcctgccacagcaacgtgaccaccgccaccaaggccgaccactggagccagggctgggcccccctgagaaagaacagcgccgtgcagcccggccagctgagccccgacagccactaccccctggaggaggagaagaccgactgccaggagagcagcaaggaggccgtgagaagacacatcaacgtgagcttcgccctgcccagcggccccgagctgtacctgcacagcgccccctggaaccccctgagcagcagcctgcagccccccctgctggagaccttctacgtgaccaagagcagagacgccctgaccgagaccgccctggagatccccgcctgcagagaggtgagagtgcccagccccccccccagagaggcctggggcttcggccacaaccaccaggccctgcagggcgcctacctgaagaacaacctgcccgtgctgctgcagaaccagaacagcaagatcgccagcagccagcaggtgaccgccgagatccccgtggacctgaacaccagagaggtgatcagagagagcggcaagtgccccggcaacatcaccgaggagagccacgacagcgtgtacagcagcgtgacccagaacagacacttcctgcccagcaccagcaccaaggtgtgcgagttcgagaaccaggtggtgatcctgaacaagaagcacagcttccccgccctggagggcggcgaggtgaccgcccagagctgctgcggcgccagcagcgacagcaccgagagcggcaagagcctgctgttcagagagagcgaggccagagaggaggaggagctggaccagaacaccgtgctgagacagaccatcaacgtgagcctggagaaggacatgcccggcgagagcgccgtgagcctgaagagcagaagcgtggacagaagagtgagcagccccgtgatggtggcccagggcggcggccccacccccaagtgggagggcaagaacgagaccggcctgctggagaagggcctgagacccaaggacagcagcgaggagttcaagctgcccggcaccaagcccgcctacgagagattccagctggtggcctgcccccaggagagaaaccccagcgagtgcaagagccaggagatgctgaaccccaacagagagcccagcggcaagaagcagaacaagagagtgaacaacaccgacgagatggccagactgatcagaagcgtgatgcagctggagaacggcatcctggagatcgagagcaagcagaacaagcaggtgcacgccagccacacccccggcaccgacaaggagctggtgttccaggaccagaaggagcaggagaagaccgaccacgccttcagacccgacagcagcggcaaccccctgcccagcaaggaccagcccagcagccccagacagaccgacgacaccgtgttcagagacagcgaggccggcgccatggaggtgaacagcatcggcaaccacccccaggtgcagaagatcacccccaaccccttcagaagcagagagggcgtgagagagagcgagcccgtgagagagcacacccaccccgccggcagcgacagacccgccagagacatctgcgacagcctgggcaagcacaccacctgcagagagttcaccaacaccagcctgcacccccagagaatgaaggccctggccagagccctgcccctgcagcccagactggagagaagcagcaagaacaacggccagttcgtgaaggccagcgccagcctgaagggccagccctggggcctgggcagcctggaggagctggagaccgtgaagggcttccaggagagccaggtggccgagcacgtgagcagcagcaaccaggaggagcccaaggcccagggcaaggtggaggagatgcccatgcagagaggcggcagcctgcaggaggagaacaaggtgacccagaagttccccagcctgagccagctgtgcagagacaccttcttcagacaggagaccgtgagccccctgctgagcagaaccgagttctgcaccgcccccctgcaccaggacctgagcaacaccctgcccctgaacagccccagatggcccagaagatgcctgcacgtgcccgtggccctgggcatcagcagcctggactgcgtgctggacctgaccatgctgaagatccacaacagccccctggtgaccggcgtggagcaccaggaccagagcaccgagaccagaagccacagccccgagggcaacgtgagaggcagaagcagcgaggcccacaccgcctggtgcggcagcgtgagaagcatggccatgggcagccacagccagagcggcgtgcccgagagcatccccctgggcaccgaggacagaatcagcgccagcaccagcccccaggaccacggcaaggacctgagaatcaccctgctgggcttcagcaccagcgaggacttcgccagcgaggccgaggtggccgtgcagaaggagatcagagtgagcagcctgaacaaggtgagcagccagcccgagaagagagtgagcttcagcctggaggaggacagcgaccaggccagcaagcccagacagaaggccgagaaggagaccgaggacgtgggcctgaccagcggcgtgagcctggcccccgtgagcctgcccagagtgcccagccccgagcccagactgctggagcccagcgaccacgccagcatgtgcctggccatcctggaggagatcagacaggccaaggcccagagaaagcagctgcacgacttcgtggccagaggcaccgtgctgagctactgcgagaccctgctggagcccgagtgcagcagcagagtggccggcagaccccagtgcaagcagatcgaccagagcagcagcgaccagaccagaaacgagggcgaggcccccggcttccacgtggccagcctgagcgccgaggccggccagatcgacctgctgcccgacgagagaaaggtgcaggccaccagcctgagcgccgacagcttcgagagcctgcccaacaccgagaccgacagagagccctgggaccccgtgcaggccttcagccacgccgcccccgcccaggacagaaagagaagaaccggcgagctgagacagttcgccggcgccagcgagcccttcatctgccacagcagcagcagcgagatcatcgagaagaagaaggacgccaccagaacccccagcagcgccgaccccctggcccccgacagccccagaagcagcgcccccgtggaggaggtgagaagagtggtgagcaagaaggtggtggccgccctgcccagccaggccccctacgacgaccccagagtgaccctgcacgagctgagccagagcgtgccccaggagaccgccgagggcatcccccccggcagccaggacagcagccccgagcaccaggagcccagaaccctggacaccacctacggcgaggtgagcgacaacctgctggtgaccgcccagggcgagaagaccgcccacttcgagagccagagcgtgacctgcgacgtgcagaacagcaccagcgccagcggccccaagcaggaccacgtgcagtgccccgaggccagcaccggcttcgaggagggcagagccagccccaagcaggacaccatcctgcccggcgccctgaccagagtggccctggaggcccccacccagcagtgcgtgcagtgcaaggagagcgtgggcagcggcctgaccgaggtgtgcagagccggcagcaagcacagcagacccatccccctgcccgaccagagacccagcgccaaccccggcggcatcggcgaggaggccccctgcagacaccccagagaggccctggacggccccgtgttcagcagaaaccccgagggcagcagaaccctgagccccagcagaggcaaggagagcagaaccctgccctgcagacagccctgcagcagccagcccgtggccacccacgcctacagcagccacagcagcaccctgctgtgcttcagagacggcgacctgggcaaggagcccttcaaggccgccccccacaccatccaccccccctgcgtggtgcccagcagagcctacgagatggacgagaccggcgagatcagcagaggccccgacgtgcacctgacccacggcctggagcccaaggacgtgaacagagagttcagactgaccgagagcagcacctgcgagcccagcaccgtggccgccgtgctgagcagagcccagggctgcagaagccccagcgcccccgacgtgagaaccggcagcttcagccacagcgccaccgacggcagcgtgggcctgatcggcgtgcccgagaagaaggtggccgagaagcaggccagcaccgagctggaggccgccagcttccccgccggcatgtacagcgagcccctgagacagttcagagacagcagcgtgggcgaccagaacgcccaggtgtgccagaccaaccccgagccccccgccaccacccagggcccccacaccctggacctgagcgagggcagcgccgagagcaagctggtggtggagccccagcacgagtgcctggagaacaccaccagatgcttcctggagaagccccagttcagcaccgagctgagagaccacaacagactggacagccaggccaagttcgtggccagactgaagcacacctgcagcccccaggaggacagcccctggcaggaggaggagcagcacagagaccaggccagcggcggcggcgagggcttcgcccagggcgtgaaccccctgcccgacgaggacggcctggacggctgccagatcctggacgccggcagagaggaggtggccgtggccaagccccccgtgagcaagatcctgagccagggcttcaaggaccccgccaccgtgagcctgagacagaacgagaccccccagcccgccgcccagagaagcggccacctgtacaccggcagagagcagcccgcccccaaccacagaggcagcctgcccgtgaccaccatcttcagcggccccaagcacagcagaagcagccccaccccccagttcagcgtggtgggcagcagcagaagcctgcaggagctgaacctgagcgtggagccccccagccccaccgacgaggacacccagggccccaacagactgtggaacccccacctgagaggctacagcagcggcaagagcgtggccagaaccagcctgcaggccgaggacagcaaccagaaggccagcagcagactggacgacggcaccaccgaccacagacacctgaagcccgccacccccccctaccccatgcccagcaccctgagccacatgcccacccccgacttcaccaccagctggatgagcggcaccctggagcaggcccagcagggcaagagagagaagctgggcgtgcaggtgagacccgagaactggtgcagccagatggacaagggcatgctgcacttcggcagcagcgacatcagcccctacgccctgccctggagacccgaggagcccgccagaatcagctggaagcagtacatgagcggcagcgccgtggacgtgagctgcagccagaagccccagggcctgaccctgagcaacgtggccagatgcagcagcatggacaacggcctggaggaccagaacagccccttccacagccacctgagcacctacgccaacatctgcgacctgagcaccacccacagcagcaccgagaacgcccagggcagcaacgaggcctgggaggtgttcagaggcagcagcagcatcgccctgggcgacccccacatccccaccagccccgagggcgtggcccccaccagcggccacgacagaagaccccagttcagaggccccagcggcgaggccgactgcctgagaagcaagccccccctggccaagggcagcgccgccggccccgtggacgagatcatgctgctgtaccccagcgaggccggctgccccgtgggccagaccagaaccaacaccttcgagcagggcacccagaccctgggcagcagaagacactggagcagcaccgacatcagcttcgcccagcccgaggccagcgccgtgagcgccttcgacctggccagctggaccagcatgcacaacctgagcctgcacctgagccagctgctgcacagcaccagcgagctgctgggcagcctgagccagcccgacgtggccagaagagagcagaacaccaagagagacatccccgacaaggccccccaggccctgatgatggacggcagcacccagaccaccgtggacgagggcagccagaccgacctgaccctgcccaccctgtgcctgcagaccagcgaggccgagccccagggcgccaacgtgatcctggagggcctgggcagcgacaccagcaccgtgagccaggaggagggcgacgtgcccggcgtgccccagaagagagaggccgaggagaccgcccagaagatggcccagctgctgtacctgcaggaggagagcaccccctacaagccccagagccccagcatccccagcagccacctgagattccagaaggcccccgtgggccagcacctgcccagcgtgagccccagcgtgagcgacgccttcctgccccccagcagccagcccgaggagagctactgcctggtggtgagcagccccagccccagcagcccccacagccccggcctgttccccagcaccagcgagtaccccggcgacagcagagtgcagaagaagctgggccccaccagcgccctgttcgtggacagagccagcagccccatcctgaccctgagcgccagcacccaggagcccggcctgagccccggcagcctgaccctgagcgcccccagcacccaccccgtggagggccaccagaagctggacagcagccccgaccccgtggacgcccccagaacccccatggacaactacagccagaccaccgacgagctgggcggcagccagagaggcagaagcagcctgcagagaagcaacggcagaagcttcctggagctgcacagcccccacagcccccagcagagccccaagctgcagttcagcttcctgggccagcacccccagcagctgcagcccagaaccaccatcggcgtgcagagcagactgctgcccccccccctgagacacagaagccagagactgggcaacagcttcgtgcccgagaaggtggccagccccgagcactgccccctgagcggcagagagcccagccagtggcagagcagaaccgagaacggcggcgagagcagcgccagccccggcgagccccagagaaccctggacagacccagcagctggggcggcctgcagcacctgagcccctgccccgtgagcgagctgaccgacaccgccggcctgagaggcagcgccctgggcctgccccaggcctgccagcccgaggagctgctgtgcttcagctgccagatgtgcatggcccccgagcaccagcaccacagcctgagagacctgcccgtgcacaacaagttcagcaactggtgcggcgtgcagaagggcagccccggcggcctggacatgaccgaggaggagctgggcgccagcggcgacctgagcagcgagaagcaggagcagagccccccccagccccccaacgaccacagccaggacagcgagtggagcaagagagagcagatccccctgcaggtgggcgcccagaacctgagcctgagcgtggagctgaccgaggccaagctgcaccacggcttcggcgaggccgacgccctgctgcaggtgctgcagagcggcaccggcgaggccctggccgccgacgagcccgtgaccagcacctggaaggagctgtacgccagacagaagaaggccatcgagaccctgagaagagagagagccgagagactgggcaacttctgcagaaccagaagcctgagcccccagaagcagctgagcctgctgcccaacaaggacctgttcatctgggacctggacctgcccagcagaagaagagagtacctgcagcagctgagaaaggacgtggtggagaccaccagaagccccgagagcgtgagcagaagcgcccacacccccagcgacatcgagctgatgctgcaggactaccagcaggcccacgaggaggccaaggtggagatcgccagagccagagaccagctgagagagagaaccgagcaggagaagctgagaatccaccagaagatcatcagccagctgctgaaggaggaggacaagctgcacaccctggccaacagcagcagcctgtgcaccagcagcaacggcagcctgagcagcggcatgaccagcggctacaacagcagccccgccctgagcggccagctgcagttccccgagaacatgggccacaccaacctgcccgacagcagagacgtgtggatcggcgacgagagaggcggccacagcgccgtgagaaagaacagcgcctacagccacagagccagcctgggcagctgctgctgcagccccagcagcctgagcagcctgggcacctgcttcagcagcagctaccaggacctggccaagcacgtggtggacaccagcatggccgacgtgatggccgcctgcagcgacaacctgcacaacctgttcagctgccaggccaccgccggctggaactaccagggcgaggagcaggccgtgcagctgtactacaaggtgttcagccccaccagacacggcttcctgggcgccggcgtggtgagccagcccctgagcagagtgtgggccgccgtgagcgaccccaccgtgtggcccctgtactacaagcccatccagaccgccagactgcaccagagagtgaccaacagcatcagcctggtgtacctggtgtgcaacaccaccctgtgcgccctgaagcagcccagagacttctgctgcgtgtgcgtggaggccaaggagggccacctgagcgtgatggccgcccagagcgtgtacgacaccagcatgcccagacccagcagaaagatggtgagaggcgagatcctgcccagcgcctggatcctgcagcccatcaccgtggagggcaaggaggtgaccagagtgatctacctggcccaggtggagctgggcgcccccggcttccccccccagctgctgagcagcttcatcaagagacagcccctggtgatcgccagactggccagcttcctgggcagatag

SEQ ID NO: 205644 - DNA, 14103 bp, Artificial Sequence
  derived and/or modified sequence
atggccaatgtgcaggtggcagttcgtgtgaggcctttgagcaagagggaaacgaaggaggggggtcggatcatcgtcgaagtggacgggaaggttgctaaaattaggaatctaaaggttgacaaccggcctgacgggttcggggatagccgcgagaaggtcatggcctttgggttcgactactgttactggtctgtgaatcccgaagatccacagtatgcctcccaggatgttgtgttccaggaccttggaatggaagtactgtcaggggttgccaagggctacaacatctgcttgttcgcatacgggcagactggttcaggcaaaacttataccatgctgggaaccccggcctctgtcgggctgactccgagaatatgtgagggattgtttgtgagggagaaggattgcgccagcctaccaagctcctgcaggattaaagtatctttcttggaaatttacaacgaaagagtccgggatctgctcaagcaatccggacaaaagaagtcctacacactgcgcgtccgcgagcaccccgaaatggggccgtacgtgcagggattgagccagcacgttgtgaccaactacaagcaggtgatccagttgctggaggaagggatcgccaataggatcacggctgcaactcacgtgcacgaggccagctcgcgctcacacgcgattttcaccatacactacactcaggctattctggaaaacaacttacccagcgagatggcctctaagattaacctggtcgacctggctggctccgagagggccgatccatcgtattgcaaagaccgaatcgcagagggcgccaacataaacaagtcactcgtgactctcggtatcgtcatcagcaccctggcccagaactcacaagtgttcagtagctgtcagagtctcaattcctcagtttcgaatggcggcgattcagggattttgtcaagcccatctggtacaagctctggcggcgcaccgtctcggcgccagtcctatattccgtaccgcgattctgtactgacttggcttctcaaagactctttgggtggcaatagcaaaacaatcatggtcgccaccgtcagtccggctcacactagctacagtgagaccatgagcacgttgcgctacgctagcagtgccaagaacatcattaataagcctcgtgtgaatgaagacgccaatctcaagctcattagggaactgcgggaagagatagagcgcctaaaggccctgctgctgagttttgagctgcggaatttctcttcactctccgatgaaaaccttaaagaactggtattgcagaacgaattgaagatcgaccaattaaccaaggactggacacagaaatggaacgactggcaagctttgatggaacattattccgtggacattaacaggcgccgggcaggtgtggtgatagactcatccttgcctcacctcatggcactggaagacgatgtcttatccaccggcgtggttctgtaccaccttaaagagggcaccactaaaataggccggattgacagcgatcaggagcaggatattgtgctacaaggccaatggattgaaagggaccattgtacaattacctccgcatgtggagtggttgtcctaagacccgcccgcggtgcacggtgtacagtgaacggcagagaggtgacagcatcctgtcgactgacacagggggccgtgattaccctcggtaaagcgcagaagtttaggtttaaccacccagcagaggcagctgttttacggcagagacgacaggtcggggaagccgctgcagggcgcggatccctagagtggctggatctggacggtgatcttgcagcctcccggcttggattgtctcctcttttatggaaggagcgtcgtgcactggaggaacagtgcgatgaggaccatcagacacctcgagacggagagacgagccatagagcccagatacagcaacagcaaagttacgtggaagatctgcgccaccagatactggctgaagaaataagggctgccaaggaattggaattcgatcaggcttggatttcgcaacagataaaagaaaaccagcaatgcctactgcgggaggagacctggttggcctccctgcagcagcagcaacaggaggatcaggtggcggagaaggagctcgaggcatcagtagcgctggacgcctggttgcaaaccgaccctgagatccagccctctcctttcgtgcagagtcagaagagggttgtacatctccagctcctgcggcgtcacactctgcgcgcagctgaacggaacgtacggcgtaaaaaggtgtcctttcagcttgagcgcattatcaagaagcagcgactccttgaggcccagaaacgactggaaaagttaaccacactgtgctggctccaggacgactccactcaagagcccccataccaggtcctttctcccgatgcaaccgtgccaaggcccccatgtcggtccaagttaaccagttgctcttcactcagcccccagcgtttgtgtagtaaacatatgccgcagttgcattcaatcttcctgagctgggacccctccactacccttccgccgagacctgatccaacccaccaaacctccgagaagacaagttctgaagagcacctcccccaggctgccagctatcccgcacgcaccgggtgcttgagaaaaaacggtctgcactccagcgggcatggccagccttgcactgcaagggccgcactggcaaggaagggcgcctctgctcccgatgcctgcttaaccatgtccccgaatagcgtgggcatccaggagatggagatgggggtgaaacagcctcatcagatggtcagccagggactggcatccctgcggaaatcggctaacaaactcaaacccaggcacgaacctaaaatcttcacatcaaccactcagaccaggggagccaagggccttgccgatcctagccacacgcaggcaggttggcgaaaagaaggcaatctgggcacgcataaggcagctaaaggcgcctcttgtaattccttgtatccacacggcccccggcagactgcagggcacggcaaagccgtgaaaaccttctggacagagtataagcctccctcgccatctagggcttctaaaaggcatcagcgcgtgttggctacccgtgtcagaaacatcacaaaaaagtcttcgcacctgcccctcggatctcccctgaagcgacagcaaaatactcgcgatccagacacaatggtgccactcacagatttttcaccagtcatggatcattctagggagaaggataacgatctgtccgacaccgactccaattacagcctggacagcctgtcttgcgtgtacgcaaaagccctgatcgaacccctgaagcctgaggaacggaagtgggattttcctgagccggagaactccgaaagcgacgactcacagctgagtgaagactcgctagcagagaaaagatatcagtctcccaaaaaccggctggggggaaataggccaactaataatagagggcagccccggaccaggacgagagcatcggtaaggggattcactgcagccagcgattcagacttactcgctcagacccacagatccttcagcctggatagccttatagacgctgaagaagagcttggcgaagaccagcaagaggaacctttccctgggtcggctgatgagatcccaacggagactttctggcacttagaggatagtagtctgcccgtgatggatcaagaggcaatttgcaggcttgggccgataaattaccggacagctgcgcgtctggacgccgttctgccgatgagtagcagcttctaccttgacccccagtttcagcctcactgcgaattacagccccactgtgagctgcaaccacattgcgagctccaacctcactgtgagcaggcggaaagtcaggtcgagcctagttacagtgagcaggctgactcccttcagggaatgcaactcagtagagagtccccgctaatgtcgatggattcgtggttcagttgcgattccaaaataaatccaagcagtccacccggcattgtgggttctctgtgtccctccccggatatgcaggagtttcacagctgcaagggagaacgaccaggctactggcccaatactgaggagcttaagccaagcgatgccgaaaccgtgcttccatatagctccaaactgcaccagggttctacagagttactgtgttcagcgcgggacgaacacacagcgtccgccgcggatacctccagattatcactgtggggcattcagcgcctgatccagccaggtgctgatggcacctttcagggcaggtgcattcctgatatgactcaacaaggaagcagtgaggcatcccataatagttcagtctctaacgtgctggcagcaagtgccacgaccctgactcacgtgggtagcactcacgagagagattggtctgctctccaacagaaatacctccttgagctgtcctgtcctgtgctggaggccatcggggcgccgaaacctgcatacccctatctcgaagaggattccggctctcttgctcaggccagctccaaaggaggcgataccctcctgcctgtcggaccaagagtctcctctaatctgaacctcaacaacttccctgtgcatctgtctcggattaggcgactgcgggctgagaaagagcaggacagcctgaatgccaagctggaaggcgtgagtgacttcttctctactagtgagaaggaggccagctatgacgagacttacagcgctgatctcgaaagcctgtccgcgtcacgctcaaccaacgcccaggtcttcgccacagaaaacgctatccctgattctatgactgaggcatgcgaggtcaaacagaacaatctcgaggagtgcctgcagagctgccgcaaacctggactgatgacatcttcagacgaggatttttttcaaaagaatgcgtgccattcgaacgttaccaccgctactaaggcggatcattggtcacagggatgggcgcccctgagaaaaaatagtgcagtgcagcctgggcagttatcccctgacagccactatcctctggaggaagaaaaaaccgactgccaggagtcaagtaaagaagccgtgcgtagacatattaacgtatcctttgcattaccttcaggccccgaactctacctccatagcgcaccgtggaaccccctctcctccagcttacagccacccctgctcgagacgttctacgtcacgaagagtcgggatgctctcacagaaactgccctggagatccccgcctgccgagaagttcgggtacctagccctcccccacgggaggcctggggcttcggacacaaccatcaagctctgcaaggtgcctacttgaaaaataaccttcctgtgcttctgcagaaccagaattccaaaatagcgtctagccaacaggtaactgcagagatcccagtcgatttgaacacccgggaggtaattagagaaagcgggaagtgccctggaaacataacagaggagtcgcacgacagtgtgtactcatcagtgacccagaataggcacttcctgccatccactagcaccaaggtctgtgaatttgagaaccaggtggtgatattaaacaaaaaacactcctttcccgccctcgagggtggcgaggtgacagcacagagctgctgcggcgcatcttcagacagcacagagagcgggaaaagcctattgttccgggaatctgaggctagagaggaagaagagctggatcagaacacagtgctgaggcagacaattaatgtttcgttggagaaggatatgcctggcgagtcagcagtatcgctgaagagtcggagcgttgataggcgggtctcatccccagtgatggtggctcagggaggcggaccaacccccaaatgggaaggaaaaaatgaaaccggccttctagagaagggactgcgccccaaggattccagcgaagaatttaaactccccggtacgaagcccgcttacgagcgctttcaactggtcgcatgcccacaggaacggaatcccagtgagtgcaaatcccaggaaatgttgaaccctaaccgggagccctcaggaaaaaagcagaataagcgagtgaacaacactgacgaaatggcccggctgatccgcagtgtgatgcaactggagaatggtatactggaaatcgaaagtaaacagaataagcaagtgcacgcgtcccacacccctggtactgataaggagctcgtctttcaagatcagaaggagcaggagaaaacagatcacgcttttcgacctgattcttctggaaacccccttcccagcaaggaccagccctccagccctcggcagacagatgacacagtgttccgcgatagcgaggccggggctatggaggtgaatagcataggaaatcatcctcaggtacagaaaatcactcctaaccccttccggtcacgggaaggcgtccgagagagcgaacctgtgcgggaacatacacaccccgccggaagcgatagaccagctcgagacatttgcgactctttggggaaacacactacctgcagggaatttacaaacacgtcgctgcatccccagcgtatgaaggccctcgcgcgggctcttccacttcagccgaggctcgaacgctcctccaagaacaatggtcagtttgtgaaggcaagcgcctctctaaaaggacagccttggggcctggggagtctggaggaattggaaacagtgaaagggtttcaagagagccaagtcgcggagcatgtctcctcttccaatcaggaggaaccgaaagcccaggggaaggtcgaggaaatgccaatgcagcgcggagggagcctgcaagaagagaataaagttacccagaagttcccaagtctaagtcagctctgcagagacacatttttcaggcaagaaactgtatcgcccctcctgtcaagaacagaattttgtaccgccccattgcaccaggatctgtctaataccttgcccttaaacagtcctagatggccacgcagatgcctgcacgtgccagtggctctaggcatttcctctctagattgcgtgctcgatctcaccatgctgaaaatccacaatagccctttagttacaggagtggaacaccaggatcagtctacagagactcgaagtcacagccctgaagggaacgtccgtggacggtcatcagaagcccacactgcctggtgcggaagtgtgcgtagtatggccatgggctcacacagccagtccggagtgccagagtcaatcccgctgggcaccgaggaccgcattagcgccagcacttcaccccaggaccacggtaaggacctcaggattacgttattgggattcagtacctcagaagacttcgcctctgaggcagaggtggccgtgcagaaagagattcgcgtgtcatcactcaataaagtgtctagtcagccagagaaacgagtgtccttcagtctcgaggaagattctgatcaggcctcgaaaccccggcagaaagcggagaaggaaacagaggacgtagggctgacctccggcgtgagtttagccccggtcagtctgcctagagtgccttcccccgagcctcgcctgttggaaccttccgatcatgcttcaatgtgcttggctatcctcgaggaaattcggcaggcgaaggcgcagaggaaacagttgcacgacttcgttgcacgggggactgtgctttcatactgcgagacactgctggaaccagagtgtagttcaagggtggcaggacggccacagtgcaagcaaatagaccagtcatcttcagaccaaacacggaacgagggggaggccccaggcttccatgtagcctctctttcagcagaagctggccagatcgacctgcttcccgacgagaggaaggtgcaggccacgtccctgagcgcagacagttttgaatccctacccaacacagagaccgacagagagccctgggacccagttcaagccttctctcatgccgcaccggcccaggaccgcaagcggcgcacaggcgaactgagacagttcgcaggagcatcagagccctttatatgccactcctcttcttccgagataattgagaaaaagaaggacgcaacacgcaccccaagttccgccgaccccctggcccccgacagcccccggtcatcggcgccagtggaagaggtgcgacgcgtggtctcaaaaaaggtggtagctgcgctaccttcccaggcaccctatgatgatcctcgtgtgacccttcacgagctgtctcagtccgtgcctcaagaaactgcagagggcatcccccctggttcgcaggacagtagccctgagcaccaggaaccccgcaccctggacactacatacggagaggtctctgacaacctcctggtcacagctcagggggaaaagaccgctcactttgagagccagtccgtgacttgcgacgtccaaaatagtacttccgcatccggccccaaacaggatcacgtacaatgccccgaggccagcaccggctttgaggagggtcgagcctcacctaagcaggacaccatccttcccggggcacttacgcgcgtcgcgttggaagcccccacccaacaatgcgtgcaatgcaaggaatctgtcggctcaggccttactgaggtatgtcgagcaggctccaaacactctagacctatccctctgcccgatcagagaccctcggccaaccccggcggaataggggaggaagcgccctgccgtcacccacgcgaggcgttggacggaccggtgttcagtaggaaccccgaggggtctcgcaccttaagtccctcgcgaggaaaggagtcccggacacttccctgccgtcagccatgcagctcccagccggtggccacccacgcttactcctctcattcttctaccctactctgttttcgcgatggagatctgggtaaagagccgttcaaagcagccccacacaccattcaccctccgtgcgtcgtcccatcgcgggcttatgaaatggacgaaaccggcgagattagtaggggtcctgatgtgcatttaacacatggtcttgagccaaaagacgttaatagggagttccgactgaccgaatcttctacttgtgagccctccacagtggctgctgtgttgagcagagcccaggggtgtcgatccccaagtgccccagacgtgaggactgggtcattctctcactccgccaccgatggttctgttggattaattggagtgcccgagaaaaaggttgccgaaaagcaggcatcgaccgagttagaggcagcctccttccctgcaggcatgtactcagagcccttaagacagttcagagacagctccgtaggagatcagaatgcacaggtgtgtcagaccaatccagagccgccggccactactcaggggccccacaccttagacctgagcgagggaagtgcagaatctaagctggtggtcgagccgcagcatgagtgcctggaaaacaccactcgctgctttctcgagaagccccaattttccacagagctgcgcgaccataatcgcttagacagccaggccaagtttgtggcgagactgaagcacacatgctccccacaggaagactctccctggcaggaggaggagcagcatagggaccaggccagtggtggtggcgaaggctttgcccagggcgttaaccccctgcccgatgaggatggtctcgacgggtgccagatcttggatgcgggccgcgaagaggtcgccgtcgccaagcctccagtgtctaaaattctgtcgcagggcttcaaggatcccgctaccgtttcattgagacagaatgagaccccgcagcctgcagcccagaggagcggtcacctgtatacaggtcgagaacagccagcccccaaccaccgtgggtctctgccagtgaccacgattttctctggcccgaaacattctaggtcctccccaactccgcagttcagcgtcgtcggaagctccaggagtctccaagagttaaacctgagcgtcgagcctccctctcctactgacgaggacacccagggcccaaatcgcctgtggaatcctcatctgcgggggtactcaagtgggaaaagtgtggcaagaacctccttacaggcggaagactccaaccagaaagctagttccagactcgacgacggaaccactgaccaccgccatcttaaaccagccacaccaccatatccgatgccaagcacactcagtcatatgcccactcccgacttcaccacaagctggatgagtggtacactagagcaagcccagcagggcaagagggagaaattaggagttcaggtgcgccccgagaactggtgcagccagatggataaaggcatgctgcatttcgggagtagcgatatttctccttatgccctgccctggcggcctgaggaacctgccaggatatcctggaaacagtacatgagcggcagcgccgttgacgtgtcttgttctcagaagccacaggggctgactctctcaaacgtggccaggtgtagctccatggataacggattggaggaccagaattccccgtttcatagccatctgagtacctatgccaatatctgtgacctgtccactactcattcctccacagagaatgcccagggatctaacgaggcatgggaggtgtttagaggcagtagcagtattgccttgggcgacccccacatacctacgtcacctgagggagtggcacccaccagtggacacgatcgtcgcccccagttccgaggccctagcggagaagcagactgtttgaggtcaaagcctccgttagccaaaggctcagctgctggacccgttgacgagatcatgctcctgtaccccagcgaggccggatgccctgttggacaaactcgcacaaatacattcgaacagggcacccagacgctcggatctcgtcggcactggtccagcacggatattagctttgcccagcccgaagcctcagctgtcagcgccttcgacctggcttcttggacttccatgcacaacctttcacttcatttgtcccagctgctccactcgacaagcgagctgctgggatcattgtcacagcctgacgttgcacggagggagcagaacacaaagagggacatacccgacaaggccccccaggcccttatgatggacggatcaacacagaccactgtggatgagggaagccagacggacctgacgcttccgactctatgcttacagacctcggaagccgaacctcagggtgccaatgttattctggagggccttgggtccgacaccagcactgtgagccaggaggaaggggatgtcccaggcgttccccaaaaacgagaagccgaagaaacggcccagaaaatggcacagctgttgtatctgcaggaggaatctacaccctataaaccccagagcccttccatccccagctcccatctgagatttcagaaggctccagtgggacaacatctgccttcagtaagcccatctgtctccgacgccttcctgccaccgtctagccagccagaggaatcgtactgtctagtagtttctagcccatccccaagttccccacacagcccaggtctgttccctagcacctctgaatacccaggcgattcacgggtgcagaaaaagctgggaccaacatctgccctttttgtggacagggccagctccccgattctcacacttagcgccagtacgcaagaacctgggctgagtccagggtccctcactcttagtgctccttcaactcaccccgtggagggccatcaaaagctggactccagtcctgacccggtggacgctccccgcacaccaatggataattactcacaaaccacagacgaactaggcggaagccaacggggtcggagttctcttcagcgctccaatggccggagcttccttgagctgcacagtcctcactcccctcagcagtcacccaaactgcaattctcgttcctgggacaacacccacagcaacttcaacctcgtaccacaatcggggtacagtccaggttactgccgcctcctctaagacatcgttcgcagagattaggcaacagcttcgttcctgaaaaggttgcatcccctgaacactgtccactgtctggcagagagcctagtcagtggcaatctcgaacggagaacggtggcgaaagctccgcctcaccaggtgagcctcagcggacactggatagaccatcctcttggggcggccttcagcatctttcaccctgccccgtgagtgagctgactgataccgcaggcctgagagggagcgctctgggtttacctcaggcctgccagcctgaagagttgctgtgcttttcctgtcagatgtgcatggctccagaacatcagcaccatagcttgagggacctgcccgttcacaataagttcagcaactggtgcggcgtccagaaaggtagtcccggcgggttggatatgacggaagaggagctgggagcctccggagacctgtcttcagagaagcaggaacagagcccaccacagccgccgaacgaccactcccaggactcagagtggtcaaagcgagagcagattcctctgcaggtgggggcccagaatctctccctctctgtcgagcttacagaagccaagctccaccatgggtttggggaggcggacgctttgctgcaggtcctccaatccgggacaggagaggccctggccgccgacgaaccggtcactagtacctggaaggaactctacgcacgccagaagaaggccatcgagaccctgaggagggagcgggcagagagactcggtaatttctgtcggactcggtctctctccccacagaaacagctgtccctccttcctaataaagacctgtttatctgggacctggacctgccttctagaagaagagagtatctacagcagctcaggaaagacgtcgttgagacaacacgcagtcctgagagcgtgagccggagtgcgcacaccccatcagacatcgaattgatgctgcaggactatcaacaggcccacgaagaggccaaagtcgagattgcaagagctcgtgaccaactgagggaacgaacggaacaggagaaattaagaattcatcagaaaataatctcgcagctcttgaaggaagaagacaagctccacaccctcgccaactcctcaagcctgtgtacatccagcaacggttccctgtcgtccggcatgacttccggctacaattccagtcccgcccttagtgggcagctgcaattcccagaaaacatgggtcataccaacttacctgactcaagagacgtgtggattggtgatgaaagaggaggacactcagccgtgcggaaaaacagtgcatacagtcacagagcctccctggggtcctgttgctgttctccatcctcattgtcaagcctcgggacatgcttctcctcctcctaccaagacctggcgaagcatgtcgtggatacttcaatggccgacgtgatggcagcctgctccgacaacctgcataatctgttttcatgccaggccacagctggctggaattatcagggggaggagcaggccgtgcaactgtactacaaggtgttcagtccaacccgccacggctttctcggcgccggggtggtttcgcagcccctgtctagagtctgggctgcagtctcagatcccaccgtatggcccttatactacaagcctattcagactgcgaggcttcatcagagagtaaccaactcaatttcactcgtatacctagtgtgcaacaccactctctgtgcactgaaacagccaagagatttctgttgtgtctgtgtggaggccaaggaaggccatttgtccgtcatggctgcccaatccgtgtatgatacttccatgccccgcccctctcggaaaatggtcagaggtgagattctgcctagcgcttggatcctgcagcccattaccgttgaaggcaaggaggtgacacgagtcatctacctggcacaggttgagctgggagcacctgggtttccaccacaactgttgtctagcttcataaagaggcagcctttggtaatagctcgtttggcctcctttttgggccgttag
